United States Patent Application Publication US 2006/0134663 A1 - sequence listing, part 45

SEQ ID NO: 88452 - DNA, 445 bp, Homo Sapiens
tgggccttttgatgcagctatggaaaagtctttccagaaaaatgcacgtgaacataaaattagaatgtttccaagatacgcatggaccctgtgaaacccactgaagattccatggccccagtctttctcaggctaacctctcaagctcttgaaggttataagagggattgatagtccatgattcaggtcttgagataaaaggcacgaacgtccctcccaaggggaaaccatgttgtgagagacccatgtatggctgaactaaacctgtgtgcatgtgagtgaagcagagcctcaagctccagatggatcttgagatggctgcagcctggcttgactgaaacctcatggatgacctcgagccagaacaaccgggctaaactgcttccagattcctgaccctcagaaacagtgaaataataaacgcttgttgttttaaactgctaaa

SEQ ID NO: 88453 - DNA, 310 bp, Homo Sapiens
cttggtggagttctctgctagtcctacctttcaggcagaggagttgaagagcaattccctccagtttccattagaaatgcttcttcttccatatcaaatattgtgagatagcctgaaacacctttcaacactttactacccttctccaaaattcaacagatatgatttccacggactttactcacaggggcttcagtagaagaggaagaggcttgggtttaattgaaggtggcctgagacatctgtgaggaacagcccttttagagacatatcccctacaaataaagcatcagaattattatcctaaaaa

SEQ ID NO: 88454 - DNA, 393 bp, Homo Sapiens
ggtgatgcagcaagaaagctgccaccagatgcagccccttgatctcggactgcccagcctctagaactgggcttcagtagaagaggaagaggcttgggtttaattgaaggtggcctgagacatctgtgaggaacagcccttttagagacatatcccctacaaataaagcatcagaattattatcctaatacatgaacatccatggttccttcagcaccatcgtaatgcagagaccatggggagatgcagggagagggctctgcacagcatggccaacttgccgggttgaaaacagacaacctccatggagcagggacttcaattagttaattccccatccccactgtcacccactaacatgggattctgattaaaaattaaattctctgcaaa

SEQ ID NO: 88455 - DNA, 754 bp, Homo Sapiens
ttttaatcaatgatgaaattatgatgaaaatagtcaatgaaagcagaaaccaactttactactagcattaaaagtctcttagaccagataagcaaagaataaactataatgtagtactcaagtaaactgaggtagtagaaagtattgaaaactttatccacccacctttctatttacattacttacaagagtttggttccatattagcctttcttacaagcaacactctatagtatgtacaaaggcaacaattgagaagtgaaaatctttgaaaaaaatacacttttggaagggaggggctcttagaaaaaaagagaataattttaagagttatgaatagtgtaaattgaggattattaagcagtgaaacaaatattcagctcctatgggttcatgagggttgataccaaaagcaagggccttggctacctgagcacttttaaagaatatagtattgtttttgccgatgctttggtgcaatttttaatcctaattttcatttatgttaaattagtgaatatgtaaatattaatatttataagaacagttcatacttataaacaaatggtataaagtagtattctcattttgggaatctcagccttaaaaaaaaggttggctttacttatattttagagtgtgtgaaacagaaaaatcaccaataagtaatatttcagcattatagacaatactagttgaaaatatatatatttttaaaggcatgtttaccagtcttgtatttctatttctgctt

SEQ ID NO: 88456 - DNA, 791 bp, Homo Sapiens
  misc_feature (20)..(20): n is a, c, g, or t
ccattcttctgacccacagnaaactgtcacatcataaaggtatgttagttgttacacagtttagaaaactattacagctgctcaagaaggttagctagctccagatttcaatccattcacaggaaagcaagctttattcctagaagaataattcatgctttgcaaaaagaggaaaacgtcctgcagttttagaaggtcttttctttctcaacacacccaaatttctttaaaatcctcaagaagtgcatttgttttcatggttgactcgaagaagtgagtataattaactcacaaaaggtgggaggaagggacaaattaaattttggtatgcatacaggtagcttcttccaagtgataatgagcaatgtgaaacaaagagattggcattaaatgtaatgaaggactagaggagtgtacctaaacctgaaacaaattccaagaagtggccttgacctaaaatgtttgcatcctgccagagacccttacttataagtcaggagatacctgatgcccaggagaactggtttttgtactctgtcttacacagactaagaattaagaatgcaggtgagaagtttagaaaacttcctgatgatcatatgaaaagacattaaactttacctggtaaaactatgaaatgttgcctgtagatttctaagaaaaatgagtaggaagttggaaatatttcagaattaagaatgtttttatataattagaactctttaagctatgtaattctgaaatctgtgtaacagacccctgtgtaaacataaagaactagttgaatatac

SEQ ID NO: 88457 - DNA, 657 bp, Homo Sapiens
atgtaaaattcaaattttattggaacccagccaggggcatttcattacacatcatctgtggctgcgtttgtgctatgatggtagagttgcagagtcgtgacaggaaacttatagtctataaaacctaaaatatttactatctttacagaaatagtttgctgactcctgccttaatgtatagacatgtttgctattttattggtttacttaagctataaacttgtgtaacccattgctttctacgtatagtatagatctgtttataatctgaaaacttcagaatctctaggtctaggtttcttcctatagtctatcccaaattactgagcctccagtgttttattgattttttaaatgatccttagtaaaaatattttacattgtgactcaagacactcacataaataatagaaacaaatttcatgaagcattactcattcttaatgtgtgaatcactttgacagtttccgttctcttctactccagttttttaaagtaccagtaaaaaatctaccaatttcacaccccacttatgggtcaatgcacacatgttaataaacatcatgaatctaacagattcaaatctaaacaacacaaaatgtttctcttctacactgtctaccaaggaagacgagtacagaaacagcaataaagttt

SEQ ID NO: 88458 - DNA, 548 bp, Homo Sapiens
aattcattcagttgagaggcacagttagtctacaagctgagatacaggctgccaaatttaagataacgatcagtgagatactcgctaaccactcctatccctaggttagaaggtgaaacattattatgccaaaggataaaatcaccttaaatccctagcactgaagtcatctacttactgattagttctcactctatcttatcacttttatttaatctccagttcagaataagtttggttgatgaagcagactagaagtagaaagcactaaaaagtgtgggtcaggaagatggaggaaagggagaggaattcgtagacagatataacagtgtaagtgatagctgtacttcttgactttgaagcataaaagggaaaaaaataaacgtatgctgtctatgataattatcctggattattaaaaaatttataattcctatgatctgaataaaaactcaggaaatatacatttctaaaaaaagtttatccacagtggttttgtttgtttgtttcgtatgagaatgataaaactaaaagcagtctttaaaaaa

SEQ ID NO: 88459 - DNA, 821 bp, Homo Sapiens
  misc_feature (599)..(651): n is a, c, g, or t
  misc_feature (683)..(751): n is a, c, g, or t
agtgtatttgtgtatatgtgtgtatacatatgtttatctcacacacattatgagcttgaattcttaattcatcctagcaaattctaccttattttacagaagtgaaagtgaggtatcagaagtgttaagtgacatgcctgaggcacccccctaacaggtgtcagagctgaaattcaaaccccatccagctggccccggagccagagcttcttgtactacacagaattgcccctgccacttccaccctccagtcatttctctatgagactgaagcaggaaggcagagcatcatcttgttcagcctcagctgggaacatgtgtactgggtgactcaaatttttcacccatttacacatatccacaaatgactgcaaaagtgccacggatatcaatttgagggttataaattttagcaagttggtaaattcacaaatacataaccttgaataatgaggatcaactgtaccatatttaataaagcacaaaacccacacagattgtcttattacagcatttgataaaatccaaaactctttcataaaaacactcaacaaacttaggaataaaacggaatcttcctagatatgataaatataacnnnnnnnnnnnnnnnnnnnnnnnnnnnnnnnnnnnnnnnnnnnnnnnnnnnnntgaatgttttccccttaagattgggaagaagnnnnnnnnnnnnnnnnnnnnnnnnnnnnnnnnnnnnnnnnnnnnnnnnnnnnnnnnnnnnnnnnnnnnnttaggaattcaaggtttgttcaacatctaaaaatcaaataagctaataaagaaaagaggtttatacctgc

SEQ ID NO: 88460 - DNA, 821 bp, Homo Sapiens
  misc_feature (537)..(537): n is a, c, g, or t
  misc_feature (546)..(546): n is a, c, g, or t
  misc_feature (553)..(553): n is a, c, g, or t
tccaaagtaggagttgcctccgaccagggaaggggattccaacgcaatgctaggtgacactgaagtggtcatttataactacgttactatggagacaggaaagatatatatttatccaaacctggggatgaattaatcttaaaaagatgagtacaagtacttcaacagatgaggacgatctgaaggttagctgtttgcttcatgtgaataggagcaaagcccaaggagaggacaccttcaccctccaacccttctgagtaaaacggagatcctatccctaaagcaaggctccaagtcaatgggcctgtgcacaatagaagaacatctggcctcggggacacgtttacctctaggcaaagagcaggagcgcagtattgagtattgttgtaaacaataccatttggaaacctggttccgctcctgtgagtccagcaaacgcctcaaagacgcccttttaggatttctttaaattaatctgagacaacgtgggaatactctctatatagtatctagcctactggatatgtggtttttggntggtggtgntggttgntttatttttatttttggcacggcactgaagtctgtgtaaataaaaggcccagataaactcggcgatgggcctttctgtcaaaaccaggctggctttacatggcaaaaccagggccttacgtgtttggacacctgactttccatgtcgcccgtaaaatcgctggtagggaaacattttaatttagtaggcaccttatttttaccgagatgcttaaggctgtcacgagctactactattgatgctagtaggaaataaacccgaggcgatg

SEQ ID NO: 88461 - DNA, 361 bp, Homo Sapiens
cttcaggaacaggtcccacgctgacccctctcgaacttgttttgctggtctcagaattatgtgtctgccctgcctcctggactgggagcttttcgaggagcagtatcatgtggggattaagagcacacactcgagccctaccacctggttgacatcccagctctgctgctgcctgactgtatgatagtgggcaagttacttagcctcttcatgcttcagtttcttcatctataaactggggataacaatagtacatactttttagggttgttgtgaggattgatttactagtttgtatgtaaagtgattaatgcctggtacatagtgactgctatataaatgttggtgatccataaaaaaa

SEQ ID NO: 88462 - DNA, 445 bp, Homo Sapiens
gcttgcccacctcctcagagaggcctcctgacccctgacacggccttgcccttcacctctatcgtcctttagaacagcccccacctcccgcacatcatgcagttgcaggttcaatggctactgcttgtcctccagactcctctccacaagccaacagctctctcctggctttgattttcaaccatttaagttgaaaaaaattcaaaacaaatgaaatgcacttaacagaaagccttgaggagttcagcaggccacccaaagtgaagggactcctttgggggtctttgttgttatcaattatttattgagccctgatgtgttcctggcgccaccaagaccgaaaggagacagggtccctgccctggggcatcccaacaaagaagggagagtttgtgaagcttaaaaatgtcccagatggtaaaacagttaaacataataaaaaaaa

SEQ ID NO: 88463 - DNA, 545 bp, Homo Sapiens
actcatagcacctaaaatgggtctccagggtccttgccctgtttatagtatccatcctgaaccattcgttttgacccataataatagtgatagtataatggctaccagttattgataatgtatcatgtgacaggcattgggctaaactcttgacaagcaccatctcactacattcttacagtaacacaacttgttcttgtgttgtcagcttctgacctcttgatctgttgtttatggcctttgtcttgtccctcagtgggggttctctagctctgacctctgggtgaccccctcagttgttgattgctctcactccccttggctgttgtgcttcatggccagcactcttgatgagggtcttggtctataaacaggcatagatagctagaacataatgtgagcagtgtttgccttcaggtggtggggttatgggtagtttttattttcttccttctacttctctatacatttcagattctctacagtaagcatgtgttacatttgtaattataaaagtaagtaaacttcatttatgaaaaaagaaa

SEQ ID NO: 88464 - DNA, 394 bp, Homo Sapiens
acgagggagcctgaacttcagggggacatcgagcgaggcaggtgttccaccccactttcttgtttgaggggagaaggaaaccaaagccagtagaaatggaatttatggcctccgtgctctcagagggagaaaaaaattctcactcatcagcctaaagagaaaccctgtcttatcccagattaccaccatgggatttaaaattcagtgagaagactgcttgggaaatactgtctccgaactgccggtacagacactgcccattggtacaatatttttaggtcatctgtcaattgccatgtttgcatttctttcatgcaatacaagttgaaatcataatgaatttctagagtttcaggaatatctcaaaataaacttcttcatcctcaacaaaaaa

SEQ ID NO: 88465 - DNA, 554 bp, Homo Sapiens
ttaagctgttctgcagattggggtgttattatatggcaacaggaaaatgtccagccatctttgagtttttatccagctacttctgttgtttaagacgttgcctggtctccaaaatcatcctatatatttgcagctgcaaatgagaacagggtggagatttgggaccttcatatcagcactttggaccctctgattgtgaatactgctaaccctggaatcaagttcacaaccattctctttgccaaacaaacagattgccttctggtaggagacagtgatggacaggtttctgtgtatgaactgagaaatatgcctactgttttggaaactggccggggagatataatggatactttgcttggatccaagtcaaaccaatcagcataattcatcattcctaatatttttcttgtagttgttttaaaaaaggaattaacatccaatattctgtattacatactgtacaccagattttgatttcagaaaacaatatttgatgtataacttccacttaatttaaatttaataaacttttatttcagagatatttgaaa

SEQ ID NO: 88466 - DNA, 448 bp, Homo Sapiens
ctctccacaaaaaaagatgatcaaataatttacatagaatttttcccttctcagtctttgggtaactaagtgtggttttattgacgatgaaatacaagatgggtcatttaaaagcaacttcttgtcatcacttggtattttgctaaatccacggtgagctggagctcccgtagtcacctatcaccgcgtgtattttaaggagtcagatattctcgaaactgttaagatcatgaaagacaaagagactaaggaactgtcacagattaaaggagactaaagatacttgacaactgaatgtaatatatgacactcaaccggctcctgtaccagaaaaaggacattggttatattggtgaggtttgaatatctgtagattaccaatactattcttggttatggtggttatgtaagatttagagaagttgaataaaggatataaggacaaaaa

SEQ ID NO: 88467 - DNA, 452 bp, Homo Sapiens
agggtcccttaattcctgtcaccattataaaacacaggcattaaacggctgggaaaaggaccctcctttgggggagtgagccccaaggttatacccaggactcatagcccaaagcacaacctcggccattgcaggtttcacagcttcagtcagagtggtgccaggaagcccaaaagccaagagggaaggtcagcagaagctgcctggcaaggccccaggccagccaggcccaccccagagccaagagaaacttcaagcaggactgagaactggtagctggctctagtgatcctgaaagcatgttcccttcagaccagcagagtgaagacagacagatgtgtggccctaaaaggcagaacagttttgatgccagaacttcaggactgtcaccacagtccctttttaaacctcccctatttacagtgaaataaaattcctattttctttttaaa

SEQ ID NO: 88468 - DNA, 583 bp, Homo Sapiens
ctgtggtatctctccaagtgatgcaatgttggggtctagtgatgatgctggtatagctcccaaacgtgctaagtgaaacaccaagagtagtcaaaggatttggggtcggtattgcaagcaatcctgcaccaggcatcagacttgtcatggttggagcaggagccaataaagagagggctttggattcatatgggattttaccttctgcacaaggaacaactatcagagctctgtcaataaaaaccgtgttagttagatgctgggccacgccaacacttgatggatcacgaaacttaacataacatactttggaggaaaaagcaagaggtgcgttgtccggggggtagagccgcagctcctcgatttctcctaggaaggaaaaaagcgtccgcatctgctcgctggtcaccgccgacgacagattcgtcacctgaatcaccgacgtgggggtgaggccgaagcctaagcccaaaccgaagccgccgccgctgttcatcccgatcccgctgccgttgccttcccgctccccaacgtctacgacgcgtcagcgacggagccgggaaagcggagaacgcgcggccgc

SEQ ID NO: 88469 - DNA, 258 bp, Homo Sapiens
  misc_feature (118)..(152): n is a, c, g, or t
tatacggctgcgagaagacgacagaagggggaggttaatgccttaaagcttgcttaaaaacattttaattgcctaataacaatagtaacattaaaataatctaataacactcagtagnnnnnnnnnnnnnnnnnnnnnnnnnnnnnnnnnnncttactctgaaataagtacgatttggcatattcattgctgaattctaatcaattacttctgataaggactgcaactttcacattatttttccttatccccttagac

SEQ ID NO: 88470 - DNA, 700 bp, Homo Sapiens
tcactttcccatatggctaccatgctggttttaatcatggtttcaactgtgcagaatctacaaattttgctactgtcagatggattgactatggaaaagttgccaaattggagggcagggcatgcatgcagccatgtgaactgagagtgagagggaaatggatgagatgcttaatgtcagatctatgccactgccctcatgcttgaccttgtggcagccaagccagagatggccatgcgctccgtaccacggtcattctcagctgaatctacatcacattcacccggaagcctgggagtaatctgtacctaggagtctgcagggcatgaccagcctgcagtactgtgttgacgaggaagatggcagcctctttgatatgagatagggctcatctgcatgttacgtgtagtggcatgtcactgctgccactgctcttctgctaccaggatggcttgaatgcaatataggctgttccatgtgtgctttccctccgttatgaaacttcttcctgtggggtgagatgctgcagtgtgtgtcactttattcacttgaatcagaattcagctttgtatattgaatcccaatttttatggttacatctgaagagataatcacctatttgatattaactgtagaatcagtctttgaaatttataatccccagcattactaactgcattaaagaacattaactgttaaa

SEQ ID NO: 88471 - DNA, 223 bp, Homo Sapiens
ctccttcctgtcagatgggtaatgtgctgacatcataacaaggttggagggaggcacatctcacatgtgagtgtgaaaacccaatcaccacatgtatgaaccacaaaaggatctcaatatacctttaaataagaatctcaacttttaaaatattttgaaaacactgagccttgtatcaatactcacaaagtcaactttgaaataaagggttgtttaaaataaa

SEQ ID NO: 88472 - DNA, 317 bp, Homo Sapiens
aggcctgaggactgctactcccagggggaagttagattgtccggaaatggatgaaaagaggctgctggatccagggttgaaggttcataaaggcctctgggattatactctgaagaacccgcagacggaatgcctgagtgactgaagaaaatgggtgctaatgcatctaattatcctcattcatgttccccgagggtagggggaaattcacaggcccaacagacttttatagggacctcatcctattctcagcaaggctatggttgcgaatcaaagttgcatagccttgaccatggccatgagaaaccacaagacaa

SEQ ID NO: 88473 - DNA, 442 bp, Homo Sapiens
acaaggatatcgacattttgaaaccttgagtcctccattccaaactctcctgtataaagtctgcatttgtatgggcaaaataaatgaaatgggacacaggaaatatgtacttcgctgttttaacaccaatggagactgctagtttgcctaagagactaccgaaaacacaattctattatagtcacaaaagaaaatgaagttagaaaaactgaaagttacctataaaagtctgttgggcctgtgaatttccccctaccctcggggaacatgaatgaggataattagatgcattagcacccattttcttcagtcactcaggcattccgtctgcgggttcttcagagtataatcccagaggcctttatgaaccttcaaccctggatccagcagcctcttttcatccatttcttgatatgaaataaaaataatttaattcaaaaaa

SEQ ID NO: 88474 - DNA, 635 bp, Homo Sapiens
  misc_feature (604)..(604): n is a, c, g, or t
tttggcataaagtgtttataaattcttgggtacagctctgctgaaagtaaagttcactttcaatcctaaaaaaagtccgctattcctccagatgtgcttaaaggcaaatgtggactggaattacttggtgtcaatggggagcaactgctctatgccgtttattatgaaggactttaactcaactctccatcttcctccacttccaccctttcttggccattctcaatgattctcttggtggtgatttttttaccatcaactatttcagtggaagtcgacatggacttgaagctgcctgtcccatcactaccgtaggacatgcagaaggaagaaaggcccccacttcccagggagccaaaggaacgaaatctcgaaggggtccttgaagggcctgccgcctgcgcagccgccctccgccctcgcctcgccatagcggtcatagatatcgcgtttctacgcgtccgacaacacctcgtaggcctcagccacctgcttgaatcttctcaccgcttcctcccttgtcctcggcgtctttgtcggggtgccacttgagcgccagcttgcggtacgccttcttgataccctcggacgaggccctacccgngtactcccagcacctcgtagtagtccactat

SEQ ID NO: 88475 - DNA, 619 bp, Homo Sapiens
ttttttttaatcattggctgcctcaggcttaagtttaataaatagcaaattgcatacagatatttacaatgatcgaaagacaaacagaggtcctatccgtgcagtcccaacaataaagacaggcattggcataaagtgtttataaattcttgggtacagctgttctgaaagtaaagttcactttcaatcctaaaaaaagtccgctattcctccagatgtgcttaaaggcaaatgtggactggaattacttggtgtcaatggggagcaactgctctatgccgtttattatgaaggactttaactcaactctccatcttcctccacttccaccctttcttggccattctcaatgattctcttggtggtgatttttttaccatcaactatttcagtggaagtcgacatggacttgaagctgcctgtcccatcactaccgtaggacatgcagaaggaagaaaggcccccacttcccagggagccaaaggaacgaaatccgcttcctccctgtcctcggggtttttgtcggggtgccacttgagcgccactggcgggtagccttcttgatacccctggacgaggcctaccggggtactcccagcacaccgtagtagtccactat

SEQ ID NO: 88476 - DNA, 498 bp, Homo Sapiens
ccaacaatatttgtaccgtttttatttgtaaaaataaccatctgaatgcatttccatagtatattacagttaagtacttcattacgttattagagcattcagtagttgcaaaagtattaaactgtgcttgagaagattcagattgtttcaaagtcattcactgaactaaaagtcattttccccatttttacagtcatgacatttaccagagtcattcaactccaatttacataagaaaacattatagacaaaatcccactgaaatcatcaaacaatattttatgctgttacaaatatgttatgcaaaatataacactggcaccagatttgtatcatcgtgctttacaaagatatattgcacatgctagagcataaaatatgtagacaaaactaccaaataaaagatatttgcattgaatttttagatcacataagaaacgcatagaattacattttatacaaacactcagattgtcactatcttaaaatgcttttccc

SEQ ID NO: 88477 - DNA, 515 bp, Homo Sapiens
ccaatgcaagctctttcatccttcattaccccagttaccttctgaggaagaagtaaacagccttgggagggaaataattaaactgacaaaggaacaggcagctgcagaactggaagaggtcagaagagagagtcccatagaaggtcagaggagtgagacggggccagccccgccaggcctggccatccagggggagctccctaaatctcacctggactccttcgaggccagccggccagcagccaaagcttccacaccggaagacggcaaagggatcccagagggcggaggcatgaggagcaccgtgaaaacctgaaggggagagggatctgacacaatgacacattgaaagccccagagagggtcaagaatgaagcatcggaatggtgcgctcacgtcgccttctcctgaaatacctccgagtctgcaagtgagaaaacgcgctgatcctgttgcaaactgtgaatattctgatgatgccagtacagtttgatttattaaatgtaggtcctcaa

SEQ ID NO: 88478 - DNA, 625 bp, Homo Sapiens
cgatatcatgcagctccctgcaatagcatttataatatctcttttgagaagaaatttcttcagatattaagcaaactgcttcttgacctttcatgtgaaatttccttacttaagtctgaatgccatcgcgttaaaatgcaaagagctggtttgcaaaatgaattgttctttgcattttcagtttcatctctagacactgaaaaaggacccaagcgatgtacagaccataactgtgaaccttacaaaagactttttaaggctaaaaatctcatagagagattttttaatcaacaagtagaaattcttggcagacgtgcagaacaattacctcaaatatactatattgaaggtactctccaaatggtttggattaatcgctgctttccaggatatggaatgaatgtccagcaacatccaaaatgtcctgagtgctgtgtgatctgcagccctggatcatataacccccgtgatggaattcattgccttcaatgcaatagcagcctggtgtatggagcaaaaacgtgcttataagccattatcttcagttattcagtggtttattaaatgcaaagtatatatttgaaatattaacataataaattattatgccaaaattaaaaataaa

SEQ ID NO: 88479 - DNA, 586 bp, Homo Sapiens
tattacttctgtcccaatttggcagtttcaggaaattgagaaggaatgtcactgaatctttaatgccagttacacagagctcagtaggtgtccgcacagccctttagatgcacgtagcctatttgatcttcgtatcagccctgtaaggttgggcttaagaatgacccagcatggaagtactcttgggaccacaggggaagcaacagtccttgtaagctgtttgtcagtgggccttagcaaccaagccccaagtggacagaaagatggggttctgtgagcatccattccaagggtcactttaggggtgcaatcttctgggctctgagaatggattcacagcagcatctctatctggaaatacctttgctttgtccaagtaacctcctcccacacagagtacccgaatcagctcagattttttttccttaatattggcaacacttaatgctacttctttgttcgtaacatttcatttaattatttaaaaatctgcaaatgttgtgtatattttaccgcaatttttaaacaaactccagtgtagaccgtgctctagcatttctaaaaataaaagtaaataagttaaaat

SEQ ID NO: 88480 - DNA, 796 bp, Homo Sapiens
caacactaatggttggttcttttgaaaagcgtaatacaaatttaatcctctagcattactgacaagaaaaaatagaggagaaacaaactgccaatatttggaaggaagaagagagtatcatagcagatcttgcagatgcagagtccagcgacacagagggctgagggtgtagaacatgttccctctgagatcacagatgagacgttcttgctatcaccacttgcatttcacattggactgaacgttctatccagtgcaaatcctagccaggcaagagaaagttaaacccttctcaggcaccaccccatccaggaaaccactccccaagaggaagaacacgtggaacttcctgaaatgcgcctacatggtgatgacctacctcttcgtatcctacaacaaaggggactggttcactttttcctcccaagtgttactgccactactgtaacttggaactggacatcagggatgatccctgctgttctttctagtgagcctgctccatctcagcttagccttcacaaggcctccatctcccaggcattctaacctctgaagaaagctctctgtcccctggactgcctgtgtggagggtaatgaactgggtcctttaaggaatggcacctgggtgcccagaggcatggccagaaggtgtctgtgggggccatgccttagggggatgcacccagggcggctgagagagcaactgcaggagtttcccctaaaatctctcctccagatcgttctcgaactttccccactacttccataataaaatgtaaacttgttgaaaaaa

SEQ ID NO: 88481 - DNA, 532 bp, Homo Sapiens
  misc_feature (431)..(431): n is a, c, g, or t
tttcgtatcagaatggttattcatgggcaagggactggcccatggaaacccagctatggagaaggttcaaagccctcgtggcctggtgtctcgctctccccaaggtctggctgccattgcttccctctattcctatcacctgcactgtgcctgccacacccacccagctccccctccctaggcaccttgcagcagttccagcaatcctgcatgttgatccagtagttcttgtggttccacaggctttcgatgcccaggaagtgctcatcctgggtgctgtagctatgtcctgtgaatgggtcgatgaagaagttctcaggcacctcgcgcttccccgatagcacaaggacccaggagtgcacccgcaggccgtgcagggcatccggctttgccttctccgcttccatgaggcgctcctcctcctccctcanccgcttcttctcctgggctctgatctcctgctgcttcttcacctcttgctcctgctcaaacctgctgcacaggtccctggggggtttgatggtatacttct

SEQ ID NO: 88482 - DNA, 1000 bp, Homo Sapiens
ctctagcagtttggtaatttagcagcatcatttatttgggattcttttatctgatttcaacagtgaaaaacatccctatgataaagcctaatgacccatttcacaaaagatggaatttgcccttcctagaaaatatgacggagaaaagtctgactcagagaaagtgagtctgaattttataaggggtagtaagaattggacaattcctttgcatatctgaacttggcaggtaccgttctaaatctgaaacagggtgatagctcaaagttgccattcatccagaatagattgttttagaatgtagtgtttaagtgactgtttcattaatacacctacaccctttctttgaaagtttgcaacctaattgcatctaaaactatgaataagttctgtggtaaaatcttaaactatggaaaattacaaaaatgaatttttcttccctgaaatcagagcttacatgtgtgtttttttataacattttcagataaatgtattcaacatgtaatacagtattttcacattcacctcttattttatattgaaatgtattacagtattaaaactcagtgttcagtatttatttcaccatgcattttatttagtaaaagccagaagaaatgtttaatccaatggtgccttactttgtgatttaaaagaaatcaacttttttttatgtctaagtagtagattatttgcatatttgtaaaaactgttaggtctttatattttaaagtgtaataccagttttgttattttagtagcagaaatgggatgattgttaaagttccccaaaaatgttggcatgaaattaatttttccctccttatagtcaaggaccgtagaggaagaaaaacttttttttcatatcatgcactatgtaaacagacacattttgctatctgtgtcatcaggatagtgtaagtggtagggtagagactaccctagacatctgcatctttgtaagttagccagacaataaagaaaagcagaatgaaaaaaa

SEQ ID NO: 88483 - DNA, 423 bp, Homo Sapiens
ccggagacttgtcaggtagagacagggtgcgactgggcgagacgtatctcatttcttccgggcctttgctcaaatgtcgccttatcagagggctttcccttcaaacttagcccttaggcactctggagacctattaagagagctggaagaagccccatcctgccaagttcctcctccgctcctggggcttctgaagtccctgttctcaatctgctgcacagtattggacttcacatctgtttgtcttcacattcctcagcacttttcctttgtctgaatcctgtaagaccatcaactacagactactgatcttccctaccagaagtccctgctttaggacctagagtatttgggtcttaaatctatctagggccttgccactacaggaactcattaaaaatgcattttgggtcccaccccaaa

SEQ ID NO: 88484 - DNA, 885 bp, Homo Sapiens
  misc_feature (558)..(558): n is a, c, g, or t
cagcagctatattagatttactagaggtgctaagttagaacactaggcttttattgaggcaggttttaatattgatagatgctttttgtttggtttgtttcttctgggagagaatggaggacttaagtagaagtagctactgataacagactttctagtagcagtttccactccacggttacctttttagtttcatagtatcttttcacaaagtattacaaataagctagattctcccagtttgggaatgcaagtttgctacatttttagcctggcaatatgtgtgtaggtattgccttattggaaattctggaaacctgatactgcaacctgcaatgtaggatgtttgtatggcatttaaaggtaatggtgatgtttattattctatactttgcattctgtgagagtaattttcactctgtcttaagtgtgagtaagcctcttctaaaaatcttgttcttgccaagaaatttataaatcacatacgaagacgtctgttgctaacagttaactttatgaggtaactatatccttctatttctctggactcatttttanaaaatatgccgaatactgcatactgtttaaagtagtatataagtttatgagagaagtggagagctttcttccttgaaaagtcggtatttggtgagataccatttgcctcacagagaagtgttccccactcccatccccctttgccagattaataaatatttttgagaaaaagtgaccctaaaacaagctgaaaatctttaggtgcattctgtcctgccaaacctcccttaagcaagggtgggatccttaacaattcccctttactggccctgggggaaagtgggtaaccttaaactttttgggttgggtcggcgcccttttggcctt

SEQ ID NO: 88485 - DNA, 1647 bp, Homo Sapiens
  misc_feature (31)..(31): n is a, c, g, or t
  misc_feature (122)..(122): n is a, c, g, or t
  misc_feature (226)..(239): n is a, c, g, or t
  misc_feature (293)..(293): n is a, c, g, or t
  misc_feature (452)..(519): n is a, c, g, or t
actgtgccgcctcacagcgccgtgagcgggncccccatagagattaacaccccgttcttggtggcctccgtgcagccctctatggcggtttttttggggagtgcgctataagcccttctcgnacttctggcttgttagtccaggagaggtggtggctttccaccgggggcggcctaattttggctccaggtcccgcggggaagaagtctccgcccccagtatctgnnnnnnnnnnnnnngcagaccgcgatttgccattagagagggcgtataaggtgaggcactcccttttntgatcagcgtttattttaattttggttgagggggtggccgcccccacatctggggcgcgggggctccctcgggggccggggagagtctagagagcgttttgtttactggagtgggagaagggtgtggcggtcggtgttcttagagggccaggtaaaaannnnnnnnnnnnnnnnnnnnnnnnnnnnnnnnnnnnnnnnnnnnnnnnnnnnnnnnnnnnnnnnnnnntccccgcagcctcgaaagagttcgcgcgcgcgtgatctccgtcgactacatcgatgttgcgggacgggcccctattgaatgcccaaccgggccgggttgtctcgggtaaatcccgcccgaacgcgtcggcgccggcctcttagaaagggattgtgtcgggaaccggtcgtacagacccggcacggcgaagtcgtcggtcggtccggccggttgggcccgtgcggggtttcccaggcccggtttccccaccggcgggcggcgatgcaagagttcgcagggaagctggccctcgaaggcggctggagcgtccaggaacaaaggcgcttctagttagatgtgaagcagaacgcccgagggccgcttcctcaagatccctgagggtgggcgcgggcggttccaagagccgcctcacgctgtccatggcggtggccgccgagttccgcgactcgctgggcgacttcatagaacactacggcgcagatgggccttagcagccccgagcagctggcggcgggcgccgaggagggcggcgggccgcggcgcgcgctcaagagcgaattcttggtgcgtgagaaccgcaagtactacttggacctcaaggagaaccagcgcggccgcttcctgcgcatccgccaaacggtcaaccgcggcggtggcggcttcggcgcgggccccgggccgggcggcttgcagagcggccagaccatcgcgctgcctgcgcagggcctcatcgagttccgcgacgcgctggcgaagctcatagacgactacggaggcgaggacgacgagctggcaggcggcccgggaggcggcgccgggggcccagggggcggcctgtatggagagctcccggagggcacctccatcaccgtggactccaagcgcttcttcttcgatgtgggctgcaacaaatacggggtgtttctgcgagtgagcgaggtgaagccgtcctaccgcaatgccatcaccgtacccttcaaagcctggggcaagttcggaggcgccttttgccggtatgcggatgagatgaaagaaatccaggaacgacagagggataagctttatgagcgacgtggtgggggcagcggcggcggcgaagagtcagaggggtgagagggtgatgaggat

SEQ ID NO: 88486 - DNA, 836 bp, Homo Sapiens
  misc_feature (603)..(715): n is a, c, g, or t
tttgcgctcaataaatattttattgacttgagtgcgcggaacattgaatttcagccttgacgctatctgtcaaggcagctggttttctctgaacagggatttgagcttgctggcctgtttttccattttgctgttcattgactagtggctagggtaggtgtggctttttcggaaataagcagtcaataaaactccgaaaagtgattacacaataccaactgtgggctcccatgggcataaacacgaggtgggctcttacttatggcagagaggggtctctgcaggaaaggatttgaggaaatagccaggaaatagagtacacatctcaggtcacgtaagacagctccttattagtttcaagttgtggagtgagagaagaaccagactcccagtattcagagggagctcctgaaggattagagacagctctgcggagatgcagagaaagcgggcctgaggctggacggagtgggcaggaagagaaagcacttcagataaaacgaactgtttctagaacttcttgttcatgtgtagtgggtggcagaaaagggttttacttaagcgcttcccacctagcctgtcggttaacgtcccagtgtgtcnnnnnnnnnnnnnnnnnnnnnnnnnnnnnnnnnnnnnnnnnnnnnnnnnnnnnnnnnnnnnnnnnnnnnnnnnnnnnnnnnnnnnnnnnnnnnnnnnnnnnnnnnnnnnnnnnctttgagtgattacagagcggctgtcagagtaacaagaggtgcagtccaggcagtgggacagcacagctggcgcttccagctctgtaccctcctggtgccctcagtggaagcaaagaaaca

SEQ ID NO: 88487 - DNA, 487 bp, Homo Sapiens
ccgccgctgagcagtcggggccggtgggtggcctcgaacgccgggacagaccgacagacggactggccggcggtcccgcgcccccgagcggagcgggcgggacggaaacgtccgggcaagttggggtcggcagggttggaagcccagcgaggctagaggccagtcccaaagtttccaggcatcagggctgcagcccaggagcctcaaggcggcccggcgggcgactggacggccggacaggtgtctccatgctggcctccccgcctcagggcttcatcccactccgtgggcctgatctccctggggcacctgggatgtccatctgcgttagctggagctactccatggcctgtggcgtgccacacacagcggcatttcggtgtcattaggcacagctggaggtgcaaggaggagggcagcctcatgtccagttccatgtaacttgcttcttctgaataaaggcaatttgctaactttctcgctaaaa

SEQ ID NO: 88488 - DNA, 518 bp, Homo Sapiens
  misc_feature (292)..(383): n is a, c, g, or t
gcggccgccgcctgcgcccccctggactccggcgcctccgagaacagccgcaagcccccttcggcgtcctcggccccggccctggcgcgagagtgcgtggtgtgcgccgagggcgaggtgatggctgcgctggtcccctgcggccacaacctcttctgcatggactgcgccgtccgcatctgcggcaagagcgagcccgagtgtcccgcctgccgcacgccggccacccaggccattcatatcttttcctagagcgcggaccaccacgtggccggggccatctgcgggggcnnnnnnnnnnnnnnnnnnnnnnnnnnnnnnnnnnnnnnnnnnnnnnnnnnnnnnnnnnnnnnnnnnnnnnnnnnnnnnnnnnnnnnnnnnnncggcggccagtgtttacagatgagctttaactgccgcctcaggcgtggagacggagaccccgcagcccggcggcgcctcagcccttcaacgacagtattgagtggtcaggttacaataaaccggagagaaaaggt

SEQ ID NO: 88489 - DNA, 304 bp, Homo Sapiens
gcggccgccgcctgcgccttcctggactccggcgcctccgagaacagccgcaagcccccttcggcgtcctcggccccggccctggcgcgagagtgcgtggtgtgcgccgagggcgaggtgatggctgcgctggtcccctgcggccacaacctcttctgcatggactgcgccgtccgcatctgcggcaagagcgaagcccgagtgtcccgcctgccgcacgccggccacccaggccattcgcgtggagacggagaccccgcagcccggcggcgcctcagcccttcaacgacagtattgagtggtc

SEQ ID NO: 88490 - DNA, 1932 bp, Homo Sapiens
  misc_feature (57)..(111): n is a, c, g, or t
  misc_feature (121)..(121): n is a, c, g, or t
  misc_feature (260)..(291): n is a, c, g, or t
  misc_feature (685)..(699): n is a, c, g, or t
cggcacgagataccgtgacactagcccagcccttacaggtcaccatcgacagcccannnnnnnnnnnnnnnnnnnnnnnnnnnnnnnnnnnnnnnnnnnnnnnnnnnnnnnctactgcgcntcagtcctgtctctgaacgccaacgagccgcagctgggtcccaggagagcgagactagcagctctcaccgcggctctcaacgcagtcgggcctcactctgatctacagtgatgcgctttctttctcccagtaacagggnnnnnnnnnnnnnnnnnnnnnnnnnnnnnnnngcaggagaccgcgaaaggaaactatccaggaagaaactcaatttatgtgaaccgaattgcctttgaaagttttagtactgaaagacagcccattgagaataatgtgtgagaagccagagacctcgtttcactggggacacaccccctcccggcttccctttccacgcctcccagcgcactgcattaccgtggcttcaggatgtgggggctgctacagtgttctagtagcctgacatcgactctctcaacccaagtccagcccatttccctgttcttgcttctgacaaagtgaggcccaatagggctcagactggttgctcagttctggaaagatcagggatgctgccagcatggctgtctcaacccactgagttctgtctaaacttcatttttnnnnnnnnnnnnnnnttaagtatcagagggaaagaaattgacctgaaattatacagcaagtggaggcacagcagattcctgcatgattcctgcccctggatcaggagtctgctctacttgacctgtccctgttttcaggagttcttgaagaggatggagaaaaaatgagaatttaaccaggtttttcaagaatcatgtaaaatcaccttagtcggggtgtgttatcattaccagcatgtcctgcaggccaggggcgctgggactactctctctcccaaagaacttgagacaggcagccccttctaaagcctctgcttccccgtttgtttaatacagagaacaaatcctgagatgtgacttcttaggctctgtgagatgaagcttcatggatgggggttattaatatctatcactccattccaggctcattccagaactgtgagactggatgtcaatgcccagtgggaaagtactcaatccatccaggtctgcccggatctaaggactcaagggttcccatggcaaggagagactactacttgtccaagtagtagtttttctccaagggggtccatggagagaggggggaatctgtctcttctcccagcaggaacaggaggtctaagggcagagaggtcaccttccattcctattccctcccttactcatgctttatgatctcgaacaagtcccttcccctctccgaacctctgagtttcctttccctacagcaaggaagacattagaggagaaggtccttaagtggctccctgcttagtgttgacctgaccttatttggggcttagagccagaaggacacacccttcccccccatggggcagatagggaaactgaggttggggtaagaaatggaatatggttctgaaggaagaaaaaagaagtctattggcccatgaaatacccagaagttgggagaaggaagaagctctcataggaaccagacctggacaaccctttgagcaccagcttggacagcttctcagcttccctctcttctccagccctgacccaggctggagtggacagatggaagtgcagtctcacttgaactgtcgcccttttccaggcaggcagctcttccccaacccatcagtgaggagggggcgtggctctctagattttaaggcttggccagcctagggctcccgtatctcaccccaccccaagccccacccagtccaactatccacacgaataaaatgctttattgattaaatgattaaaaaa

SEQ ID NO: 88491 - DNA, 543 bp, Homo Sapiens
  misc_feature (26)..(26): n is a, c, g, or t
agcgatgtggggtctagtcttgaccntgaacctaacccactctgtgacccagcctcaggcctcggtcttttcagctacaaaaatgcaaggaaggaataaaattagacaatggcaaatattggtgaggttatggggaaatgcattctctggatttgtctttaaactggaaatattcatgacatgtgccagataatcctatgtcttggtctctaccctagaaaaatatttgcacatgtactcaggaaggctgtctcttgcgggaccatatctaataacaaaccactgaaaagagctcaagggctgtccatagggaatgaatgaatacaatggggtctatatacataacgggtcactgcatcacagaaggaataagcaagatctatgcatgcagagaaatggatagagctctaaaatatattaagtaaaagtagaaagttgcacaataatgcatacaatataatacaatttttgtaacatgttaagcagaactgtgaattttctccgattacattcaaacagaacataaaagcattttttaaaaaa

SEQ ID NO: 88492 - DNA, 493 bp, Homo Sapiens
acattgggcaacaattcggggtaattcagcatttcccaaaggctgttttgggaaatgccaggcggatatataccctaaagctacaaaacattccttgcaaagggctggaaaatgctacctatcaaagaccaccccaccctgaagagatcacacagcccatgagcacgttaagtcccgcaggaaagaggcttgcttgattttgcttaattcccacattttccaggcataccgggcaaaagactttttttgcgataccaccaatgggaatggtttcacactggcttaggggggccccaccttctatcaaatggtgaggacggcgccatgtcggtaactgcggtctcaatggtcttccgagaaaaggtttccggggaactccgggaaaaggggaagcctgaggactggtacttccttccagagcaccaagggtcttcaagatcttccgaaagtagtttcggaacttctggccaataaaagggttaagcacagggtt

SEQ ID NO: 88493 - DNA, 627 bp, Homo Sapiens
ggattacaggcgtaagccaccacacctggccctgggggtcatatatcttaaatcaaggtatcaacaggaccaagctccccaaaagctccaggaaaggatacttcttggcctctcttctggcttctggtggctgcagcaatccttggggttccttggcttatggatgcatcactccgtactctgcttccgtcctcacttgaccttctcacctaccttcctttacgtcatcttccttctgagatgctctgtgtccaaattttattctttgtaaaaggatgccagtcattggatcagagaccaccttaatccaggatgacttcatcttaactaaattacatctgcaaagattctatttctaaataaacccacattctgaggttctgggtgggcatgctatttggcaggacaaagtcaacacaggacactcattttcaggattgatcgcatggtttgaggaagctgatggtgacatctcttcttaaatctgttttcaggaaaatcatactggtagccttcaagtggccatggtgggagcattgacccagggaaatccacatttcccaacacatgctggatacctgaggactccagagctactatctgctcatatctgctcaacattaaaaa

SEQ ID NO: 88494 - DNA, 617 bp, Homo Sapiens
ctatttcaacctttaacatctactgtcttagtcttttacacagaagccagagtgactggtcttggcaagactctgttgtgtatcaccactctaaccttactgatttgtttcagcaaatttgctttagttaaattgctttactcagattcccccaaactttatatgtgtattgtcatctttgtgcatattatttctcatgcatgaaatactcaatttttattcttttatctaacgcttactcttacatttctttaaagctctggccaagtattttattttgtccctaaacattctaactatccaccaaactggtaagttggcttttctttttcctccccctgtcattcatttagctgttatatttcattttaatgttttgggtggtgcctcttatactatgttgtattcctagacaaggaaatgtatatcaaaatatgttagatgattgattgttttatctccttgatgatagcacctcttatactgctttacagaatcaggaaaaagtaaactgcattttacatagtggttttaaatattgattgattgatattctaaacctggtttcctatataaagttgtaagttcaagataaagagaccacattctttacttaa

SEQ ID NO: 88495 - DNA, 484 bp, Homo Sapiens
cagtcacgaggcgcggggcgggagccgcttcgagcgctcggagtcgcgggcgcacagcggcttctaccaggacgactccttggaggagtactacggtcagcgcagccgcagccgcgagcccctgaccgatgctgaccgcggctgggccttcagccccgcgcgccgcagacccgccgaggacgcgcacctgccgcggctggtgagccgcacgccaggcaccgcacccaaatacgaccactcgtacctgggcagcgcgcgggagcgccaggcgcggcccgagggcgccagccgcggtggcagcctggagacgccatccaagcggagcgcgcagctcggcccgcgcagcgcctcctactacgcttggtcgccgcccggcacctacaaggccggctcgtcgcaggacgaccaggaggacgcgtccgacgacgcgctgccgccctacagcgagctggagctgacccgcggcccgtcctaccgcggccgc

SEQ ID NO: 88496 - DNA, 735 bp, Homo Sapiens
  misc_feature (137)..(137): n is a, c, g, or t
aatgatatcaggtgggccatggaagaaaatgtcctttggggaatgtaaagcaaatgaaaggcctaagcctacatacgggtggctaaaaaatggcgaaacctctgctaactcgggatagaattcaaattgagcaaggnacactcacataaaaataagtgaacctctcagatgctggcatgtatcagtgtttggcagagaataaacatggagttatcttttccaacgcagagcttagtgttatagctgtaggtccagatttttcaagaacactcttgaaaagagtaactcttgtcaaagtgggaggtgaagttgtcatttgagtgtaagccaaaagcgtctccaaaacctgtttacacctggaagaaaggaagggatatattaaaagaaaatgaaagtgtacatcaggggtttggtagtggctctgctcctctctaaggccagcctggtggaccaagatgctctggacgttgccattgcagaaggaaaagatccaaacatgcatgggttcttaaagcctctacttagaagtgcaacacttgcactttcactcacatttcattggccaaaacaggtcacatgttcctgcaactcagcagggaaatataatcttgctatgtgcctggaagaaaagagacaacctaatattttgaacagtattaatgactgcttacaactgctacagcttaaccattgttacaagctaattaaattacctttggggaaatagtaaaaaaa

SEQ ID NO: 88497 - DNA, 652 bp, Homo Sapiens
tttgtgataaggatatttatttacagatctgagaacagagacatacacagttaaaatacagatgtagatatggattgaatacagcctggatgtaattctttcactaccaagtttccagtactgctagcagttccaaaatggttagtggctatacaggtataactcccagcgtctgatttagtaacgttgatgattctgaggtttccatcttcagaaatggtaattctttcattttcttttaatatatcccttcctttcttccaggtgtaaacaggttttggagacgcttttggcttacactcaatgacaacttcacctcccactttgacaagagttactcttttcaagagtgttcttgaaaaatctggacctacagctataacactaagctctgcgttggaaaagataactccatgtttattctctgccaaacactgatacatgccagcatctgagaggttcactattgttatgttgagtgttccttgctcaatttgaattctatcccgagttagcagaggttcgccattttttagccacttgtatgtaggcttaggccttccatttgctttacattcccaaaagacattttcttccatggccacgtgaatatcatttattttttgaatccaattaggttgagcaaatcaaa

SEQ ID NO: 88498 - DNA, 489 bp, Homo Sapiens
ctagggatgctatgtgaacttgcagtgtacgtaaagtgagttagatgtaagacagatggagcatcatgggttggattattactgagttcaataatctggtgggttttgccagctagaaacataataaaatacatgataaaggaatagaaaggaaatatatttatttgaaattaaattactgcttataaattcatgtctctgattttacaaagtgtaatgggtaaaattaccatattctttttcttatttcaatccatacaatgagagtcatgttcagtttttcactgacttcatgctgggtaatgttcactctgcattagcggttgccatgttcaccgttttcttacaatgtctatccagtgcttgttactgtctcactgacagacagaagtctagctgttttcatccacataatggcaggcagggctagtgttgctgctgcttcacccagagaatctcattttacaataaagttagtattatacttga

SEQ ID NO: 88499 - DNA, 558 bp, Homo Sapiens
aggaacggccaagtggtgggccatgtccggagggctgacttgggttcgccatcgacaagaccatcgcctacggttacatccatgaccccagcggtgggccggtctcgctggactttgtgaagagcggggactatgccctggagagaatgggggtgacctatggtgcccaggctcacctgaagtcgcccttcgaccccaacaacaagagggtgaagggaatctactgagggctcagaccacatgccccatcccatgctgtccatccattctcacaggtcccaaatggccctgggtcccaggaccctggacccagccagaacttgtgccctccctgtccttagcctaggcctagtcctgcgaaaacccccaaaccagatacggacagagaccaagatggcccatcctgtggtcactgactggaaggcagtctctaatccaccccaatcctcccagaaagcaaacctgtaagtgtcttgggctcagggaccatggcttgtagccctttccaagcttataaaacccccttagtaaatacttgataagcccaacgtgaaaaaa

SEQ ID NO: 88500 - DNA, 792 bp, Homo Sapiens
  misc_feature (191)..(237): n is a, c, g, or t
tgatttcatgctgttgggagaagatccgtgatactagaaggtcctaaaggtattttttctctggtgccaaagacaggaattatagtgtgagtgtctagtccgtgtgggtgacaagtcccacgaggctgtgaagtgctttcttcagtcactggatctgcagccctagaatctcgaaatgttgcccattctgnnnnnnnnnnnnnnnnnnnnnnnnnnnnnnnnnnnnnnnnnnnnnnnctcaaactgggtgaaaatttaataatacaaataagtaaaccacaagaaaagagcccgttcaaactgtctacaagagattagaaataattgtaaatgttttcattgctgatgactcagagtaaatccttgttgatagcttagttccccacaaccatgtacatttgggaatgtgctatagtcagacccggccctgattccattcaagactgacctggacaccctttgctgttagtgtagatagacacagactctgagggtcttgcccaagctatgtaaattctttggtggcatggaacatctgagccctaaggatggcagaccttccaggaggttctaaatgctgcctaaaattctgttaagtagggagcttagaaatggggctgtggaacctggaccatggaaaaacagtcattgcatacctgctgagtagaaggtgcacttttagctgcagaaatcctgctttcatgcagtttattataggaatgagaacgtgtaaaaggctctaacagaaggtttcctcccagcctgggaaacatactgagacactgtttctac

SEQ ID NO: 88501 - DNA, 564 bp, Homo Sapiens
  misc_feature (61)..(61): n is a, c, g, or t
cctggctgcttttcctggagagccttccagagcctgtcatctgttacagcacctcccatanctgcttggagtgttctggcaactacacagcaagcaaacaggtcatttctactctccccatattccacaaaaaggtcttccactacttgatggcgtttttgcgagaactgctgaaaaattcagcaaaaaatcatttggatgagaatattctagctagcatatttggcagcttattgcttcgaaacccagctggtcaccaaaagcttgatatgacagagaagaagaaggctcaagaatttattcaccagttcctctgcaacccactctgagcctatctctcctcctattttacttgaggctgccaattaccagccccacctgtttcagctcaagagatgccttaagataattatgtgaggccacttggtagcaagaatggcagctatttcctgagcctagtaccccaattaagcccaccattggttagcacactcagcgctgtgagtcgtgaagacacgggagaaaatccaccataataaaactgacattcaattttcaaaaaaa

SEQ ID NO: 88502 - DNA, 389 bp, Homo Sapiens
cggacccagagttaggatcgtggcgaggagtgtccaaacgcaaaactttctgctttaaaaaatctttgcccagagcttgatattttagttctactgcaagggacctgggaccctcctcaacctcatttctcattacgagtctctcagtttgcagaaatgctttccatagacatttggctgcttacctagaatattctcatccaaatgattttttgctgaatttttcagcagttctcgcaaaaacgccatcaagtagtggaagacatttttgtggaatatggggagagtagaaatgacctgaaagaggaagaaccgggatttgtcttttgttcactgaatcatttctcaagtgcctactatagtccaagaaccgtagacacgatcctaat

SEQ ID NO: 88503 - DNA, 597 bp, Homo Sapiens
  misc_feature (89)..(100): n is a, c, g, or t
ctcatctccaaaatctgattggagctgttcaccctctcaaggacaagataaagattgacttcagagatatatcacatcaagctagaggnnnnnnnnnnnncctcaaataaaatttttcctcattcgaagggatccagggtatccttgggttatgtaggagggaatcatatttgttctaatttacctgaatgtacttgtgtgtgaatccaatcttgattctaaacaccaaatcttgtcaacagtagagaagtatagtaaggagttcctgttgtcaatcaaatgagggtgtgaaacatttagaatgctctgtgttacacttgaaccatgtataaatgtaacctgtgtatctttttttaattagcttttctgaatttaaattatattgtttttctttgtattgttagcaaaatgcatcagaactggattttttttctcatctgaacataatataaaatttgaaagagtattgtgatattaagcactttaacatacatatcagacaaactgacgtgggtttttcaggtttgggagtacatttaaatatgacttttcatgctttgttctttacaaataaaactgtgggattgataaaaaaaa

SEQ ID NO: 88504 - DNA, 349 bp, Homo Sapiens
ttctatttctgtgtgaatgccatcttttcaaattgctgtaatcttgcactatgtcttgatatcgagtagaaggggtctcactccactatcccaccacgttttgctcctctctttcaaaattgttaaaagatttttgtgtacttcattgtttcatattaactttagggtcaatttgcttttgagtttccccaaaatcctgtagatgtattgtgttttaactacacttaatttaacttaccctagggggaactgacatctagaaagtattaagtctcccaagtgtagacggaaccagctttccattgatcaggttcttcaataaagtttgaaacttttaaccttaaaaaaa

SEQ ID NO: 88505 - DNA, 452 bp, Homo Sapiens
aattctgctactgaatgagagcagaagcctgtgaacttccagttaatagaccacttaattgggggaacgcttcacacgttataaaaaagcactagaatgttttgaaagcgagaaacaacagctgtgtagggtagctagcagttagtgttgtacagaagacagatatttgtgcatttctgcattttctaagtttgctgcaatgagcatgtattactttcatagttataaaacacatgcaaaatgcccttttaaaatgaaaaaaaagtccatgagtgtaagtgatatatatgctttggaaagcctgggacggtcattgtttactctcaatagtatgtgtttgcctttgtctttttgagacattttgttttaatctgttgatgacaataacctgttgataatataacttaataacaaataaaatgacttatgattgattataattttaaaaaaaa

SEQ ID NO: 88506 - DNA, 499 bp, Homo Sapiens
gaggtttctatgaggttcttagaaaaatttggttttaaaatcatttgaggacaggaatgtctatagcaagtttactcctattgcgaatcatgtatgctggctttagttgtaacaaacgattttattctaagtaaggccaggtgctactataaaatcatatattcctgttgaagttcttttgaagtcctatctctatttattatatttgaaagttgtcagccaccagtcatccagaatttccttcctgaatctccatgctcatatgcaatgtctacatcaaggtcttcttaatgactattattctcagggtttagttttctaccttctgcctactattttggtctgacatttttgtagccttctgttattattggaaatagtctcttacataagctgatttcgagaactttcaaaatctcacatagctaatggaagttgctttctgctttcttatgactgtttttataaataaactgtttcataaataatgtaaaaaaaa

SEQ ID NO: 88507 - DNA, 300 bp, Homo Sapiens
ctgggcgctcggacaccgggcgccggctcttgggtcgtgctctccggcagcgcacacgctcactttctcacgctcgctccctcccggcgccgctttctgacgggcgaacaagtttatatttaccatgatgtttatttgatgacaccgtgaagaaaatgtgcaaaatgaggccctaccatgttttaaaaaatgttttcatcaaatggatctcagagggacatgcccaaaactcctgctaccagagtgatcctctcttcatctcttttctctagccaataaatcaaagtttcatttctcaaa

SEQ ID NO: 88508 - DNA, 921 bp, Homo Sapiens
tttttaattgaagagggaccatcactgtcccaccacagcagataaaaaggaatatgtatgggcatatggtctccatctggctcctaaatacccacagactgagttactaagggatcactatttttaattttttgaagcttagaaggctggtgggctgataatggcaaagcatatactttaggttttatctacagtcattcacagtcaatcaaagctttttctgacctccttcaaaaaagagcaatctaacagcatttatctcccctggcaagaatgaatggctccctgatttgcccatcagcagcaccacaacaggcatgatatttagtcactaacagagagctgacttccacctaaatatctgagtcaaagaatatttctttggtagtctctgaagtgaggatttaaaggtgtcccaaacctactagtcttgttaaataaaaacgaagcatcttttaatgtgccaggattatgggaagcatctaagagcaaaattgaaataatttaacactgaaattagaaaccaaatacatgagctttcttgggctttttctcagaacacaatcaatgcagctgacttaattcttgtcagcagagaagagacatggcccaaacattctcaagtttttccatcaaagggtgcaaaataagttgactcagtgcccttttaactctcagacaactttttcccaagattttctttgaatattagtaatagtaaagtttatccaaaaacactctactattttacatcttatttatttacatttcaatgtaatggtgagattaacagctgaattttttttatgtatcagagaatgtatttaatataattatttctccctaaaccaaattatattaaaataacaatggatttgaagattagaagttttaaaattaatgctggatgtggggctcatg

SEQ ID NO: 88509 - DNA, 663 bp, Homo Sapiens
aacgaaaactgaagagcatcatgtgggctctccccattcttctgtgctccagcctaagtttttctcttcacagttttccactggtatcagtttcctgtccatccttccagatcaattccatggataagaaacaaggacttagacgtttccactttctccctcttttttacactaacggttatataatttacattctttggaccttgattttttcccccacttatactctatttgtagatctcatcaagggtcctcattcttttttgttaaaaagctaattgaaatatttcaaaaataattcctcttagcaacaaatatgaaactcctcctgttgagattcaatggataaacattttctccctcatcaattcttgtatatttcctagaaaaaacttccaggatggagaaaaagttattggtttaaattttggttttcatcttccaggaatttataactacctgcaaaactgctgcgctcacagtgtcaataccgtccacacagcggagggatatcagtctctacgcgctaaaagctcacccacagagcggccaccataagagcaacctcttaccccaacaatgggctctgcaggctgcctcagtcagggactttcaactccacatcctctctgggatcactgggaggagcagtcaaagatgccg

SEQ ID NO: 88510 - DNA, 738 bp, Homo Sapiens
ggtggggagtacggaatagtggttattcgctgaacttctcagagggtgatggccgccgacgccgggtactgttgaggggccgagaaagcccagcagcagggcctcggtactcggaagaagggctctccccctccaagcggcggcgactctctatgcggaaccaccacagtgatctcacattttgcgagattatcctgatggagatggagtcccatgatgcagcctggcctttcctagagcctgtgaacccacgtttggtgagtgggtaccggcgcatcatcaaaaatcctatggatttttccaccatgcgggagcggctgctcaggggagggtacaccagctcagaggagtttgcggctgatgccctcctggtatttgacaactgccagactttcaacgaggatgactctgaagtaggcaaggctgggcacatcatgcgccgcttcttcgagagccgctgggaggagttttatcagggaaaacaggccaatctgtgaggcaagggaggtggggagtcaccttgtggcatctccccccaccttccaaacaaaaacctgccattttcacctgctgatgctgccctgggtccagactcaagtcagatacaaccctgatttttgaccttgcccttggcagtgccccacatcctcttattcctacatccctttctcccttccctcctcttgctcctcaagtaagaggtgcagagatgaggtccttctggactaaaagccaaaa

SEQ ID NO: 88511 - DNA, 495 bp, Homo Sapiens
ctacagcctgtaatactgctctctttcaaaagcaagttttcagatttttataacagacccattttgttttatgaaacatgttcattacagaaacatgagaaaatagagataagtaaaaagaataaaagtcactattatcctaccactttgcgggacacactattaatatttaagcatagattcttccagatgttttgttttatacagcagtaggattgtgtaatgtattctctctggtagcctattcttcaaagcgtatcttcactttccatgttaacataaatgtccttttatgattgtctaggattccatggatggatggaatataattgagtcatctggtagagcgcatataggacaggacgctaggttgtttatcttttgtttattgtaaaggaactatgtgggatgcatttggtgatctttttaaaaaatgtataaatttcctgactaattcctggattaaagaatatgcactttttaaagcaaaaaaaa

SEQ ID NO: 88512 - DNA, 394 bp, Homo Sapiens
cgtgagccaccgcgcctggcctgtcctagggagaatgagcctgatgactttaccattttccacctctaagagccaatcgcaaaggaggctggctggcatcttgtgtctgtctagcatctctaccagtttctgtagaaaaccctcaagctgtgccaagacgatcatgtctggacacagctcttggtgtcacggggtgtctcctcctactgcctatcgccctttgcagccaccagaataatcatgcaggagccagggccccatattatctaccgctgtccatctgctctccagcacatcagagcagcccttcccctgtgtgagattcctctccagggcaagacttgaagggagcatcaaggttgcagtggaagaaataaattggaagtggagctgg

SEQ ID NO: 88513 - DNA, 464 bp, Homo Sapiens
aaatgtcttaactggaggtctttgagacagaaaaaccctgcctcagcccttgggtcctgagagtcgcgtttcttctccccttcgcttaaatatgtaaaccagaatcattatgtttggttcatggaacggaggaaaaaaatccgtgtgcagggtcgagactgtcgtggcggaagccgcagcacccgggaggcaggaaaaggaaacctggacacaggcacgtatgagggaagacaatgtggagaggcaaggagaagatggccacctgcaagccaaggagagaggcctggaacacactcttacttcatggccctcagaaggaggccaccctgtcaacaccttgagctcagacttcagcctccagagctgtgaaaaaagaaatttttgttgtttaagcccctcagtttggggtaatttcttatggtggccctagccaatgaatacaggtcccaaataactcttcaaaa

SEQ ID NO: 88514 - DNA, 484 bp, Homo Sapiens
  misc_feature (349)..(357): n is a, c, g, or t
caaaaattaaatagaattcatatatttgaaatccttggcatcaattcactccaggaatccaagacagtactcaactgaaggggaagcaagcacaagggagatttctgggacactgatactgttccgtttcttcatctgaatgctgcttatgggccttgttcaatttgtgaaaattcatgactttgtacatttatgttaatttcccagacaccctacagtgaggggtgacttatgactgaattgacagccaatgcaacagaagacttggtccatgaaaacctcccatgcaatatcccttccatgctcttttctacctgctggattgatcgagctgagcatgcaaccttgnnnnnnnnngccttcaggagggtagagtcacaagatggaaggagcatacatcattacttgcagagggccactggctaactgggaacctttttgggactgtatgggaccaagaaataaatttacttcctatttgaaa

SEQ ID NO: 88515 - DNA, 504 bp, Homo Sapiens
cattgattaccagtggttatactaagaaagtggatatcacatttattccacggaggatttggagtcctgaagccacaacagcagagctgatcaggaagagggaactacggcgagagaggtttacacatgaggtggacttcgacgattttatgatgccttttcagaagaacatcacagagaaagctcgagcactggaagctgccttgaagacctaagtcatagcagttatttcttggggtaaatgctttgaggcccagggaccaatctttggagaaagtagatatttccatcaaagccaaagcaatccatacaccaagaacttgttaccaagaatttctttttgctttaacaactataaatattcttagctgtctagagaaaagatgtatgttattttgaaatgaatggtatgtcattctggataaatccccaagcccctttatgaatgtagtaaaatacatggcatgtgggttataaacgttaatgacaaaagatttaaaaaaa

SEQ ID NO: 88516 - DNA, 403 bp, Homo Sapiens
  misc_feature (108)..(138): n is a, c, g, or t
cttaaaatgtcaaaatgaaatattgtctattaaaacagaagaattaaaataaacaagagaagttgggcattggtcatttgatggttgtaacctccagctttcccaggnnnnnnnnnnnnnnnnnnnnnnnnnnnnnnnccttaaatggcccttcgctaagtgaaagaagcctatctgaaaagactacatactgtgagtagggctgattggagccattgtacagtgtcgggaacataccaggacactgagaatagtgtcatgtcataaggacccagagcagatggaccctgctgtgatgcacaaagaggaccacgcaagatatgataaagatctacatcactgaattttggttccatttttgtatctcagcttcccggaaataaaaaagaattctaacattaaa

SEQ ID NO: 88517 - DNA, 459 bp, Homo Sapiens
aaaagagccaccttcgggcctgattcagctcggcagcgcccccaccaggcggtcctatagattgcactcagctctaaatgcgagctgtcaacggggtcagccgcagaccccgcccatccccaaggcgcactgcacttctcctttgacggccaggccattccggggaggcccaagaacttccaccaagggttctgctggctgaggcctctctccaggttggcagggcctcctggacctcaacgggtaccctccaccctcccaagtctgcgggccccgcccctcggtcccaccctctgggtcctcagcttctctggccggcgccagccgggctcccagggctcccagcgctcccgcgtctgcccgcgtccgcccgcccctcgctccgggctccctggcgcctcacccggcaagtcgggccggaagtcgcattcgcaaaaggcgcccaaggtgcagcgcagg

SEQ ID NO: 88518 - DNA, 553 bp, Homo Sapiens
agaaatgctcacataattgttgggactgattcattcctccacgatatgcctcctctctctgatatcctgctaactgtagccgttgtggcatttgagatgacaggacatatatatatatggccccacacttgaccttgagtgcctgaatgctctgaaatcaagcatatggcacagcgctcaagacttttgggtttgtgtccttttttctatggctgtctcttctcaattctggagaggtctggttccagtggctggtttccagggattgattcttaagctctggatcacagagagaagcaacaaggaactatactcaactcaaaactttttaggagaatcatgaaattggtctattcaaaggatggagttgagtccattctgttattgttgcaagaggttgcatatttggtgagtcagttatataaaatagtgttcttattgtaaatatgatacttctcataatctattttatcatgtgtataacattcaaactgacaaatatattgacttatgaataaaggtgtcaaaaaactggcacatcagttaattttga

SEQ ID NO: 88519 - DNA, 254 bp, Homo Sapiens
tttgatgggagaaggggatcaccaaatccttcacaaatctaataactatggatcttctccctagaaaaaaatggacatatgtacatgcacacaaacccacaattttgtgtgtactctcaaaaatctgggctccaggttaaaaattcctatgttaagggaaaagctagtcactttataaaggttaagggtgtaaaagtatattaagtttcccttgcacatgatgcatcatgcaggaatttaacaacagcaacaaa

SEQ ID NO: 88520 - DNA, 713 bp, Homo Sapiens
ggtaaaaatgtgttttcaagctgttgttttaagaagcaaaagatagttctgcaaattcaaagatacagtatcccttcaaaacaaataggagttcagggaagagaaacatccttcaaaggacagtgttgttttgaccgggagatctagagagtgctcagaattagggcctggcatttggaatcacaggatttatcatcacagaaacaactgttttaagattagttccatcactctcatcctgtatttttataagaaacacaagagtgcataccagaattgaatataccatatgggattggagaaagacaaatgtggaagaaatcatagagctggagactacttttgtgctttacaaaactgtgaaggattgtggtcacctggaacaggtctccaatctatgttagcactatgtggctcagcctctgttaccccttggattatatatcaacctgtaaacatgtgcctgtaacttacttccaaaaacaaaatcatacttattagaagaaaattctgattttatagaaaaaaaatagagcaaggagaatataacatgtttgcaaagtcatgtgttttctttctcaatgagggaaaaacaattttattacctgcttaatggtccacctggaactaaaagggatactattttctaacaaggtatatctagtaggggagaaagccaccacaataaatatatttgttaatagttaaaaaaa

SEQ ID NO: 88521 - DNA, 524 bp, Homo Sapiens
ccaaagggaaaagccccttcccaggcacagccataacatccacctcactcaactgcttgtcaagttcaccaccaacacagagggggctcagataatcaagaaacaatgtcgagtgatgataaaagtaaatcaaatgaccccaagactgagcccaagaactgcgatcccaagtgtgaacaaaagtgtgagtccaaatgccagcccagctgtttaaagaagctgctgcaacgctgtttcgaaaagtgcccatgggaaaagtgtccagcaccacccaagtgcctgccctgcccctcgcagtctccttcatcctgccctccccagccctgcaccaagccctgtcctcctaaatgcccttcatcctgcccacatgcttgcccacctccctgccctcccccagagtgaggcactgtgggcactacccaaccccaccaccactgccacctccaccatgtacaacgctgtggggctggagactgaaaccatgaactgacaagtaaacgtgttcctctgctgtgcaaaaaaaa

SEQ ID NO: 88522 - DNA, 886 bp, Homo Sapiens
gaaggccggggaacaactctaatccttttggggcaggagggagggtttttttagggttgcggggagggaactgcaagtgcctgaggaccagagtggcctctagccccgaattgaacacttttaaacctaaagagccttattattattagctcgagaaataccacatgccagtcttcccaggaaggtgacctgcctgaccatgaagcaacaaaagagcataggcagacttaaagttggatagacctgggttcaaatcatagttcagctttcaataactgtatgtatgattttggctaaaggatttgactttctctcaactgcagttttcttaatctttgaaatgcaaataatgtttatctcagaagactatttctaggattaactgagagattaaaggaacagcagcacttaggctcaaaatcgcccctacaaagcagtagttgtttcttaattgctaagtaatctgtttgcactctaggaaaagtaaatggagaggtaaaagaaaggcattggggacaaatgaaagagatgatgtagatttttcggatgggtgggtatattttattttccagtttattttcatatttctttactgtgttatttctggaaactttaatgttttaaacctcttttataaaattcaatgacgactactagaattctattcttttcaaaagttaacttatctccaaagtggctgaaaatattgtttaccattacatgattatgaaatgactgtgaagaatataaaattaaacttagtgacttaattagtcactgccttgctaactttgctgtaatttttttaaacgtcttgtttttaatatagcaaactatctcaatactggctggattaggttaaataaagaatttttatgttcaaaaa

SEQ ID NO: 88523 - DNA, 458 bp, Homo Sapiens
  misc_feature (41)..(90): n is a, c, g, or t
  misc_feature (212)..(225): n is a, c, g, or t
agtggaaacagaccagatctcagcttatctggctggaaggnnnnnnnnnnnnnnnnnnnnnnnnnnnnnnnnnnnnnnnnnnnnnnnnnnacagattcaagccaatctgtgatttgtaaaataagccaggtgcaggcttgtgtgccttcagctgaatgtaagaagtccagctatcatgaagtctccatgtggacagacaattcagaggaatnnnnnnnnnnnnnncctgagcagctagcagtgccagcacctagatgtttgaatcttcccagcccagatacatgatggaaaaaacttcaagatgcccattggacagcaaccacatgaaagacctggagtgagaactcctaagctgagatctcactctttcagactccagagccaaataaataattattaatgtttaagccactgttttggtgtggcaacaataaaggcctggaacagggtgaaaaaaa

SEQ ID NO: 88524 - DNA, 762 bp, Homo Sapiens
  misc_feature (61)..(94): n is a, c, g, or t
  misc_feature (426)..(452): n is a, c, g, or t
tagactgatgactacccctcagtggaaacagaccagatctcagcttatctggctggaatgnnnnnnnnnnnnnnnnnnnnnnnnnnnnnnnnnntcctaagaaacaaaagacagattcaagccaatctgtgatttgtaaaataagccaggtgcaggcttgtatactgggccacatggtgacttggatttttaagggttacacacatgaggcaactacaatccagaggaatttgtgactatcctcagaggccacagccattgatgcctctttcactctgcccattatgtcccactgaacagcttgggtgtcagagccagccattttgctctgtgaggaagtaattttgcagttaaattggacctggttgcattttctagtctctgctttctccaaatatcccagtacttagtttttgctctggttgnnnnnnnnnnnnnnnnnnnnnnnnnnncctacactaatggattaaacaaccatttggaaaagacaggattttttcttaaacttttttgaggtaattttggaaaggatcattcaaattaacgtatgtgaagcacctaacataacagacccttggtaaatggtagcaaagaagattgtgatcattaggagctcctgagagagggcaggtgccacaggaagggattggaccagatcaacatttcagtgtcttctgaggattataatttctggaagttgctcccagatgggggacaactttcaacctacggtcaaataaatattgcttaaaaactctcaaa

SEQ ID NO: 88525 - DNA, 717 bp, Homo Sapiens
gcaaatattctcatagattctggtgctgatccaaatattgtagatgtgtatggcaacacagctgtccattatgctgttaacagtgagaatttgtcagtggtggcaaaattgctgtcctgtggtacagacattaaagtgaagaacaaggctggccacacaccacttttattggccataaggaaaagaagtgagcaaattgtggaatttttactgacaaaaaaatgcaaatgcaaatggagttgataagtttaaatgcattcatcaacaacttttggaatataaacaaaagatatctaaaaattctcaaaatagtaatccagaaggaacatctgaaggaacacctgacgaggctgcacccttggcggaaagaacacctgacacggctgaaagcttggtggaaagaacacctgacgaataggatacagtgaattcctcttcaaagattttagcctgtaaacatcctttaaaattcaagaggggggaagattaagtacaatgagttctgagttcctcatcaaagaacaaatatgtcagtatgttcagcttctccgttctttgttctccgttttaaagtttaacttcctcgttcgttatgcctccttgcccctagtttcattaaacaacccccttctagcctctaacacctgctgtgtctttagtcattcttagtaacctgctctgtccttagtcatccttagacacctgctctgtaactgt

SEQ ID NO: 88526 - DNA, 329 bp, Homo Sapiens
ggagagatccagcacagttgctggtaagggactcttctgctgggctcccaccagcagctctaggatcagacctggatatgagatatctcttacctgttgcgcttttgaaatgtttctgtgggaacatttgtatgagcatcctatgagtgggagagtgggctgggatgtgcatcctgctccctgaacccttccatccgagactgtgcccacatccgaagcacaaggacatcaaatcatcagcacaagaacatcaacaggaatgccaccctccccagtgtttgaactccccgcccctgtcaaataaaccagaacaaatgcccatggaaaaa

SEQ ID NO: 88527 - DNA, 403 bp, Homo Sapiens
gaaatacttctctccaactctgtgcccatagcaactggcattgttttgcttgtaatgtttctgcatgtggccagcattatagaatgctccaggccagagaatgggattgctcccatgatgccagggcctggtcagggaagtggtgggacttgttccctttgaggcagagctccagaggaagcagggctgcttcttgtcatgcccaaggcattcattctttcctcagtcctcagaggaaaaattatatgctgtgagcaggtgcggtggctcatgcctgtaatcccaacactttgggaagcccaggattgctggagcccaagagttcaagaccggtatggtcaacatagggagaccctgtctctgcaataaaagaaaaaaattagcctggtgtggtggcacatgc

SEQ ID NO: 88528 - DNA, 586 bp, Homo Sapiens
ctgcagtctcccccgcccatagccacctgtgtgccggctccgcagacgaggtccccccagcaccctggcagggactgtaccatcaacagacaaatggcagccgaccaaggaggcgactggcgtgtggaacaggtgatccgattgtttttctaaagagcaagggctaggacgtcctacgtgttcatatgcacaattttttgaactccatcaagaacacgaaccccatgcccacatcttcactgctcaattcacattgtctgatatgcaccttccagggagaaggaggttttcatggagaaagaggcaacgttgactatacgtgtttactcaaggcttttttataccggactatatgccatccaggtttaagagaagtccaggcaggctctagcattatgtttttcacagaaaaagccggtgcagtagcccggatgcccagatccactcatttcccaaaccggttcccacacccgctgcccaccacctggcgaggaaggagcgggcgaggttcgctcgaatcgtcgtcacgggtttccgtgggtacagttattactcgttacataatattaaacaattaagaataaaa

SEQ ID NO: 88529 - DNA, 1347 bp, Homo Sapiens
  misc_feature (853)..(873): n is a, c, g, or t
  misc_feature (1024)..(1034): n is a, c, g, or t
  misc_feature (1049)..(1131): n is a, c, g, or t
  misc_feature (1181)..(1207): n is a, c, g, or t
cagtcgacggtaccggacatatgcccgggaattcggccattacggccggggacccgttcaggcctctatcagcactggaaagtccacactggggaacggccctatgaatgtagcctgtgtgggaaaaccttcactaccagatcctaccgcaatcggcaccagcagttccacactgaagagaggtcttatgaatgtacagagtgtgggaaggccttcaaacatagttccaccctccttcagcacaagaaagtccatactccagaaaggcgtcaggaggacagggcacatgggaaggtcgttagctgctagcaccgtgttcatcaggaaaggtcttattccagaaaggaggttaaggagagtggccgtgagagtgccatccgaaagaagctaaaccttgcacatcccaacacccaccccagggagagttcccgtgtgtgcctggtgtgtgggacgctttcgggacccacattgcactctgacttgcctggggctgttggcagtgtcacatcactgagtttatccaccgccatccacctctatccaccccataaggtccctacagcaagtgggacagcagaccttgtgctccttgctctaaacagtagagaatcgttaatagtggagcccaaaacaggcctcattccctacccttgactggtttagctgtggacatgacccacctctggccggaggagctgagctggtatctgctgggggcttcctgggaaggtttaccattttcatggaaatggttgacattacacatggtatttgtcatgccctagcatggactgtctcatactgctctggactatgtggtaataaaggctttattgtttaagccgcttaaaannnnnnnnnnnnnnnnnnnnnggagatggtcttattctgtttgcccaggctggaatgcagtgggtgccatcatagctcaccacagccttgaactgctggtctcaagggatcttcctgcttcagcctcctgagtagctggcactacaggtgtgcgccatcacaccgggctaannnnnnnnnnncatttggtgggacannnnnnnnnnnnnnnnnnnnnnnnnnnnnnnnnnnnnnnnnnnnnnnnnnnnnnnnnnnnnnnnnnnnnnnnnnnnnnnnnnngccattgtgcctgggcctagtttttttagagacagggtctcacagtctgnnnnnnnnnnnnnnnnnnnnnnnnnnnagctagctcatggcagacttgaactacgggactcaagtgatcctccggcttcagcgtatggaatagctaggatggtccttgtgtggcaccaatctgactaatttaaaaattggtttagagacaggatcttgctacatggc

SEQ ID NO: 88530 - DNA, 514 bp, Homo Sapiens
agtaccctgaccttggattttcgagcctccagaactgtcaatgtcactgttccgaagctagacttgcagttcactgggaagcatgacaccacagcacctccagctgtggacgcatcatggacaagccaggctgagaggagaacttctcattacttgcagcacagcaacattgggttcaatgtatgcccatgaaaaacctcatttaagagaatgccttggaaaggtgccaaggtccccaaactaattaactttcatctctcctggccctctgcaccctctctccatgaggaacattaaacatagaacatcagcttgagaacactctatttaaagcaaaagtccttctaaagatagccttgaatgtccatctaaatcatcctaagtccattttctggcccagaatccacaaggccagcgccccagatgggccctactatggtggcttatatccataaagaatgtctttcacggctccttggttggattaatctgatataaagtgtctaaactgaaa

SEQ ID NO: 88531 - DNA, 526 bp, Homo Sapiens
cagtcgacggtaccggacatatgcccgggaattcggccattacggccggggagtgcgcaaccgttcgctaactgaaatgatggcgactggaacgccagagtctcaagcgcggttcggtcagtccgtgaaggggcttctcacggagaaggtgaccacctgtggtactgacgtaatcgcgctcaccaagcaggtgctgaaaggctcccggagctccgagctgctaggtcaggcagctcgaaacatggtactccaggaagatgccatcttgcactcagaagatagtttaaggaagatggcaataataacaacacatcttcaataccagcaagaagctattcagaagaatgttgaacagtcatcggatctacaggaccagttgaatcatctgttgaaatagaatgacatgtaagagtgctgtaggactcctttgcctaatgctgaggagtaaataccttacacagctgtcctctgggtgtggttttctattttcttctccaaaagttaagttagaaaagttctgtgttag

SEQ ID NO: 88532 - DNA, 721 bp, Homo Sapiens
agaaagccattcacatttagaagtaaaccctggccaggaataatggtgaatttacaaatgttcagtgcgtggtgttggtaaacgaaacaatgagagatttcatcctgcttccttttggaccctagaggtatggtaccacactcatttgttgaattgctccatatcacatgggtaagaagaatggttgtggcagtggaagtttccatttcttttccaaacacatatatttaacccatcttatagagatctgagacactaatctggtccgagtccactacttcaaagtccttccgaggcaccaggtccaggcccaaatgttcattaccccagtccaggcgcacggtgatgtgccgcttaacctcccgcacctgatcctgagtcaggtgaccagacagtagctgccttcgcaggtcaataagttcattcatcacatggcgtagtttgtagaaaagatctactttgtgtttcacatacaactgtttccacaaacttgcccattcttgtagagttgctgtaacctcagtcacaatagaatcttcaagtggaaccacagtttcatactgccccctattactgacaattgcctttttcaagtgaatgtaatttgcaggaaagatccccttcacatttggcttctttgttgaaactcctctgtaccaaccttcacatttttcaagaatctggactgtttctcctatttctaagaccaacccttgaggga

SEQ ID NO: 88533 - DNA, 823 bp, Homo Sapiens; identical to SEQ ID NO: 3896
  misc_feature (414)..(471): n is a, c, g, or t

SEQ ID NO: 88534 - DNA, 565 bp, Homo Sapiens
tttgcctctgagagctcatgcgtgggcccactcgcctaactcctgagatcttatgaggaagctgctgctgatcaccagcttcaggtgttttctatctatggggagactgccttttcttggcaccagctgtgaccagttattatcttagagagacagtgtagcaactgcctgacaatcacctgatggtcactggacattgctggtcggagggacccctctccagccctgcttgtatctgcctgactacttgctctaacgtccctacactggctgcccaggatgtcagacgttctggctctccacctgggagcccaactcatgtttttgttttcttccatccgtgaagcaagtttgacaagcactacagcccatcagctcctgctggtgactccttacggccatgagcaccaggaccctgagaagccgtgtttgaaaggtacctggttttctttgcttagccgtacttgacttttctttgagaagcacctgtttaacattcctggcgattaggctccacatcaagttcttccttatattgaaataaaagctgttgtctcgtaaaaaa

SEQ ID NO: 88535 - DNA, 396 bp, Homo Sapiens
tccggtcaatggaacgggttatgtacgtcatgttgataatccaaatggagacggaagacgtgtgaaatgtattacattacgttaaagaacgggatgccaagccctgcctgatgtggctctgggaattcctgcagagaagagcaggggtggccaggagatagtgagcagctcccaggaggcatggagggatccagaacctggactgaagaaccacctagaaataactcagcagaattctgaaaatgaggtcacgctgggacttccagttccccagccagatggggtcacaatgctgcagaaaagtgaagagctttggaatgaagatctcccggacttcaaggagattcagaaaacgtccagtgcaggtgggaaatgaatgggagctagcattccacc

SEQ ID NO: 88536 - DNA, 716 bp, Homo Sapiens
aagccatggctgcttgttatccggtcaatggaacgggttatgtacgtcatgttgataatccaaatggagacggaagacgtgtgaaatgtattacattacgttaaagaacgggatgccaagacaggaaccttgtctctgttgaagagcatcaagggaagattacatacgccttgaaaccgaaccctgcctgatgtggctctgggaattcctgcagagaagagcaggggtggccaggagatagtgagcagctcccaggaggcatggagggatccagaacctggactgaagaaccacctagaaataactcagcagaattctgaaaatgaggtcacgctggattttccaatccataggcccaaagtgaactcccacgtggagtaggatgaaaacccacagcatctagatcttcaaattctggagaaaaagagagtgtgaaagactgctcagtggctggggtgagagtcaagtctggacaggtgctaatctggagaaaagccaagacctggagcgagctggagtggcaggccctggaggatgagaaggtggcaggagtgcactggggatacaaagaaaccaagattcttctgggaattctcagaggcctggatccacgaaaaacaccgcacctgccatcgaaaccaccaggtgtccggatcatggctcagcagctgtgagaacatggcttcctgtggagcctggagcaatggtgctatcgg

SEQ ID NO: 88537 - DNA, 843 bp, Homo Sapiens
  misc_feature (42)..(53): n is a, c, g, or t
gggtgtctagtattaatgttgccagtaagcacctctctcccnnnnnnnnnnnnattattttaatttgagaactcctgtgtccagtttagaagtgagagacttccatttttagttcctttacactcaccaccctagcaagtgccctgcacagagtaataagtaaattgatttcctaatcacaattctatgtgacttatggtcaaaagagcagttttaataactttaaaagtacttcagatagacgcagaaaattggtgagtggttgaccaagaacactgcacaaatataaaaaaagttctggaaatgcagaatggcgttagatttatatttggtttgttaattttatatcactgtttttcactgttttttgtggacaaataatggttgctttgctgaagtgttcttcctcaatcttgattgccctgtacctacccaaaagctgtagtcacacgtcctaaaggccaagcaaacccaccgggatggtggggggtcttggagccaagctcttaggttcctcttatttggggcagtaccagtccataccagctgcgatttgtgagtggacctgtggtaagaagaatagaaaaggctctcagagataaggttttttacatgtgtaacaatcccaagatttcctagattaaaatcttaattgattttgaaattggatttttatttagaatcaaaattaggacaagaacagataacttcttcagatacatttgtgtaactttacagaatgtcatcaagctttggggctctctggggcacatgatttatccataaaggagatgcagtatgcttacttaaattaataaatttaaaatctttaaaaagtgtaaa

SEQ ID NO: 88538 - DNA, 603 bp, Homo Sapiens
aggccactgggtgacccagcctggtccggggtgaaacgctagagaaggcgcctcgccttccttatttcaatgcaactcctcggccccagacggtaaaaatagtttccaagctgccgcggacgccaaggatgtgtttgcagagatcaaactggggaggaggcagctttgtaaaagttgcagaaagattagccgagaagcgtccgcccggcggggctcaagaaagcttggggacagctccatgttccttggggcggaatggcccaagaattggcctgggtaaccccctgcccagttctctgtcctcacttcgagccagtgcttaaataacttcccgccgcctgccctgcaaacttcccggcgcggcgccgttgaggccaggacacagcaaaggctagcaaaaccccgccgcggcgcgctcggccccggccctgagaggctgcgcgggtgggaggaccagtgtggtttctgctcccactcggctgcccagaccctcaagaccgatcccccaactcctgggagcgggtgcttccctctgggagccgagatcttgcggggccagcgagggcgcaaagtgcgcgcgctggcccgcgcgggggcggccgc

SEQ ID NO: 88539 - DNA, 588 bp, Homo Sapiens
caaatattgtagatgtgtatggcaacccagctgtccattatgctgtttatagtgagaacttgtcagtggtggcaaaattgctgtcctaaggtgcagacatcgaagtgatgaacaagcacagccctcatgcttgccatatgccatggatcatcagagatagttggcatggttcttcagcaaaatgttgacatctgtgctgaagatacgtgtggaatgattgcaacgttatgctgttgcttgtgggtttaatctcattgatcaacaacttttggaatataacaaaaggtatctaaaaattctcaaaatagcaatccaggtaagacctctgatagtaaactacacttggtggtgctaccatgagattataggagtgttgatcacaaaagaactattaaaaaagcaatgtgtaagtagcatgtgtttacatatatacctatatgtaagtgtttttatatatacatagctttgatttaattttttagtttataattcagaattaagaatttagttgggcaacccgctcgggtcccacttccacactgtggaagctttgttctttcgctctttgcaataaatcttgctagtaaa

SEQ ID NO: 88540 - DNA, 968 bp, Homo Sapiens; identical to SEQ ID NO: 3601
  misc_feature (521)..(533): n is a, c, g, or t
  misc_feature (573)..(625): n is a, c, g, or t
  misc_feature (725)..(738): n is a, c, g, or t

SEQ ID NO: 88541 - DNA, 550 bp, Homo Sapiens
attggcattattggtgttttactgttacttttattacaaaaaataacatcactcatattctcagagatcagtggttgtgtaggctttaaattaagtcaaaccttgctaattgcccgtgaggagcaaagctggttccctgctgggaaacaggtgcatctttgctacttgatgctgatgttgtccttgctgttgtcaccaagcccagcatttccatggctctcttctccaaggtgagctccagccttgggcacagaggtgcctctctgtaccttctgtaatgttgcacttttacgggaagtttccagaagcaaggattcttcctgtcattgtctgtgctatggtcaccccttgtacttggctttgagtcttgttagacttcctcccacccattgtggatccactggaattctgtcttcatggagcatcaaaaaagctgttctctgtagggcgatagtcctcagagatgttccagggcctcaaaaacaaatatattattattctccagttgttactgtcactagtgtggattagaggtgctatcatgggactg

SEQ ID NO: 88542 - DNA, 760 bp, Homo Sapiens
cccaaacctgactgtcccgggagaagtggccctggacgggcagaagccgcagcctgaaaagacccaggaagaggaaaagaggagtaccgcgccggagccttccgcagctgccgcttcagtccgaaggaggaagggaaccaacccactttctcggcgccgcggctcttttctaaaagttgtgaaagcagctgtagacaacaaggaagtgaatgaatgttgccgtgctccaattggcccataggccgaagtttttggactcctggtatagacaactgccaaatccaccaacaaacagtatgagctttattacactacaaagccaggactggctatttttggtggtctttgttttctagatgagatgtttttctctgagttcatttaaaatgattctgcataaagcacatactctactgtacaaaatacttttgccttcatggtgatgaaaactatggattgagggtcggggtgataccattctttaaagggatgcagctaaaaagtagggactacctgcatttcttatctaaagataaccacagttggcatttagtgatatactggctttgtatcatggccaaaagtatctgtaaagaagcttgtgggcatacttttgaaaccttctgaaaataaatgtaaagcatttacttcgtgtgtaaaattagaagtgtctatggttggtttgaataatatgagtcaaattataagagcattaaagtttgatactgctatctattaaagtcttaatctcttgcaaaaa

SEQ ID NO: 88543 - DNA, 381 bp, Homo Sapiens
caaataataagacttgtttattaatttttagtgaccctgcaaagttgatttactatatttactattttttccaacccattatcattagctttggaagtagagaaacttgcccccagattctagaaaatgttgataatcaaatccagttcttggtggtagcatgaattttcttcctgcttagtgccgtccaaactcttggtgagaagctttttgccagatgtcattttaaaccagaagccactgcaagcctggaaaaatcagcttccttggggtgtttgagatgtaatcgaaaggactatttccagaagcacttccatgtgtaaaacagcatatggccggtgcttcagcctgcctggagggtgttggtgtcagcatgaactc

SEQ ID NO: 88544 - DNA, 685 bp, Homo Sapiens
  misc_feature (16)..(16): n is a, c, g, or t
  misc_feature (51)..(51): n is a, c, g, or t
  misc_feature (188)..(201): n is a, c, g, or t
aaaagcagaccaagcngcgggccgcggaacatcggccaaagcagggtctgntgcagagaagtacgagctagagtgaggcatgcagataggtcagagcaagagacatgagacaggtagagacagacaagcccagctctgggatctgtatcaggaaactcaaatcgaatagggaagtaacaatcataccnnnnnnnnnnnnnntcaatacaaacaccctatttaaatgaaaggagtttaaaaacattttttaaggagggagaaaggagaaattttggtttttcaacactgaaaaaatactacctataggaaagtctgtcaggtttggtttttttgtacaatatgaaaaggatattatctacctgttctgtagctttctggaatttacctccccttttctatgttgctattgtaaggtctttgtaaaatcttgcagttttgtaagccctctttaatgctgtctttgtggactgtgggtctggactaaccctgtggttgcctgccctcctgagcctccgccttcccagcagcggcaccaaggggccttagggagccccaaaacctaccactcgcgtgttccccaagcgcctggctgctgcttcttgcttcccgtcccccagccccatgctcccttttacattctgtgtgtatctaaaggatggaaaaataaaacgcaattaaaaggaaa

SEQ ID NO: 88545 - DNA, 672 bp, Homo Sapiens
cccggcccggccgcgggcagcagggcccgggtctacgccgaggtgaacagtctgaggagccgcgagtactgggactacgaggctcacgtcccgagctggggtaatcaagatgattaccaactggttcgaaaacttggtcggggaaaatatagtgaagtatttgaggccattaatatcaccaacaatgagagagtggttgtaaaaatcctgaagccagtgaagaaaaagaagataaaacgagaggttaagattctggagaaccttcgtggtggaacaaatatcattaagctgattgacactgtaaaggaccccgtgtcaaagacaccagctttggtatttgaatatatcaataatacagattttaagcaactctaccagatcctgacagactttgatatccggttttatatgtatgaactacttaaagctctggattactgccacagcaagggaatcatgcacagggatgtgaaacctcacaatgtcatgatagatcaccaacagaaaaagctgcgactgatagattggggtctggcagaattctatcatcctgctcaggagtacaatgttcgtgtagcctcaaagtacttcaaaggaccagaacttctcgtggactatcagatgtatgattatagctcggtcattgtcgtagtttgtctgcatgctatgatg

SEQ ID NO: 88546 - DNA, 753 bp, Homo Sapiens
  misc_feature (473)..(473): n is a, c, g, or t
  misc_feature (563)..(563): n is a, c, g, or t
  misc_feature (595)..(595): n is a, c, g, or t
cttagcggggacttccagggcccggaggcgggctgcctgcacccagcgccaccgcagcccccgccgcccgggccgctgtcgcagcacccgccggtgccccccgccgccgctgggccgctcgcggggcagccgcgcaagagcagctcgtcccgccgcaacgcgtggggcaacctgtcctacgccgacctcatcaccaaggccatcgagagctcggcggagaagcggctcacgctgtcgcagatctacgagtggatggtcaagagcgtgccctacttcaaggataagggtgacagcaacagctcggcgggctggaagaattcaattcgtcataatctgtccctacacagcaagttcattcgtgtgcagaatgaaggaactggaaaaagttcttggtggatgctcaatccagagggtggcaagagcgggaaatctcctaggagaagagctgcatccatggacaacaacagtaaatntgctaagagccgaagccgagctgccaagaagaaagcatctctccagtctggccaggagggtgctggggacagccctggatcacagttttncaaatggcctgcaagccctggctctcacagcnatgatgactttgataaccttagtacatttcgccctcgaactagctcaaatgctagtactatttagtggagactctcacccattatgaccgaacaggatgatcctgggagaagcgatgtgcatcctatgtgtaccccgcatcttgcgaaagaatgccct

SEQ ID NO: 88547 - DNA, 456 bp, Homo Sapiens
ttgcctccccccaccctccctgtcccctgttggccaacctgcctgcaaacatggagggcatttggccacagataggcaggaggagctcagttgtcggacagctatgcagtccctgtccggtggtgctggaggctccactctccttaggttcatagtctctccccttctttcccttccacttctagagcagggaggcttggggaggggaaaatttagctctgggtagctcttaaatcttagcctcagttgtggggtttggtttcatgtgttagataaggccaagacttagagaatcagtgggaaaaaaccttgagatctccaacacgctgggcccctccctggggcggggactctaccttccagattcagtccctagtcttgcgatgaattctgcattgttcggtgttttttgtacatgtcaactcgtaaatctgattaaattgggttcttgaaaaa

SEQ ID NO: 88548 - DNA, 451 bp, Homo Sapiens
tacttgcaggggactgggtgtagccggctgaaaactgcagaaggaaaattttctttataagctcctggagggcagcgacccactgagatctctgtaccgtgacatctgtcactcgctagaccctagtacagtgcgtgacacgggattaagcactttacaaaggttaatggaatgaattctaccacgtgctagagaaaataacttcttcagagagagctagagaggaatcttacgtttaaatacagactccaatcacagtttttacttttgcaccagagcgattgtgcgtttgtttccgtataagtgcagtttatcaagccgaagctaagctacccaacgtttgctaagaagtactgtgtatttctggaaatttattcacaagtctgtgggaaatatgtttaattcttcttggaaatctcataaactctgaattcagtaccaccaaaaaaaa

SEQ ID NO: 88549 - DNA, 621 bp, Homo Sapiens
atgctgatttagcagacttgggatggggcttgggaatccttatttttctcaagcaccctacctgctcatttcattgattttgaagcaaatgcttagggatttgcctcccacttgagaaataccatatgggattccaatcagaaaccaggagtagagaggccgaggtatgagaaaacctggtgaactcaggcaaggacacagagaaagaggactacttataggaatataagttaatacaagccttacagaagtctgactttgagccaggacttgaagcagacactatggctcatgcagaaaagaaacttcttcccacaagactgccagcgaaattttgcagactcaagatgttcggagagtttggacaatcatcacagtttttggacgcctatctgagagactggattctctgttgggaatatctaggtatcagatggtgccaagacttcagaggagggggacattccctgtttattagagggaaaagaatctggagcttctgcaatccaggataaaagagaaagctgagaagaaagggcagtttggagagagagaccatcttctgtgaagtttattccgctcatgagtgtgaataaaaaattgctaaatgtgaactcaaaa

SEQ ID NO: 88550 - DNA, 403 bp, Homo Sapiens
agacataaagcacttatgacaattatacctgatttccgcccattaattctatgaggtaggtttattctgtctcctttaacagatgaatctggggcatagaggggcagtcacttgcccaaggttccccagtggtagagctggggtttgaccctgggcagcctggcctgagttcttggcttgtcaccactcatcttcctctgtcagtgccatgatgagcctaggtgagaggagatgaaccagaccacggaaaggacatgagcatgcagtggggtgtggttagttgctgttcaggaagctcggtgattgggctcgccaagcaggaccacacttggacttatgcccacggttcatggcttgggggcctgagtggggggcgttcctattcactgaaatgggagatgca

SEQ ID NO: 88551 - DNA, 547 bp, Homo Sapiens
ctggactttggccactacgtatctcacaagaatagaatacaaatagcgaagcctactgttgataccaaacctccagtggcgcacacaaatcacattttaaaattgagcaaactacagggtgaacaaaagaaaatcaacaaaatcgagtatgaaaacaagcaactgtgtcagaaaatcgcaaatgcccatcgcggccctgccaaggtggattgctggaatgaatatttttccaagagcttaaacagagaaacaaggaaccgcgagctagtgagaatcaccatggaaaaccagggcattctgaagaggcttgttgatcgcaaaccccactatgaccgcagggcatctgagatagactggcagaattcaaggcgctatatcagaaataccacgagatatcttctctcccaaaatgaataggttactcaccatggaaaagatacaagagaaggccctaggatttcttggctgctcaggatctcaagacactcccgactggctgaatgctccatcttcagatgcttcaataaagcttggaacataaaaaaaa

SEQ ID NO: 88552 - DNA, 638 bp, Homo Sapiens
ttgggattacaggcgtaagccactgcacttggcccaggatatttcaggtgaagaagaccatcagtgccctggcacaacgaggtggaagtgccctgtgtacctgagaaacagcacagacttcggtggcgctggagcacagtgtcccttaatggcagcagtggaaaccgagcctgggatgacagcttgggattcgaggaggctttttattgtctgactacagggtctggtctttatttggcccagatggagactttgtgcagggtggagacatgatcagaggagtacatttcaggatgtttatgactctaagaccttcttatgattccaacatcctttcatgctcctaagctcttccatgtgatgctgaggaaactcccctcccctccccagatgtctcctgcagcctcagccccttgagcattttcatctctgggtttctgtgctaaggaactcagggccctggcttcccatcctaccattttgaacatcagcacctttaaaaaaaacccctctcaattcttgggattctgagaagaaaactccttcatcttcccctttctgctctttcctagattttaacctaacttcagctatttcagcacgttttctgttcaataaatgaataattagatcttaaa

SEQ ID NO: 88553 - DNA, 512 bp, Homo Sapiens
  misc_feature (12)..(12): n is a, c, g, or t
tctggactgagnaagcagaagtctctagggcagaaacggaatcagtgcctgaagaaaatgatacaggtattcaaccagctcaaaaagatacatgaattgaatcttagtcaacctatccccttaatcatcgaagaaaagcagatacctgcctctaccacatttgttcaaaagccattcttaaaattactaatggaagaggacagaacctctgacatatgcaagaaatttaggcaacaagaggaccagacagaggccatctggaatgttgatctgtccacttcaagctacccaatagcagagaagacatctatgcattcactctgggcccagctgggtgggtacccagatattcccaggctgcttcagttagaagtgcagtctaccttccgaaaatctcttgcatccctccaatcacgggttaagaagattcccaaatgactgtaaaattaaatacaagcatgttgaaagtacatttcagtatctttcagtaaaatgcctattttgttctcaaa

SEQ ID NO: 88554 - DNA, 818 bp, Homo Sapiens
  misc_feature (219)..(219): n is a, c, g, or t
cagactcacagcctcccatcccctccagccccagcccacctgacctacatcagccaccttctgattgattctgttttttcctggggaaaaggccaaaaagccatctaggcctcaaccccagcatctctgaacctctgacccagccctggacttccaaatttcagacttctttcagctcctgcttcttcgtcacaggtacaccagggcatccagcacatngatttgtccccactcgccttagcctgtctcctgccacagttgtctcattttggtgaagtgcgtgtccagatttccccatgctcccagctgcaacacggatctgtgaaagacagtacagcagaaaagtattcacatcctggctctctctgcccttcattgtctttaagctctttaacaagttttacttggagaggaaaacaactatctagacaggaacacggagcagcagagggagaaattgtgtctttactgatttcagtcaattattgcagtgaccacatgtctcaggagtgttgatgtccaaatgagggctgacccatgaaaggtcagcaaagaaaaaggaggacctaaactttcctcggtttgcaaagttgtaaaagacccatggaatgccaactatccttgtccatggacatgtggacagactgtccagtggctatcatcaattttgcatctatttgtaaattctatgtcagcattcctattgtcctagctatgcgtggcatttttaattctcctttgggctggttgtagcatcttactggttccctcattaattaatgaactaaataaaatctatgacatgtgttcattttaaa

SEQ ID NO: 88555 - DNA, 667 bp, Homo Sapiens
aataaataaaatggagtctgatgggacattgattaaaggtgaaggatgattgatatatagatcatgaaaagaaaaatgaatggcaggaaaaaaagtttggtccttaatatactttggcctagttaaaatatgtgcctttttggtgtgttttgttcatcactacaagataaaaaggaaacattacaactcaagtctttaaaaagttcatttattgaaaatcatatgtataacctagcatacgaatgagcagatttaaacacataacttcaagccatttctgaaaacatacaccaggagctctgctcagctagagtcagactccagctccagcccgactgcgtgcggggacagcgcccgcgttgatgaggaccagccccactgcaggctgaggcggtgtcaccctgggaaggtcgtggtgcgttgtggcatattaagtctaaaccagatgaatgtaaatatctctttgtaaatcatttatttcactctgttccatccaggtcagcaatcagattgtggcatgctgggtaactggaaaaaataataaaaagtaagtttcaatagctcatgttcttcaatgttatttgtcttctcatttgctggtttagtcaccttttatgatgaaaactgttgttggagaaaaaaacctgttgctaaaaatgtggaaatt

SEQ ID NO: 88556 - DNA, 497 bp, Homo Sapiens
ctgatcgatcgaaataggagggaaaggtagagtggaaattgatttcttgcagagactgaggcgctgaatgatagagggaataaacatttgccctggataaaaatgttcttggctgttgtccagctctaatgatgtcctagagcagaagtgtttcttctgatgtctcattttaacaagaggatgatgtctgtgtatgtctctgtgttttagagaggctggcaaatgctgctaagaggatctgaggttcacataaagaggatgaaaattctgaattactttcattgcaaataaaccttaacaattgtgagagttagagagcatacttttcacataagactttggtatgctgcctaaagctacttacataatttgctattcagagaaatgcatttgtttattgaggacccacccggacttaaattggaaaaatgtaacattcagatttttattttatatgtgaaataaatgtgtgattgctgttcttaaaaatttgaaaa

SEQ ID NO: 88557 - DNA, 562 bp, Homo Sapiens
ataagggtgttagggggagcggatattaatattgttcccagcttcaatgaggtcttatttatacacaaaaaaactgcacataactaatgtacgctatttgtgaatttgtgggacaaaaaggtaaaaatctgtaaagacaaacttgcccaggatagcagaagaaacgaaagtagataacaaatcgtgggaaaagctcagtacacataggatcctgaaaattacgtgaatgaatttacataactatcttaactattaaaccgttaatgcctagagaggagaaaatatgttgattattcttcattattttattctgttaatctagtagagtaatatgccaccaaagagaactcagtaaatactttctgatgggaactagataaagggacagtcatttcaacacagattcctgtgacttaaagtaacaatattattattaataatggaacagaagttattctaggagataggtaagaaactatagcaatgatacacttagggatatagctggaaaagtcatttttctatgtatgagaacgagctcaagtttcaacgccctaaactg

SEQ ID NO: 88558 - DNA, 504 bp, Homo Sapiens
gagagggtcccccatttcctcggtaaggagggtgacctcctcgctccaatcagggactgagctgagctgaggacaagctgccctttcggtgagcctatctctgtgttgcttgtttctaggaactaatcctccaggaaattaacagacagtttgctgtggacaactagagccctccccttccttagccctgagcgaggtaaacaattctgctctgccttccggaagtttcaaattagctcttcaaccagcgttttcacgcagcttccagtcctgccacagtcttgaagaagagatcagctttcgcgtcttcattcttgccaagattagctgcccttcgaatctcccgtgtgtcattaatcccagcacgaacaagcacttgggaactgcgggctgcagatggtctgcttatcctacggaaccctcctcttttgaggcttaacccctttagtctttgttgcttctgtagctttctgatgccattaaagagatgatttttaaaaaaaa

SEQ ID NO: 88559 - DNA, 583 bp, Homo Sapiens
tctcctcaaagactgggatctcagacacaatggcccggagagcaatggagccatccatgcactgatctagaaacattctcacagcattaataggttgtcatctgtgctttcttggcaactaacttgacttgcgtagcttgtgtagaggggattcaaagtctccaaatagaaatgtgaacattaattctccaacccacggtcttgagctgatccaacctatggctgattctgcattgcagctgattagcagatcagcactctcaccatgtgaaagtcttccaatagatgccatcattgccttgaatcgtctctgaacttggagactgctggtgcaaatcttatcacttgatccagccgcaacgcctatcaaaaggtcacagcagtggcggagaactgatgacttctcaagggcaataaagttaggcatatctttgaatctgctagcataaggagtacccctttcctcgttctcattcccaaccacagtattagacctcttgctcacaccaacactcaataatgcctggtgtaacccatcaaatatgaaacacaagaatactaaacttggggtcacagggtggaa

SEQ ID NO: 88560 - DNA, 473 bp, Homo Sapiens
cctatagtaaaaaagttggatacactcttgttgtagaatctacaaagagacattttgaagttcattgaggtctatagtgaaaaaccaaatatccagtgatagaaactataaagaagctatctctgaaaatactttaatgatgtgtgatttcatttcacaagttgaacttttcttttgattcaacagcaggttggaaacactcttttgtaaaatctacaaagaaacattttggagtccattgaggcctatagtgaaaaactgaagatttcgccttgaaaaccagaaacaagctatctgtgaaaatgctttgtgatggaagatttatctcacagagttaaacgtttgtattgattcagctggctggcaacactctttttgtaaaatctacaatgggacatttcagagaccattgaagtctacagaaaaagactgaatatcccatgattaaaactagaaacaagctatccatcaaa

SEQ ID NO: 88561 - DNA, 465 bp, Homo Sapiens
ctgtcagagcgtttagcctgcttaaaccgaggaaaatggtacagtcagagctggtctggtatcaggaaaaaggctgcctacgataatccacggcaggaccctaaaagtctcgaccttagggccccctcggaccgtctccaaggtcgggtcccgctggagaaggaggcatttcgagagtgttggaaacactcttttgtaaaatctacaaagaaacattttggagtccattgaggcctatagtgaaaaactgaatatttcgccttgaaaaccagaaacaagctatctgtgaaaatgctttgtgatggaagatttatctcacagagttaaacgtttgtattgattcagctggctggcaacactctttttgtaaaatctacaatgggacatttcagagaccattgaagtctacagaaaaagactgaatatcccatgattaaaactagaaacaagctatccatcaaaaaa

SEQ ID NO: 88562 - DNA, 1314 bp, Homo Sapiens
  misc_feature (186)..(238): n is a, c, g, or t
  misc_feature (311)..(354): n is a, c, g, or t
gacgggtattttgtattattcatatgtcacatcctaccaacagacagtaagtcaggcaaggctcctggtgctccttgtcactcacgtaattttcacatcaggaaaactctgggctgggtgcagtggctcacacctgtaatcctagcactttgggaaaccaaggtgggtggattgcctagctcagtnnnnnnnnnnnnnnnnnnnnnnnnnnnnnnnnnnnnnnnnnnnnnnnnnnnnnattagctgggtgtggtgttgacgtttgcggtcccagctactctggaggctgaggtgggaggattgcttgagtnnnnnnnnnnnnnnnnnnnnnnnnnnnnnnnnnnnnnnnnnnnnaagctaggtgacagaatgagactctgtctcaaaaataattaaaaagcctctgccccaaactcgttaaaagattttataaccacaactgctgtttctgtgtagatgcatctgcatgcccaggagcagtaaatgcaataaaatcatttggttatactttgaacacaaaataaacggttgaggcttttactttctaaatagtttgtctcttgtatcaacatagctggaaaagggagaaatccgatttttaaggccaagggaggggaaaattccaagtagaagccaggctctctgtacacgtttaccccacctacctgtgtgctcctacctgtgatgaggattctctctgtagctctaaggtcttgggaaggttattcaccttcctgcttcagacgtctgactcaagagaagaacactgttctacttaccagagtgtttttctgtgtaaaaccacatcatgaaggagaaagcgacaaagggaatgtgaggggctggaagccacagggaggctgtctcttgagtccccaccactgatccagagccaaccaaggcacctcaggaaatggaaggccacattgcctctggatttggaaatcctcctgggtaatgtaactgaaacccaggttgatgccatgcagcaggagcagcagggggaacgtgctctcaggagaggtcggccaaccctccagcccaacacccttcaccacagtggtggaggaggctgcacccaggagatctttgtctcccttttggccactgatacctttggccttatctgacaacagctacccctcgatccttccctcccaccccaggggctgggcagctggctggagctttgtgtccaccttgctctggaggttgagacccccatctgagcaacatcctctctctttgttcctctgatcccttggcatcgtcacaaacccacaggtgcataataaaaacttgctgagtcaaaaa

SEQ ID NO: 88563 - DNA, 610 bp, Homo Sapiens
tttttagcttgacagcaaattttattcgtaacagaaaagccatcctaagactcactgtagaattgctccaattcatttctcttatctgagatggtcacagtaaaagcagctaaagaaaagaatcacaaatggcccacttggctgggcccctatgcattcttgggaaaggttaattggaaacggcttcgagcctcgccatacagaagagtctcggcgaggggaggttattcaactacagccaaatgaagacttttctttcagaagcaggtggaggggaccctgagtcctcaggtcctgtgccgtacgtaagaaatgatacggaagctccgggagctgatagtcacattcgcctctgtgcttccctgcgcagctagaacaattccatcactctctcctgtgtaacgagcgtccttaacaagcctcaaatatgcatcctcatgccaacagttcctgcaacaaaggcaatctgcacatttcaaaaatcaaaagcaatttggctaaaatacctgtagtataatgtggtacatgcctgtggaagcctccagatctgggctgcaggcatttcgcaaaggctgagcctctccaggaggcacattttttgtagaagtgg

SEQ ID NO: 88564 - DNA, 329 bp, Homo Sapiens
cctcgacctctccctgttgtccttcttcctccaccactgacggggtgtcggtagcgtcttagccaagagtccaattaaagaacgaaaagcgggccggctcggcttctgacctggcacagctgctacggcggcctagcaaattccgccccagaagagccccaggaagggcgccgagtgccctctcctggacgatcgcgggtcgcagaagcccaggccagcgagccctacagagtgaggacactgaagtgtgcaggagcgaaggttaacagtaggggagattgtcgatctcatcaccataataaagagtttcctgtgccctcccgtcaaaa

SEQ ID NO: 88565 - DNA, 535 bp, Homo Sapiens
taatatcccagacaaggttttatacttcctggaacctatcagaaaaattattctagaaaatgtctggttctagtttgtccctttttctccaattatctcttctatgaccaggatagtgcctgagatgccctatttaatgcagcttctcctgatgctttggctgaagatggtgggaatccaagcactctggaaattcagacaattctataatccctccagcttccttgatacctattcatgtcagaacagtgtgccaggtcccttgtggagtcttttaataaaaaataatagaggctttttttcctgccatcaaaaactttagctagatgccaggcatataactgaaaacatgattatttgctatgtctatatgcatattcatttgccatagataaagcagagatgccaagcacttaatgggaaaataattacaaaatgaatgaattgaacatttttatacctttattgtcaagtatctaataatctaaagatgttgatgtgtctcaattaaactctttgatgctaatgagtaaaa

SEQ ID NO: 88566 - DNA, 573 bp, Homo Sapiens
gctttggtagagtaagagagtgaatatggtgaaattagagagggtggagtataatatattttgaagggattgtcaatgaggtgaaaattgagtattgggtttacagatacatttgagctaaatatgttggtgtaggtgaactctaaaataatctgtagcagtatgttctgatgaacataatctctagaaagaatactacagatcttcaagcataagatagaactgtatgtattgacctggaaagccatgataaatatgaggaaacaaatctgaaagaataaattccaaattgttagcagtgtttactaggaggagatttgggagcactctgcctatagtctccagaaaaccagcaaacaagttcctgccaaaagctatataatttctcgaagtttaattaggttttaattaaatatacttaaatctttgtaatcatttctctacctgaagaattactgtatcacttctcagccttttggctaagatcaagtgtagtatctgttttttcagtttaatatctgatatgtcctaaatcaaaaataataaaaaataaataaaggggagataagagaa

SEQ ID NO: 88567 - DNA, 495 bp, Homo Sapiens
agggtatatagagaaaaggatctcatgtattgctctacttttttcttctagatacctgttaacttcttacgctttcatgatacatttatctagttctgttattcaagttaaagtattatacagttaagtctatggcagagtcagattcttttatgtgtctaactgttgcgaagtatagacttcttatatcttatatggtgaccattaacatataacgagcatgctagcatattgttgtctttgagagcaccgtatcaactttttgatctgtagaatgacagaagccacattcgatactctgcgactctggttaataatcctgctgtgtgctttgcggttggccatgatgcgtagtcacctgcaagcttatttaaatttagcccaaaatgtgtggatcagatgaagaaagaagcggggcgaataagcacggttgagctacagaaaatggtaagttttataccctagtcaaaatgaaaaatagcaaaaaccgcactg

SEQ ID NO: 88568 - DNA, 576 bp, Homo Sapiens
gctgccaacaaagtctgaaaatctctcaagtttgttataaaaacagcacagttagaacatgatgacattcctggagggaaaaataagtccacttatttgtttctaaaatgcctgtatcccaagcaactagaacacatagttggctatacttaatgaggagtcaagacaaaccattcaattcttctaaaaaagtaagaaagtattcaaagcaccagagtcacaatgttgagctcaggtgcaattttctattcactttacttccagcatggtcgggttaagagtggactacatagcttgaagcggatttcgttgagattcgttgtaattgaatcaacaactgaatgagcatgcctaagtagtggctccagagagtctgctttcagattttcttgccagctttgacccaagattaccctgggtctgcgagttttatcacctgctttatcatttgattacaagtatagtataactgtatttccttgtgggatagaagctgtaaaaaataagctgaaaataataggggatatatataaataaacgatctgagaaagaataaagaaaataattacaatcatg

SEQ ID NO: 88569 - DNA, 732 bp, Homo Sapiens
  misc_feature (605)..(668): n is a, c, g, or t
  misc_feature (699)..(700): n is a, c, g, or t
ttttaaaaaaccaaaggatatattttccattcagatttatggtaactattttatgagtaaatagaagtttgaatatttttcttatggtttaatctgtttttttaaattatatttattggtgatataaatgtatcagatgtatcagtgcctgtgctcaccaagttcgtctcctaagaagcagtttgtgtgctacaacgtatgcgtatgagtaaataaccacatgaacaatctgctgaggctgccaggtacatcccagcccaggacagccgctgggccagggggaagaggtactgctgagggaaggaagcagctcttcatgggcagctagccaggtgtaaccatcacagtaaaaacagccaaagagagaagaacaacagcagtccttgaggatattgttttccatgtttatttttagaggaaatcataggtttgtcagtttctgctttgtgactactgtgagaagctaaacaattagaagcattacttgtgatatttttagtgtatttatgttgttttcatttgatttgggggtgtattatagtactgatcacaattctaatccccatcaagcaatgtacagataactcttccaagaaatgtttccnnnnnnnnnnnnnnnnnnnnnnnnnnnnnnnnnnnnnnnnnnnnnnnnnnnnnnnnnnnnnnnnggtaaccccccttcccctgttattacgacannccaataaaatggctctgccctttattggagga

SEQ ID NO: 88570 - DNA, 2369 bp, Homo Sapiens
acccacttacggctaggtagcgaggcctgggtgtgtgaattcggcacgaggcgggaagtcagcggcgccttcggatgtggcggatgcggccgtgagccggtcgggggaggtgctgctgctgcctccactgtactcagacccaggtagcacaggattgtccatcctccagcagctcagtgcaacggtgtgaactcagcctgtttcagagcctccacaccatgacctccaagaagctggtgaactcggtggctggctgtgctgatgacgctcttgctggcctggtggcctgcaaccccaacctgcagctcctgcagggccaccgcgtggccctccgttctgacctggacagcctcaagggccgggtggcactgctgtcgggtgggggctctggccatgagcctgcccatgctggtttcatagggaaggggatgctgactggggtcatcgcgggagctgtgttcacctccccggcagtgggcagcatcctgggcagccatcagggccgtggcccaggccggccacagtggggacgctcctttatcgtgaagaactacacctggggatcggctcaacttcggcctggcccgggagcaggccaggccgggctgaaggcatcccggtggagatggtggtgaatggggacgacagcgccttcactgtcctgaagaaggcaggccggcgggggctgtgcggcacgtgcttatacacaaggtggcaggtgctctggctgaggctggtgtggggctggaggagatcgcaaagcaggtgaacgtggtcaccaaggccatgggtaccctgggggtgagcttatcctcctgcagcgtccctggttccaaacccaccttcgagctctcagccgacgaggtggagctgggcctggggatccacggggaagctggtgtgcgccggataaagatggcaaccgccgatgagattgtgaaactcatgctcgaccacatgacaaacaccaccaacgcgtcccatgtgcctgtgcagcccggctcctcagttgtgatgatggtcaacaacctgggtggcctgtcattcctggaactgggcaccatagccgacgctaccgtccgctccctggagggccgcggggtgaagattgcccgtgccctggtgggcaccttcatgtcagcactggagatgcctggcatttctctcaccctcctgctggtggatgagcctctcctgaaactgatagatgctgaaaccactgcagcagcctggcctaacgtggctgcagtctccattactgggcggaagcggagccgggtagcccctgccgagccccaggaggcccctgattccactgctgcaggaggctcagcctcgaagcggatggcgctggtgctggaacgggtgtgcagcactctcctgggcctggaggaacacctgaatgccctggaccgggctgctggtgacggcgactgtggcaccacccacagccgtgcggccagagcaatccaggagtggctgaaggagggcccaccccctgccagccctgcccagctgctctccaagttgtctgttctgctcctggagaagatgggaggctcatctggggcgctctatggcctgttcctgactgcggctgcacagcccctgaaggccaagaccagcctcccagcctggtctgctgccatggatgccggcctggaagccatgcagaagtatggcaaggctgctccaggggacaggactatgctggattctctgtgggcagcggggcaggagctccaagcctggaagagcccaggagctgatctgttacaagtcctgaccaaagcagtcaagagtgccgaagctgcagccgaggccaccaagaatatggaagctggagccggaagagccagttatatcagctcagcacggctggagcagccagaccccggggcggtggcagctgctgccatcctccgggccatcttggaggtcttgcagagctagggtgtgtgactgcctcccttggcctcagctcctctcactgctgtgctgaggtggcctttgtcacttcctttctgccttccaaccctcaccttcccccggcctggccccattggcccaccctctaagttgagcaggaaatcctccaccaagcttccagaactacagacagcacccagagtgagctggagtgggtccccatgcctctccagcatgccctttccctttgcaggagggtggagtccctgggtcatgccctcccctgccagctatgggcttcagagataaggcattttccttgtgcagcctttacctggcaatcctaatttggttttaagactccctgtgaaatgctttccgcaccttaaccccagtgagcgtgaaaaagaaagttaataaactataatacatggaaaaaa

SEQ ID NO: 88571 - DNA, 1264 bp, Homo Sapiens
accttccaaaggtgaatcatttaactccttagaagggaaacctaacaatcacttcaaatactctaaaattcgacagagtaaaatctcaaattactttctcatcttcctaattcttattgaaaaggagtccctccatgaagtgtgtgcactttcacgaggatgccagggaggactcactgattttcacactggataacgttgaaccgctccagtttcagaaactcatcaaaaagaggatttactacgttaaaacgttcatgtcccaagttaaaaatggatactgaatacaacagcatccatatttctggagaaaaatcagtacacatgtcacttctgttatagaaatccatttacagtgtgtcccgctccatggaagccctggtctcaggcacctccagctttaccgtctccctgcacacaccgggagcctggtaggcttcgagcagaagccgaggtcccatcaagggtccagactttccgtgcctcctttgttttcatcgagtctgggccgctttagctctgggggactgccctgagcgtctccaggcgtctctgactgaatttcttctgtagaaggggtggaaatcacactggttggtacagaacttggtggagtgtccgtctttaagggtgttaagtttattctccggggtgttgtcttgctccaggcttgcagtgtgttcagagtgaccctccgggatgggtgggcttttgtgttttgactactgggctgcagggtcttctcctccgaaggccccggcaaggggcttttgacagcaggagtgatggagggagggtccctgatgactgttggggctggggcctgtctggcctgagggggagtcgtgccggggctgctggggtcttgggttctgctggcaggggttccctctaccggtctgggtcctggcgaagaccctcgatgtgtctgactcttggttttctttgctgtatcaggagttctcatgttcaaaactggcttctctttcaaaggaattccaagttcatctttctcaaatgtcacaaatgagcagtaaccgtccgtggaagaaatggccaggaaggcaccatcgctggaccatgaaatgtcactgagggtgtggtaatgtatattagacacgtaaccaaaagggaaggactgctgggtgtcatacagaagcacggaatcctccgaggccacagcaaacaccaggcggtagggcagactcatcagctccacacctgttccaccactggatcccgggaatccggaccggtccagcct

SEQ ID NO: 88572 - DNA, 608 bp, Homo Sapiens
ttagcccaggagcctgcatagggaagaaaggacagacagggcctccttactggctgacactcaggaggggctggggcaagagagcagagggagcgcagggccaggcaggggctgctgaggatccatgggagctcagggtgcacaagggggctgcccttcctgggctgcaggcagcatcccctatgggagctgagaaagtccaatcctgagatgggacagtgctgcccaggggtgtgtggctgggccctgacaacagtctccccaaaagtgaccacatcaccaggctcagttccaggaaggctgagaagtgcccagtacactgaggatgcacctcagttacataaaataaatgaaactggagtactaacgtacagtttaaaggttatagttactatttttatatgatatactagtaatttttgaatagggtaaactttaggtgttttgacaccaaaagaaaactacatgagttcatgcatgtgttaaattgctttactgtagtaatcatttacatgtatatgtatatatgaatataattatgggctcattaaatttaaatattaaaaataccccacaaagaataaagttaactggaaaactgtaaaaaa

SEQ ID NO: 88573 - DNA, 496 bp, Homo Sapiens
  misc_feature (268)..(448): n is a, c, g, or t
  misc_feature (457)..(457): n is a, c, g, or t
aaagaagaacgttttagacctggcccaccagagatctacttcctatttcttcagtgatcaagaagctgctggggtcgggtactggctccaggattactccagtattgtattacagcaggagtaagggggtataaaggaagatagcgagctagtgtttgtattcttgatgaaataaagatgtcatagaaatcaacaataagaaaaagaccaatagaaaaaaaatacaaaagtagtaaagtatatgtacaaaagatgaacaataggatgnnnnnnnnnnnnnnnnnnnnnnnnnnnnnnnnnnnnnnnnnnnnnnnnnnnnnnnnnnnnnnnnnnnnnnnnnnnnnnnnnnnnnnnnnnnnnnnnnnnnnnnnnnnnnnnnnnnnnnnnnnnnnnnnnnnnnnnnnnnnnnnnnnnnnnnnnnnnnnnnnnnnnnnnnnnnnnnnnnnnnaaggtgggncatttatgcctaaactcatggaccacagtagacctgaaa

SEQ ID NO: 88574 - DNA, 996 bp, Homo Sapiens
ggcattagtaactatgaacaaagtcgttacaaaaagcaggctggtacggtccggaatcccgggatatcgtcgacccacgcgtccgaaagaaatgtactatagatactactttaggaaaacactgtttgtagtcgtgaaaggtgccaaattggcagaggctcacgtttcttctctttacaccaaacagcagagagagatcatcattgcctgaatttagctttgtgactgcaagagcaagaccagttcctgtctggagacgactgttacaataatatcatcctattatttgatgttcactctttatcaatttgaacagatgtttacatgtactataattagcattttatctctacagttctctaagagtacatctgagtccaaagtgtatctgaatgtgtgctctgaccttattcttaaatgttttctccccatactttatagccatttattttttaaacaccttaagaaggaacgaaaaagttctcttggatgacgtatattcaagtctgagccaaattgaggattgtgtctaggaaatctgtaaagccatactactgtgttcattagcatgagcaatttaaaatgaaaatgaattaaaaagttaaacatgagttggtttaattggggggggatcttaagatatatttctgggagtaggatagccactgaaataatttgaatagatgataaagtacttttttatgtactgtaatagcttgtgcaatttcttctggaatatactttctgatgtcggccacgtcattaaccaaatattggtgaaaactctgaggcctttaaaggcaagaagaaaataattttttccacgtgagcatgcggatctggggtttaaacctttgaactttttgttttgcgaagttccatgtttgggcgacaaatcggagcttaagagagaaaggtgggtaaaacggtgtgcaaggttaccccggagggtgcaaataacaagggaaaaggtgattaaaaagaaacacaaagaga

SEQ ID NO: 88575 - DNA, 721 bp, Homo Sapiens
  misc_feature (709)..(709): n is a, c, g, or t
acacgtgaacaaaggtctctggtttaacattatgttgttattctttgactcccaattatatttttcttcatcctttttggattatttatcttttgggaatgatacaagggagaggagacggaagaaacggcacctctaatatctcaggatcttgaaattctatatagccttcaacttagacttttcttactcagactgatccttaaactctaagttaacacattttagggtttcttttcaaattgaaaccagaaaattcagacccaaggactcgacatctctgtgtaggagagagaggttctcacaaaacggtacagtatacatctataattcatgggaaattcctaaggaattcctaagaaataccagctaaatttcctaagaaataccagcaatataatcataatcatctatcccattaactaaaatctcagcctacagtgcctaaacccagatatttcatgacaaaggataatatacagactatctttcctccaagcctcaaatttcctgttcttattatgtatctttcttcttacaatgattgttttaaagaaccatctttgaagtcctttgagatgcaacttatcatttctgctctagattttcaaatattaatagaaaatactgtttctttggcattatctgaaagaagccagtctatggaaaaagtaattgtgaccattgttttattcttttaatttatctncttgtgttaaag

SEQ ID NO: 88576 - DNA, 762 bp, Homo Sapiens
  misc_feature (492)..(502): n is a, c, g, or t
actactgtcagtattaatactgagccagactggcatctacagatttcagatctatcattttattgattcttaagcttgtattaaaaactaggcaatatcatcatggatacataggagaagacacatttacaatcattcattgggccttttatctgtctatccatccatcatcatttgaaggcctaatatatgccaagtactcacatggtatgcattgagacataaaaaagactgtctataacctcaataagtattaaaaatcccattattacccataaggttcatcttatttcatttttagggaataaaattacatgtctatgaaatttcaattttaagcactattgtttttcatgaccataatttatttttaaaaataaattaaaggttaattatatgcatgtatgtatttctaataattaaaaatgtgttcaatccctgaaatgtctgccttttaaatataacacctactatttggttaattttgacgannnnnnnnnnncaattaggaagctaaaaatactactttattccttatatgaacattcatccccctcctggcacctctaaacacacccaaataactcacaagtactgatttaacactctgtattactgaacttcttggaactatttggaacttggaatctcttctctgaataactgccgaaactcaaagataataattagttgatgaaggttatcaattaataaaataacacagaccagtcttaccaaactctaaatacattttaaaaaatg

SEQ ID NO: 88577 - DNA, 408 bp, Homo Sapiens
  misc_feature (257)..(322): n is a, c, g, or t
aggccaccagaggcagaggggaagagcaagggcggaagaatagaagtcaagcagcagcagatggaatgtgtgcacggtcaggtgaggcctgacccgagggtgttgtgagcccttggtcagggtgagcccagtgccaagcagagccatccatgaccttagggccaatgtaaggcaccctaactcttccttgataaagtctctcatcctgtattcttcctccccctttctcccaccctctttcctactccctatccacnnnnnnnnnnnnnnnnnnnnnnnnnnnnnnnnnnnnnnnnnnnnnnnnnnnnnnnnnnnnnnnnnngtcactatccttaaggaatgtacacattctcataacagagacagatactaaatctcaaataataaactaaattaaattacttgaaa

SEQ ID NO: 88578 - DNA, 512 bp, Homo Sapiens
  misc_feature (205)..(308): n is a, c, g, or t
tgtgttgattgttgagtgagagaatagaaaaagcgctttagtttgtttttccttatagaacatgttgacattatgtggacatatttaaatttcccttcagacaccaaattcgtacttttgccaataatgtgtacaaaggcatatattctcacagtttcactaacatttgattttgttagtaactttagttttacttgcaaatctnnnnnnnnnnnnnnnnnnnnnnnnnnnnnnnnnnnnnnnnnnnnnnnnnnnnnnnnnnnnnnnnnnnnnnnnnnnnnnnnnnnnnnnnnnnnnnnnnnnnnnnntcttaaattttcattgttttacctttttgcttactgatttgtagcggtagttgacatgattctacacatctttgtcatcatataagtgttgaatcgtttttctagtgggacgttttatccttttgctatgttttgtttgtttcctttgtggtacaaaagttttaaatgttctatgtattaaataaactatcaatcatgccttta

SEQ ID NO: 88579 - DNA, 590 bp, Homo Sapiens
  misc_feature (12)..(12): n is a, c, g, or t
tttggacctccntggaaaaggttgcctaatttttcgctaccgttaaaccactcaaaggggcacagtccatgaatttttacctatttcaaggtgcaacctttttagaaactggtgaaggagggtcctctacttttactgctgagtatagaacctcaggaatgctccctttctcctggaaatggacctgaacgacatccagccacctcctcagtctctgccatccacaggaggaagcagcagcctatcttcagtaacactaggattccaaggacacacaggatttgcacgtccatatgaaagttccgctttgtttacgggtggtgctagaccaagattattagaaacgtggcctagggagggggaccgggcgtcctgtcctgtgtggtctcactggctcatttcagtagttgaggaaaaatgagcggtggggttttctaatctttggtcggcccaggacctattgatgtgagtgtatgtaaaagggtttgggtgggtgtggctttttcccatcgttttctcccctctgtgactgggtcactagtgccagaggagcccgtccaggccccatccgaagcagttgccggggtgcc

SEQ ID NO: 88580 - DNA, 567 bp, Homo Sapiens
tgcggccgctgctctgggccgtgctatgcggcacttttctgcaccccttcaagagctcgctgacgcgcctgggccgccactggctgcagcgcctgcaccgcgcgcacacgcccatcgtcctggccgcgctgctcctgccgctctgcttcgtcgactacggcgtcgaggccctgggcgagcaggcgctgcgccgccgccgcctgctcctgctgctcggcgccggcggcccgctcctgtacggcctctactgcctcggcagctacttgggcgtgcaggtgctgctggtgcacgctgccacgctcatctgccgcgggctggactacttcagcagcctgtggatctggacgttggtggttggctatgtgttgactgtttcattcaagtggaatgcaagcactgaacgctacttgagagcagtttcaattcctgtctggattatattgctttttcatttagcatccctggctggctcatggagaattccagtattcctggttattgttttcctgatgtctgtgggtaccctctatgaaaaacagaatggaaaagagtcttctggggcagagt

SEQ ID NO: 88581 - DNA, 456 bp, Homo Sapiens
ttcttaccaagagtgggctttgtggaaacagctggtactgatgttcacctttatatatgtactagcattttccacgctgatgtttatgtactgtaaacagttctgcactcttgtacaaaagaaaaaacacctgtcacatccaaatatagtatctgtcttttcgtcaaaatagagagtggggaatgagtgtgccgattcaatacctcaatccctgaacgacactctcctaatcctaagccttacctgagtgagaagccctttacctaacaaaagtccaatatagctgaaatgtcgctctaatactctttacacatatgaggttatatgtagaaaaaaattttactactaaatgatttcaactattggctttctatattttgaaagtaatgatattgtctcatttttttactgatggctcaatacaaaatacacagagcttctttcccctcaaaaaaa

SEQ ID NO: 88582 - DNA, 455 bp, Homo Sapiens
  misc_feature (205)..(247): n is a, c, g, or t
ctttgaggaagtggatgctttgggtcacaggatatacaaaccagtttcccaggcaggctctcagcagagcagccatctttctgtagatgattcagaaaaccccaaccagagggagttggaagtgttagcctgattttgaaaaatagtaatttagaaattacacagtacttttaaaagcagacaactgagaattatttgttggacnnnnnnnnnnnnnnnnnnnnnnnnnnnnnnnnnnnnnnnnnnnccttcaccacttccagagcacttgaataaaatgagaatcacttgactcagggaaaatgacatttaatcaccggctaattaactccccttaccttctcctttactgcatccccacaccgtttcaggtcctttactttgtgcttatggaatcaaagttggtctgtgaggttttctctgatccagatgtattttattaatttaatcattgt

SEQ ID NO: 88583 - DNA, 601 bp, Homo Sapiens
  misc_feature (123)..(123): n is a, c, g, or t
  misc_feature (509)..(551): n is a, c, g, or t
agtgcggtcgctttgaaggctcttccaccaccaaggatgactacaagcagtggtccagcatgcgcacagagccagtcaagcccgttccccagctggacttgcccaccgagcccctggactgcntgaccaccactcgggcccactatgtgccccacctgcctatcaataccaaaagctgtaagcctcattggtctggccctcgaggaaatgtccctgtggaaagccagaccacctacaccatcagctttactcccaaggaaatgggcaggtgcctagcttcatatcctgagcctcctggctacacctttgaggaagtggatgctttgggtcacaggatatacaaaccagtttcccaggcaggctctcagcagagcagccatctttctgtagatgattcagaaaaccccaaccagagggagttggaagtgttagcctgattttgaaaaatagtaatttagaaattacacagtacttttaaaagcagacaactgagaattatttgttggacnnnnnnnnnnnnnnnnnnnnnnnnnnnnnnnnnnnnnnnnnnnccttcaccacttccagagcacttgaataaaatgagaatcacttgaaaaaa

SEQ ID NO: 88584 - DNA, 1145 bp, Homo Sapiens
gcggccgccgtgcagtctgatggacgtcaggccacctcgtggcagctggaagcggctggtcacctgcagtgtgctcacattccacaccagcaccatgccgtccatgctgcacgagtacacgttgctgggtgcctcctgtccgtcctgcacaatcaaatccgtgacactggagcagtgggctgtgagctgcttgttgcaggacatgctgtggacgttgatgatgtagatgacggagtcttccgagccaacccacacctggttctggtcggccatcaccatgcagttcacttttgcagtgcccactttaaaggagtgctggtggatggtccatgaagaagcattgaacacggtcaccttgccttcgctcagagcacaccataacttggggtgagcatcttcaactttttcggctgggtcaagatgccctggagtgtagagcagcacgtccaccgcttgtgggaacgcctcccccgccgaggggttgattttatgcttcagtgtttccagggttgtctccggaagcgtcatgggcatttcgttactcatcttatcaaagtaggataacttggaggcagcgtagatggcgcctggtgactgcagtgtgcccacgacggcgtccatcaagcaagacgttggtcagcgcctgctggacgtagtgagggtccttgtggtcatcggccagcttcttcccagcccacatctccttcaccatcaggtgccaaaggtcacactcggttttcaggttggcttcgaagacttctttcttggacgccactctgatttttaaagtgggtattctccgaagtagaaatgtagtagtggttctcctgacctcctctatatttctgaaggtggaaatctccaagtagcctggccttccttcggttaggaggaacaggcgcttctgggtcatggcgatcttgccaacgcctaggtttgtcttgacggagctggacaacttaccacacacacctcgtttttatccaggtgttccatcaccagccccgccagcctgacctcctgggcttctgcttccgtctccttccagcagttgtagaaatctttgaatgtttctgggtcgatttgtttctcctgtcagtcaaggcctcgaacagccggtgtatgatgctggcgtccttcacgat

SEQ ID NO: 88585 - DNA, 536 bp, Homo Sapiens
ccagtgttactaactgtaattctatcctgttcttcactggggaaaagcttttccagtgtgctgagacagttttggttatgtaactgttaaaatgatgacagtcgtgtggcctgcggatagcactatgattttctcacagtgagttgaacctggcaggtgttgccactcacatctgaccacatttataacactttctgtactcgtatcttgtgccagtagtctgctagtccagattcatgttcctttttctcttttgaaattaaactcatagcctccaaaaatttgcatttgccctgttttgaggggggagaagtggagactattcatgatgctcaatatatcatagtattaaaatatacattgcaaattcctttgtatttatgcccttttgaaataaaaatgaatgttcttagcaaactcaaagttcttgaactctgtagtttacacatccttagaacagcactaccttgtatgtgatattcaagagactgactttctaaagagtcttagagccaagcttttacacatctaaaaaa

SEQ ID NO: 88586 - DNA, 303 bp, Homo Sapiens
  misc_feature (188)..(205): n is a, c, g, or t
aaaaacatctagaagggtattttcatggattgatttttatggatttttataaatatttttcattggttaatggaagccatccataaaatgaataatatttaatctattctttccacttcaatggaatgttagataaataaaatcaccattgactggtgagtttaaggtggatctgtaaacatttttcnnnnnnnnnnnnnnnnnntcgtagtttatttttttcagaagcctacagtgaagtctatgggcatatgggaatcagaaaacataactaaataaaattttctctatgatatctaaaaa

SEQ ID NO: 88587 - DNA, 624 bp, Homo Sapiens
  misc_feature (31)..(31): n is a, c, g, or t
tgagggcacactgtgacatgattatgtcatnacatgtatggtagtgatggggatgatagaagaaagaacttatggcatattttcacccccacaaaagtcagttaaatattgggacactaaccatccaggtcaagaaaagtcacatgccatagccatggtattgcacatcattcatcttgcattctttgagaataagaagatcagtaaatagttcagaagtgggaagctttgtccaggcctgtgtgtgaacccaatgttttgtttagaaatagaacaagtaagttcattgctatagcataacacaaaatttgcataagtggtggtcagcaaatccttgaatgctgcttaatgtgagaggttggtaaaatcctttgtgcaacactctaactccctgaatgttttgctgtgctgggacctgtgcatgccagacaaggccaagctggctgaaagagcaaccagccacctctgcaacctgccacctcctgctggcaggatttgtttttgcatcctgtgaagagccaaggaggcaccagggcataagtctactcacttatatctgtttgtctggaacataacccatgtttgtttttacaacaaataaaattgatcttgaataaaaaaaaa

SEQ ID NO: 88588 - DNA, 466 bp, Homo Sapiens
ccatatgctgattcaccacaagcaacttcacaacccagtactggaatgccatcagccagcaggcccctgccattatctgtgacttctatctgtggctcattggaaggaaacccagtttttcacaaaatctgaggagctgatacggaaagcacaccagatctcatgtgttgaaatgtgaacatgctcaccacagaccaaggacattcaacctgtcaatccccaggatttccaagccaggagtttcatctcttacttgtggaaaatttgtccatttaattgtgaaccaatcagcttttcattgtgtcaaaatcaaatctggatagtgaaatatatattttatctttattgttatcttaaatatatcttggcttaaagagacataagtagctcttccccactacaccagataatgagttgcaaataaatcattcagtagtaaagttcaaagaaagcttgaaagcaaaaa

SEQ ID NO: 88589 - DNA, 447 bp, Homo Sapiens
gctgtgttaacctaagtcaatgttagtctactactgtacatctggtaacctcaatccctgcaaccgaggcaaaatgtgattccaggtcttggcaacctctgaaattccaactccatttgcgagagctttgaggaggccatatgctgatttcaccacaagcaacttcacaacccagtactggaatgccatcagccagcaggcccctgccattatctgtgacttctatctgtggctcattggaaggaaacccagacaaggccaagctggctgaaagagcaaccagccacctctgcaatctgccacctcctgctggcaggatttgtttttgcatcctgtgaagagccaaggaggcaccagggcataagtctactcacttatatctgtttgtctggaacataacccatgtttgtttttacaacaaataaaattgatcttgaataaaaaaaa

SEQ ID NO: 88590 - DNA, 687 bp, Homo Sapiens
  misc_feature (320)..(330): n is a, c, g, or t
atcatcttctcaggtaatatgatcctgaccagagggagatgggttggggcatctattctagtccccacctgccagaataggtgtcaggtggctcctcaccactctacatcattagtgtgtacaatggacacagcattatctgaacttccatggctctatgtaaagcattccattgtattttaataattacgcaagacaaggcctctttcacataaggcaaataagtgtgattgattcagacttctggcattactgggccatgctgccgcaagaaacaggggcatgtggaatcaagcctgacggagttattggtgtgcagnnnnnnnnnnnggattactacttatccggtttttaaagatgagagtgttttatctgatgccctgaccaaatgaaacaacaacctagactgaagcagggaacattcgctggacatttcaggcactgtgctaggctctacagtgaagcaatcacagcccactggtgtctataaataaaaccaaaatgctaacttttaaattcctatgaggaatataattgtaatgccactatagctgcatcactaccatggggtcattctctccctacagacagatcaataaacaaaatcaaattacaatccaaaggaagcaaggtgggcagaaataacgtagggattcatgatgaataaagtcattaatccttccaaaa

SEQ ID NO: 88591 - DNA, 511 bp, Homo Sapiens
  misc_feature (466)..(466): n is a, c, g, or t
tcagggcaagaggattgaaaagaagttcacaacaaaaaagtttgaacacaagcaaacctgaaacagatgcagggtagtagatcttaagggtgcgttgctcactccagggcctgctgccacccagatggctggcaaacaccaggactccgaacacaacaggattcagggattcagacaggagtcttgctctaccaattattataggatcttagatgcctttcccaggtaaagcttaacaaaaaaacaaaacagaaattaaaagccatatccagaaatactaaacaggctgtctccaaggatcagaagggcgatcagaaaagagccctcagagaggttgtctatatcccagaaggaaggatcttaagtgggggatggtgctccacagcaggaagaccttggaagatttcaggggaagtgaaattgttattgtcagagactttcagataaatatgtaagccaccgactnctgggagcgattaatataaagaattaccaacaaagcagaaaaaag

SEQ ID NO: 88592 - DNA, 478 bp, Homo Sapiens
  misc_feature (63)..(107): n is a, c, g, or t
ttcagacaggagtcttgctctaccaattattataggatcttagatgcctttccagtaaagctnnnnnnnnnnnnnnnnnnnnnnnnnnnnnnnnnnnnnnnnnnnnngctgtctccaagatcagaaggcatcagaaaagaccctcaagagttgtctaatcccagaggaagatcttaagtggggatgtgctcacagcagaaaccttggaaatttcagggagtgaaattttattgtcagaactttcaataaaagtgtagccacagatcctgggagcattaaataaaaattaccaacaagctgtcttacctgtgtgcactccactgaaaggaagggcaaacatgagcaaggagctcttgtacatcagtcaaaattctgacagctaccctgtgaagtttgacgggctgccatgtgctagactacctaagatactcttaactgaaccataaaaagacaaataaattagtaattgtaaaaaaaa

SEQ ID NO: 88593 - DNA, 608 bp, Homo Sapiens
agttgcttttgtgttttttttactttctatgatctaatttcaagattgttaaaatgggactcataatgccaggcaggcttcactgaatttttgtaggaatctcacgagacaagacataaagagcccttggagtttggatcatagtaagcactaaatgtatgcttcctgctcctgttaccattgtaaccaggcaacatttttgttttcttaactattgcaacagtatttgacttggaacaatagccatcgggaatagaaggttagatcctgaggacatggacggacgtacatccacaataatcttagcataaaagaaaagagagatagttaagcttctctgcacttgaaaacaagaggatgggagtattgggagaaacagaaagcagaagagaaaaaggggaaggagagaggcaccgaggagctgttgtgaagctggggattttataggatgagggaagggtatctattcgctaaggatgggatagtggagaaacattttacaaataaagatgagtcaagttaaatttgaaattatttttgtttcaacatgaactgcacttatgtctcctcatgccaccaaaagttttaataaatacattatactcaca

SEQ ID NO: 88594 - DNA, 1141 bp, Homo Sapiens
  misc_feature (646)..(655): n is a, c, g, or t
atcatccttaaaacaatgatgcaaaagggactccaccaaaaacgtagatgtggaataaaaaaaagatagtttaggaatgtcatgaagcagtcatatatcttttccatcaggtgcagtctccctggttgctgatggagaaaatgacaaaaaaaattactatactaaaaagcctatccaaggaacaggttagtaggaaatcacattctgaagcactcattctgcctttcttcagtgtaagaaagttgctcaaaagaagaagcgtgacaacacaagctgctacaatggctacattctctacattcaatgtaagagagaaggagctatggtcactccatgcaaaggccagatagagatgtggtgcgtatgtgcagagtacctcaagaaatgaaagtcagcatgtctcttggaagctatgaacactaatgtttaaaaaaggaaacagaaaacagaagaaatcacttaaggagagctgtcattttctattggtgaggattcctgatcttggggaggttctggaaagttcgtctctgtttcttcttcttcctcttcttggattggaataatttcaatgtcttcttcattctttggttgggaagatgtttcagttagcccaaccacttcttcttttatttcaatagtctgttcnnnnnnnnnnctgctgacaggagaactatgttagagttgggtctggagcacgttcttttccattcattctcaacgatgccagctattacaagttcctggaagaaggcaaagatcagcatcactgacaaaatgccctgaaaaacaagagaagaatgaaggtgaaaatgtaataatggcacaaagaacattgttggtgttcagtaagttattgttgactataattgaacgattaagagatcaattctttagacaagtaatgaatagctgtgagaactgctagtacaggagacagcatctttataaccctaactcttaacacaacttttggcacacaacagatggttaatgtgtattgctgatagaaagtaaggtatgaataatcagttgaagaatcaattctgtataggaaagaataagtaatgagtctcaaattaaattgtattcagccttagttggtgtggcatcatgcctaggagacctcttcatccttgggaga

SEQ ID NO: 88595 - DNA, 1611 bp, Homo Sapiens
gtggcttgcggtggaggagggccgaggccatctacggcaacatgaagcaagttcatccgttacctcatctcttccaatgttggcgaggtcgtcgtgcatcttcctcacggcaattctgggcctgcccgaagccctgaatccctgctgcagttgctctgggtgaacctggtggactgacgggcgtacctgccacggctctggagcttcatacccagtgcagacctggtacatcatggcagaagctgccccggagtcccccgatcaagccctcatcagtggtctggctcttcttccgatacctgtgctatcggagtgtacgtatgcctggccactgtggactgccgccagcctggtggtttgtgtatgactgccgagggacctcacgatcaacttctaccagctgaggaacttcctgaagtgctccgaagacaagcccgcatctttgccggcatcgactgtgaggtgttctgagtcacgcttccccaccacgcatggccttgtccgtgctcgtgacctattgagcaatgtgcaatgccctcaacagcgtctcggagaaccagtcgctgctgcggatgccgccctggtatgaacccctggtctgcgtggtggctgtggccatgtccatggccctgcacttcctcatcctgctcgtgccgcccctgcctctcattttccaggtgaccccactgagcgggcgccagtgggtggtggtgctccagatatctctgcctgtcatcctgctggatgaggccctcaagtacctgtcccggaaccacatgcacggtgagtgggaggccccgtcccgcctccagcctggctccccggccgcctctgctcctgggctgcagtggacgctgtgggtgtggagcgcagagcctctctgtctgcacatcggggaggcgtactcggatccaccaagtggagggtgtgaaggggctctggtggctgggtcccaaggtgtccgcagggtcttgcactgcaggggaacctgcgctcactggggccagcaacgggagcacctcttggggccacactgccatccactgtcttcaccttgcaaccccctaacatggccaagggccactgtgtgctctacatgggcctcagcctctgacccctctgaacccagcctgtctttatccaggccttctcaggacagtctcgcaggcctggagtaggcagccgctgaccacctcttggaccccagaccacaccggaagaaatgagccagaagtgagcgctgggaacagagtggagtctccggtgtgtacctcagactgatggtgcccatgtgttcgcctcctgcccccacccttgccagcacactcgcccacttgcccaccgggtcccgccggataaatgacaggcccgaggtcagaatggccatccccgggccccgtcctggggtctctgtccccacttccttctggcctgggaggtctgtaattcctgtctcctggactctcctgggaagttccctgctctgcagctctggcccaggagctgcaggctgcgagggggcagccaagaagccggagctggcagcatacccagagatccgggggccccccaccccaaatcacgagtgcagctggagcttgctcccccttg

SEQ ID NO: 88596 - DNA, 1759 bp, Homo Sapiens
  misc_feature (1170)..(1183): n is a, c, g, or t
ggaattcccgggatccagctgtaaatggaatcttaataacagtgaacagggcctgcgtagccttcatcttctataccgcaaaggtgaattccactcccgcatggttttgttggttgattttcacatgcatttccctattcagtgatctccaggctcccgctagcctccccaggctaatgccagctgttctccttctgagccgctgcactcctgctccagaacgtctgcctttcccacgctgtgcccttgcttctccctggcacggtgcagctctccccaccgccgccccgaccccgcacccctcccgggatccccagcccaccccacggcagtgttttgtgtgctggttgtgcccaggcgtgggccaagggcaggatgaggcttccctcctcccacccaccagcccctcgcctgacctgccgctctctctgacctgccacggtgcccccagaggaacttcctgaagtgctccgaagacaacccgctctttgccggcatcgactgtgaggtgttcgagtcacgcttccccaccaccatggccttgtccgtgctcgtgaccattgaaatgtgcaatgccctcaacagcgtctcggagaaccagtcgctgctgcggatgccgccctggatgaacccctggctgctggtggctgtggccatgtccatggccctgcacttcctcatcctgctcgtgccgcccctgcctctcattttccaggtgaccccactgagcgggcgccagtgggtggtggtgctccagatatctctgcctgtcatcctgctggatgaggccctcaagtacctgtcccggaaccacatgcacgaagaaatgagccagaagtgagcgctgggaacagagtggagtctccggtgtgtacctcagactgatggtgcccatgtgttcgcctccgccccccacccttgccaccacactcgcccacttgcccaccgggtcccgccggataaatgacaggcccgaggtcagaatggccatccccgggccccgtcctggggtctctgtccccacttccttctggcctgggaggtctgtaattcctgtctcctggactctcctgggaagttccctgctctgcagctctggcccaggagctgcaggctgggagggggcagccaagaagccggagctggcagcatacccagaagatccggggnnnnnnnnnnnnnnaaatcacgagtgcagctggagcttgctcccccttgttcggaagctggacgttcacttggtgactggtgcctctgcactgacggaggactctgggggtccttcttaccggctctgacctctctcttcgtgcctggtctgggactgggtcagccctgggggatcagaaggggccatctgggcccagctgtgtacagcgagggtgggcagccccctccactccactctgcttccacaaagtcggctcccgagagctcgaggctgcttctgtttatatgtgcagggcccgggcgggtgaagggtcagagagacggacacaaggagccggcaggagggcggagcgaggatgtcctttcccgggagacaagtcgggaaagcctggctggactgcctcagccccgcgcgcctcctggactcagggttccccgtcctgagctcgggagatgttcagagtcacactgccgcccggtctgccacgcagaggtccaacttgccacccgcgtccctggtacctgagaccaccgacatcctcaggttcctgaccgtggcgcccttctacccagcccagtgtgcggccgc

SEQ ID NO: 88597 - DNA, 638 bp, Homo Sapiens
cacctattaaaacctttactcacagtttgaaactgaagcagtaaacttgtttccagacatctttttcagattgtcttaagcccaaagttgcctcacttccactattctcagcagccaaccaggatttggcagctgctccactgttacggttgagggaacagggatcagtcctgttagaagtctgtgagcctcaaactctacctgttctctgcaatcatccaaaatttgaaaaagaagctatatccagtgtttcactgccaaacagattcactactcttactgattcttcactgagctttgctagtataagcagagttccaagtctcccctagggttgtctctacatttctttatcattccagtgggtagggtttaggtgggggaaggacatttcataagggttagttggactgagcagtatggacatttgcttttttcattacgtactgttgtttttctttttaggtgtgctttggtggttttaatattattgtgccagggatggggaaatggggggggttgtgtgggaagagtacttattattgtgttttcttcagtgtaattgttcttggtaattgatacctctctgttttatttctctcattctttcaaaataaaactttttgaaatatggaaaa

SEQ ID NO: 88598 - DNA, 802 bp, Homo Sapiens
cggctaaggtagcgaggcctgggttgcgaattcggcacgaggatgcagacacccccatgacccttccaaaagggtccacagaacaagatgctgcatcccctgagaaagagaagatgaacccgctggaacagtatgagcgaaaggtgaatgcgtctgttccaaggggtttccctttccactcatcggagattcagagggatgagctggcaccagctgggacaggggtgtcccgtgaggctgtgtcgggtctgctgatcatgggagcgggcggaggctccctcatcgtcctctccatgctgctcctgcgcaggaagaagccctacggggctatcagccatggcgtggtggaggtggaccccatgctgaccctggaggagcagcagctccgcgaactgcagcggcacggctatgagaaccccacttaccgcttcctggaggaacgaccctgacccggcccccttcaccccttcagccgagcccagacctcccctcttcctggagccccagaaccccaactcccagcctagggcagcagggagtcttgaagtgatcatttcacacccttttgtgagacggctggaaattcttatttcccctttccaattccaaaattccatccctaagaattcccagatagtcccagcagcctccccacgtggcacctcctcaccttaatttattttttaagtttatttatggctctttaaggtgaccgccaccttggtcctagtgtctattccctggaattcaccctctcatgtttccctactaacatcccaataaagtcctcttccctaccaaa

SEQ ID NO: 88599 - DNA, 444 bp, Homo Sapiens
gttactttcgagagagaagtttaaggttcaccaatgctgctcctgaccaatggaaatatgtacaacttcagcattttaagtaactggcttcaaggggtactgtggcaaccaaataaaataactccattttctaaaactttcatgtaacttttaaggctggactacaggtcaagtggacaaaaacatttccggaatttttttaagtaaataagagtagttgaactgagcaatacctcctcctgtgttgtattacacatattagccacgagtttttgcagtgaccagataaacttgaattgacacgtggtgtaataaaatggacaaattctgtagagtagacacagtgagtatgtggacctcttttataaggaaaaatacattttggattaaaatcaattgcttctgtcttgttttgtttctaaataaagaataatttctgggaaa

SEQ ID NO: 88600 - DNA, 517 bp, Homo Sapiens
  misc_feature (383)..(393): n is a, c, g, or t
actaagaaagaaacattacaacgagactcacattttaagattattctaacaaaaacagggtggtcagatggattggagagagctttaatagacaggtaatgaaatccagtttcgcaaactacagcaactaaggcacaggaattggaaatggaaatgagaaaagagatttcaaaaatccattaagacttttagtggcaggtgaccttaaaaacacagatgatgactctagctttttaaattgtgataaaagaaaggaaaatgaactataaaaggaagaacatgttttgaaaagttatatttagttttgggcacagggtaatcttttacttaatcacagaaaacatcaagtcaaagtagtatatctcaaactttagtactatttnnnnnnnnnnnttctcaggggtcacactgtaccaggttaagttacaacattttacatataatatgaacatacacacaaatgatactaaaccacactaggtataaatctctataggcttattgctcttacacaatt

SEQ ID NO: 88601 - DNA, 464 bp, Homo Sapiens
cagggggcgcacacgggggttggcgcggaagacaggaccctcagcctcgagggagcccctaggtgaccaggcaaaatggcagttccttccagctggtcctcagatgggcacatctattagcctctgctcttgtaagaagttagctgcagaacccacatgtgaatccttgtaggactctggagaagatcaaatgggagcttagatgtggaagctctttggaaaccaagaaacactctgaaaatgaaaagggaacagtttgtggacttgcgctggcccttggaccacacttcgagtgacattgttatagatgacacggtctcttataggaaaatgcacagtctttcttagattctctacctccctcttccatctcattcccaacatagatctgggtacatgagtggggtcttattataatcttgtgacacccttggatcatgcactaccctctaaataatcaatag

SEQ ID NO: 88602 - DNA, 675 bp, Homo Sapiens
  misc_feature (504)..(504): n is a, c, g, or t
  misc_feature (527)..(527): n is a, c, g, or t
  misc_feature (610)..(610): n is a, c, g, or t
cccaataatggccagaataaaagtttggcggcggcggcgcccaatggcaacagcagcagcaactcctgggaggaaggcagctcgggctcgtccagcgacgaggagcacggtggcggtggcatgagggtcggaccccagtaccaggcggtggtgcccgacttcgaccccgccaaactggcaagacgcagtcaagaacgggacaatcttggcatgttggtctggtcacccaatcaaaatctgtcagaagcaaagttggatgaatacattgccattgccaaagaaaagcatgggtacaacatggaacaggctcttgggatgctcttctggcataaacataatatcgaaaagtcattggctgatttgcccaactttacccctttcccagatgagtcgaccgtggaagataaagtcttatttgagcaagcctttagttttcatgggaaaacttttcatagaatccaacaaatgcttccagataaatctatagcaagtctggtgaaattntactattcttggaagaagacgangactaaaactagtgtgatggatcgccatgcccggaaacaaaaacgggagcgggaggagagcgaggatgaactggaagaggcanatgggaacaatcccattgacattgagggtgatcaaaacaaggaaagcaaaaaagaaggttccccc

SEQ ID NO: 88603 - DNA, 454 bp, Homo Sapiens
tttttatgtaatacttcatttatttgaagaaggtagggggcaaataaatacatcagatacacaaatgtcaatgtatctctaattcatttggtgtttactgagtacctgtttttgcctgtcactatgctaaattcaagaaatggaaaaaaagggtaccccatcattgatgttttggatgagtttatacggttatagaagaggtacatacataaagaaataataacacaaaaaatgtggtgcacactctggtggatgcaagtttggaaggacaccaacaacctagctgtgtgagcatgtatggtatgtgtgttgtgggtggaggtgggagagggggcaaatgattagctatagaagccttctggtaggtggtgatggctggggctcttacagtgtagacgttctcaaactgtagaatgcatcaaaatgtctggagtgcttgttaaaacacactgct

SEQ ID NO: 88604 - DNA, 666 bp, Homo Sapiens
  misc_feature (572)..(572): n is a, c, g, or t
  misc_feature (587)..(587): n is a, c, g, or t
cgctccgccctctcacccctcccttcccccaccccagccccgggcgcctggcgctcgctccgggccgcggggcctagtgctgcgccgcggggccggccccagcagccgccagtccccaccgccgccgccgcgatggcgccgctcctgggccgcaagcccttcccgctggtgaagccgttgcccggagaggagccgctcttcaccatcccgcacactcaggaggccttccgcacccgggaagagtatgaagcccgcttggaaaggtacagtgagcgcatttggacgtgcaagagtactggaagcagtcagctaacacacaaggaagcctgggaggaagaacaggaagttgctgagcttttgaaggaggagtttcctgcctggtatgagaagcttgttctggaaatggttcaccataacacagcctccttagagaagttagtagatactgcgtggatggagatcatgaccaaatatgctctgcgagaagagtgtgacatccatgcttggaacgagaaaatgctcaaggtgaatatcgcgaggactcatactgcggagatagtggattataaggncaatgaaatgtaagnacgataggcctgtcattcttcatcaaatgatataaataacttcagtctgattgctcaagaccatcagaagatggatgca

SEQ ID NO: 88605 - DNA, 873 bp, Homo Sapiens
  misc_feature (126)..(126): n is a, c, g, or t
cctggacagcatattccttaaacaagatccatgcatacaaccttgaaacgaatgcctgggaggaaattgcaacaaaaccccatgaaaaaataggctttcctgcagcccgaaggtgtcacagttgtnttcaaataaaaaatgatgtatttatttgtgggggctataatggagaggtgatcctgggagatatctggaagttgaatctgcagacttcccaatgggtgaagctcccagctaccatgccagagccagtttattttcactgtgcagctgttacaacagcttggttgcatgtcattcatggaggagtggtgaacatcaatgaaaacaaacggactgggtcattgtttaagatctggctggtggtacctagcctgctggaactggcatgggagaagctgcttgcggccttccctaaccttgcaaacctctcccgaacacaacttctgcaccttggactcacacagggactcatcgaacgcttgaaatgaggatttctggactgttcattgatactggaaatgttaatttaaagagactcctttatttatgggcagtgtagaatgtgctacaaagaggattggttaccctgatcaaggccttatttagaaaatacatcagatgcctttctgtaaattggttttttcagtttatggacatctcactttcccacgtgcttccttctttgcttctgttcctcctgacccattacatgcacatgtactcacatactccctcttccttctcgatggagttaagggaaagcctgaaagtaccttaataatgttattaatcaagacagattcctttttaaaggaattctgaatagttccatgtcatacaatattctagaaattaaaacatcatcaacat

SEQ ID NO: 88606 - DNA, 582 bp, Homo Sapiens
ggggggcctgccgactcagcccgccctccatccttgaacgcagattatattcaacgtcaatattgtatgagaaggtttaatgaaagcgcagctgagcgacatactaatttctgcaaggatcagtcttctcgccgagtctttaatccagctcagacagcagccaaattggcatccagagctcagggtagggctcagatgggtccaaaaaaagaaccaactgttaccagtgctgtgggagctttgctgcagaacagggtcctggtggccacgaatgaagtcccaaccaagtcaggattagctatggaccctgcttctggagcaaaactcagacaaggatttagtaaatcttctaaaaaagattaactcctagaagccagactgcctccctgaaacccatcagcctggatggttgcgtacccgagaatgccacctaaggggaaggaacggtagatgtgatgtctgtttttacacccttgattcttcttgaagcatcacttagaacaagtaaaacttgcttcagatttttatttactccctttgaagttttcaaaccaaaagcattaaacacatcaacctgtaaaa

SEQ ID NO: 88607 - DNA, 471 bp, Homo Sapiens
ggagcaggagggcagcatgttaataaaactgatagtgccgtcagacttgtccacatccccacagggctagtagtagaatgccaacaagaaagatcacagataaaaaataaagaaatagcctttcgtgtgttgagagctagactctaccagcagattattgagaaagacaagcgtcagcaacaaagtgctagaaaactgcaggtgggaacaagagcccagtcagagcgaattcggacatataatttcacccaggatagagtcagtgaccacaggatagcatatgaagttcgtgatattaaggaatttttatgtggtgggaagggcctggatcagctaattcagagactgcttcaatcagcagatgaagaagccattgctgaacttttggatgaacaccttaaatcagcaaaataaatactaacttattattatttatgattatataaatgaaatggacctatatcaagaaaa

SEQ ID NO: 88608 - DNA, 492 bp, Homo Sapiens
gtagaacatctcctatataatacatgaggaggccaaaagactgtatctgctttaggagctgaatagtttttaatgttgagcatacacacaaacacgagaacattgcttcccttcaggtagaaagaaagtccttcaccaggtaactttgggtgtttcatgaatatccatagtgactgctaccccaagtgagccctgcccaaagagaataaaatgagagccatctggaacccggcagagccaggaagtgtggccacaggactacattctggccaacacatatgaggagaaatgatttgagcaacccctggatacatccttaaaaagcagggcgcttgccctccatttcctctttctctacctggtgactggaaacatggtgacaactggagcagtcgcttggacacaggagatggataacagagccacccaccagccttgccttgctcacctcctggactgtgacagaagagaataaacacctgtctcattaaa

SEQ ID NO: 88609 - DNA, 322 bp, Homo Sapiens
tgggacaaaagagtctgaacaacagtcttcagccctagacctttcctctgacagagtctaccaaaatgagaaggaaccagaaaaccagccctggtaatctgacaaaacaagacttttcaacaccccccccaaaaatcacaccagttcatcaccaatggatccaaacaaagaagaaatcactgatttatctgaaaaagaattcaggttagttattaagctaatcagggaggggccagagaaaggtgaagtccaatgcaagaaaatccaaaaaatgatacagccaatgaagggagaaacattcaaggaaatagcttaaattaaa

SEQ ID NO: 88610 - DNA, 509 bp, Homo Sapiens
ccatgggcacaaggctcctctgctgggcagccatatgtctcctgggggcagatcacacaggtgctggagtctcccagtccctgagacacaaggtagcaaagaagggaaaggatgtagctctcagatatgatccaatttcaggtcataatgccctttattggtaccgacagagcctggggcagggcctggagtttccaatttacttccaaggcaaggatgcagcagacaaatcggggcttccccgtgatcggttctctgcacagaggtctgagggatccatctccactctgaagttccagcgcacacagcagggggacttggctgtgtatctctgtgccagcagctcagccacagcactactgctccagtgtcagcttggttccctaggaaatggggtttctagaacctgaatgctgacaaataagagttgtatatgtgtataccatgcaacctgcgtttaaaaatgtatgtacatagtgcaatgactaaatctagcaagttaacataaa

SEQ ID NO: 88611 - DNA, 524 bp, Homo Sapiens
tcaccatcccatctcctcaaatatgaagaaccaagagtgtgactgccaaaacttagtgtggcatcagcaccaacagcacagttcttcatatccacgccactctcagacaaaactagatgtccagattgttgcatttccgtaaagtttgtcacgagacattttttaaaatctcataacccacatgttcagttatccatgcaagaaacttgactctacatgtattgctgaaagaattttcttaacagtgaaatctgatcatatatttttaccacactgccacataaagcccaagaaattcagctgacaagacagatttagcattatcaagaaatcccatttgccctgaaaaagctgtcctccattgtactgaacagacagtcctgtcgattgtgttatttagaaacatacactgaatgtgggctgaaatcatcatctttccataatgaaaactgagaaactattcacaatgcattccttataaataaatgctacatttagtaactcatttcacccaaacaagaaaa

SEQ ID NO: 88612 - DNA, 481 bp, Homo Sapiens
ggcagttggttgaagtagcaagatgttggcctttctgggtttctcttttgctgtggcttcctcactgaccttggacttttataagtatgatacaaatctacacttgaataagtatgactgttactcatacttgaacttatctcattgcacctcttctcagcagctcttcatttgagaaaatattttttcagatcatagactaaaaaatcataccatcaaggtggcggcaccaggtgccaggaggaaaagggtacttgctgtgtatcctgggtcagtaatattgaaaactgtcttcttcagcttcctgtccttctatgtgttgtgtctcttgtgacagttgttttgtcttcaagccactgacttctggaatttgcagattttgcaatccatgcaaatgtgaagaaaagctctatgttactgaccattgttgttgttgtttatagtgcaaaataaaaatagcaaaaaggaaaaaagatcaaaa

SEQ ID NO: 88613 - DNA, 879 bp, Homo Sapiens
gcaattccacaaataatattttcattcagaaagacaacggcccagattttctaaaatttgctaatttatctagtagaatacatgattcaaaatgagatttcaagggctaccactattcattcaacatgctaatttcctaaactacacatttattagttgaggtttaagtcaaaacagatagcaaccaccttacttagaagtctttttttaaagtgaaaaaatcagattcatatttataattatctataaaaaatatacttctatattaataatatgataaaacagtgaaagtggtttcaactttttatatcatatatatttttagaattagaaaaaagggggagagataactaagatgaaagatagaaagccatcccagggtttcgctaactctttggaattaagattatgaatagacatatctacatggtcagatggtctcccataaaacagctcccgtaaagaaatgaactactgatacatgcaacaatatggctgaatctcagaaacagtataaagaccaaaatgagacaaacagcaaagggcaaggactatatgtattccactcctatgaaaccccagaataggaaaaaccaatgtgtaggaacagaaagccgatcagtagtgaccttgggcagggaaagactaacttcagagcagtagaaaagaactttttggggtgacagacatgtcctatgactcgacagcagtgatagttacacgggtgtgaaacttgtactatacagttaaaacagttaccttttactgtatgcagcttatacctcaaagttgatttttaaagtcaaataactaaacaggtcaataaatcctaaattctcatctttaaatcatgttaaaatgaaactttaatgcaccaag

SEQ ID NO: 88614 - DNA, 409 bp, Homo Sapiens
tcacgctgcgcgcagcgggtggggcctggggttcctggacagagaaggactacgcgtgtccttgggcggagaagggaggtgactccggcggaagaggacaaggcagaatgcaggcccttcgggtgtcccaggcgctgatccgctccttcagctccaccgcccggaaccgctttcagaaccgagtgcgcgagaaacagaagctcttccaggaggacaatgacatcccgttgtacctgaagggcggcatcgttgacaacatcctgtaccgagtgacaatgacgctgtgtctgggcggcactgtctacagcttgtactcccttggctgggcctccttccccaggaattaagaccaagaagcctggggggcctgagagacttgaacaagtgtcaataaacgctggcctctgtg

SEQ ID NO: 88615 - DNA, 396 bp, Homo Sapiens
gtgggaggaaatgctaggtttttgtgtgtggactgcccagacctcagccaggtcttctggagatgacatttgaggactgatggccaaagagcatgggggactgaagccctggctgcctcagcgctctgtctcccaacaccagctggtgttgcagagggaggtcaacgtgagttgggatcttcttgtacgcagatgtaatcattcacatgtaaaaataaccccacctccccaccccaaaaagggcaagagctgtggaaaatgattgccaaatgagatggctggttagagcatgattttttctaaagcatacttcatatattttcttaagattacatcaagctaattgtgcgagctcaattcactttgtaagaaaactctcggagaaataaaatcaat

SEQ ID NO: 88616 - DNA, 443 bp, Homo Sapiens
ctcgcctttctctcctgcttgcgttcaccgctcccccctgtcttttcacggttgctggttttattttgttgttgtatttatgcctttaggggttttgttccatcggcgtcgagctcatgggtgtacattatcatgctcttcttttgtagagcagcccgacggccatggaggctgaagagacgatggaatgccttcaggagttccctgaacatcataaaatgatcctcgaccgattgaatgaacagcgagagcaggaccggtttactgacatcaccctaatggtcgacggacaccattttaaggctcacaaggctgttttggctgcttgtagtaagttcttctacaaattctttcaggagtttacccaagaaccattggtggagatagaaggtgttagtaaaatggcctttcgccatttaattgagttcacatatacagcaaaa

SEQ ID NO: 88617 - DNA, 614 bp, Homo Sapiens
tcagcatgtgcatctgccctgacccccaccagagacctgacatcggatacgtgcaccaggtggccaagcagatgcacatctggatgtccagcacctgagcgtggatgcaccgtgccttatcaaagccagcaccactttgccttacttgagtcgtcttctcttcgagtggccacctggtagcctagaacagctaagaccacagggttcagcaggttccccaaaaggctgcccagccttacagcagatgctgaaggcagagcagctgagggaggggcgctggccacatgtcactgatggtcagattccaaagtcctttctttatactgttgtggacaatctcagctgggtcaataagggcaggtggttcagcgagccacggcagccccctgtatctggattgtaatgtgaatctttagggtaattcctccagtgacctgtcaaggcttatgctaacaggagacttgcaggagaccgtgtgatttgtgtagtgagcctttgaaaatggttagtaccgggttcagtttagttcttagtatcttttcaatcaagctgtgtgcttaatttactctgttgtaaagggataaagtggaaatcatttttttccgtggaaaaaa

SEQ ID NO: 88618 - DNA, 601 bp, Homo Sapiens
  misc_feature (109)..(109): n is a, c, g, or t
ctgtctccatcctactttcttctcctgatcctggggtctggggactccccatggtttcttcttctgcagcccaaaagatggcccctcttaacccaaggcaggggatctntcctcccaactccctggaccaaggtggcatttcctgcacacccctccaggccaagatgatgctcgctctcaactctgtaggccaaggtggcgtctcctcttgactctccagacctaaagtgacacccttcaggcacttcgggccccaattcagcccagtcctggtgctttcagcgccagatgacagcactttgcagataagaacgatatgatgtgtggatttcactacatttggctcctggatgctataaaaggacttggatttctgacttggctcagggactggggttagcagtctctttctgctccttttcacctgtgttttcttccgatcccagctctggtccctcagccgcattcatatttactctcctctcccagcctgatatccctgtccctcatctcaacccgaagccaagatctgagcccccaagatggagaatggggaggagctttttatggcggactgattaaaactcttaagcatttaaaa

SEQ ID NO: 88619 - DNA, 379 bp, Homo Sapiens
  misc_feature (52)..(52): n is a, c, g, or t
caatcatttatgacctgagtggcagtgtacccactgtagaggtatagctggnttgtggcagtgtcgaaattcctcaaggagagggcagttctccgtggtattatttttggtctgtataccacttatgcaaaaggatatagatagttttccaactcaaattaccaaaaaacacagtaaagtggttaagaacactagctctagagttagatggatttaaatttgaatcctggaaggccgggcatggcggcttgcatctgtagacctagctacttgggaggctgaagcaggacaattgcttgagcccgagagtttgaggttatagtgagccatgcttgcaatccagcctgggcacagagtgagaacttgtcttaaaattaaa

SEQ ID NO: 88620 - DNA, 876 bp, Homo Sapiens
aattaggctagtacgaggctgggtgttgaatcggcacgaggtgagaaagtagctccagcagcacccgagagggtcaggagaaaagcggaggaagctgggtaggccctgaggggcctcggtaagccatcatgaccacccggcaagccacgaaggatcccctcctccggggtgtatctcctacccctagcaagattccggtacgctctcagaaacgcacgcctttccccactgttacatcgtgcgccgtggaccaggagaaccaagatccaaggagatgggtgcagaaaccaccgctcaatattcaacgccccctcgttgattcagcaggccccaggccgaaagccaggcaccaggcagagacatcacaaagattggtggggatcagtcagcctcggaaccccttggaagagctcaggcctagccctaggggtcaaaatgtggggcctgggccccctgcccagacagaggctccagggaccatagagttgtgtggctgaccctgcagccctggccaccatcctggcaggtgagggtgtgaagagctgtcacctggggcgccagcccaagtctggctaaaagagtactggttcgaggaagtcaaggaggcaccacccaaagggtccaggtgttcgggccatctgcatattgtggccccgccagaagccccaaccaacgactgaccctgccaggcgttcctgcgttctctaggctggagggacaggacctcgaggccggaacattgtgcccccagaggctacaggctctgatttcaccttcaggacttcctttcaccttcactcgccccagtttcaggagctaagaagggagacagtggcaagagacggacttcagtgagcaggctcaggattgctctga

SEQ ID NO: 88621 - DNA, 658 bp, Homo Sapiens
ataagtcggccagggagagaggaagtggaaaaggacgattatcaggacatacaggacaagggactgtgtgcagctgctctgctgacaaggaatagttggagctgtgtttccttgaaggaattgttttaaattgaaggttggcctggtgttcacagcactcccaccagcctttctgctcatttccccaccatgatctcagcctcctatctcctcggaaagttcctatgccagggcagtgtgttatgcccaggacacagactccagggccagatgacttgggtttgaatccagtttcatcacctgcaaaatggaaatgatagtagttccagcttgtaagagtgtgtgaggttgaactaagttatcacatccttagaagtgtgcctagcactgcataaagccttctagatacttccttccatggttttgttcaggtttcctctctcagctggagggctgccagctttactcactcactgctgcttcaagctgctctgagcaaggatcaaaccttggcttctccaggaagaaaagatgtgttatcagatttgcctttgaaaagatctcatggggaatctaaggtgtagaagactcccaaacgatccttcctgggaaggaaaccacctcttgaacccaactcaataaatgccaaaatgtaaaa

SEQ ID NO: 88622 - DNA, 546 bp, Homo Sapiens
atgatcctgccgtgggagtgaacgtacgcgggccggaagcggagtaggcccctgcagaaacagaggcccgccgtgggggcagagaagtccaacccctccaagcgacaccgggaccgcctcaacgccgagttggaccacctggccagcctgctgccgttcccgcctgacatcatctccaagctggacaagctttctgtcctgcgcctcagtgtcagttacctccgggtgaagagcttcttccaaggacaggggttggcagtggcagatgccgaagatgtggatgaccacacgggcgaacgaaggcccatgtcgttcaggaggccccgagcattggacacccaggccctgagacgtactcagttcggtctgcatctgttgatggtgaatattgcaggactgatagccactgaccgcctgtagtgatgtgtgaggacaatgaaggcaatggtgattcacaggcaggccagccccatatgggtgttagttgtaaattcatggttacataacataataaatttacctacgaattcatattaaataaacaaa

SEQ ID NO: 88623 - DNA, 710 bp, Homo Sapiens
cctttttcttctttaagagacacaaattattgtaacactattttggagttgacaacacagataaatggaatataacaatgacagcaccaagcaggagaggaaatggaggtacgctggagtgacatttctgtgtttgactagaattgttagtattaatcaaaagtagatttggataaattgggaaatacattgtaattcctagggcaaccactaagaaaatactttaacacagagtttaaaaataaccatttgagtataagacaagtcccaaatgtgcccatcttcatttcatcacatgatcctaatctcaattctccttgaaaggctggcattatgtacagtaaccaaagggaacagaaggacagcagggacaccacacttcaaccatggctgcaagaacatctcaaaaatggttttcttccactggaacaagcaacccaccccgacacttacccatcttcttgatgtaccagttcttttcaccatgagacctgttccagtacagggcccccgccgagctcaccaaggccatgaccaagaggatgccaaacaacaccaggatctgcacgttagtcaccttctcaacatttgatctcttgagaggcgctttggttgaattctgcatgagtttggtgtcgtgtccagtataaacaactatgccaaagacccactgagtatttctaagctgtgtacctcttaataagatctgg

SEQ ID NO: 88624 - DNA, 406 bp, Homo Sapiens
tgctcccttagtcctctatcacgtgtggcctgctctcatggagaatgactgtgtcattatgaagggagaagctgtcaccaggagaggggctttttggaattcggtgcgatctgtaagtcgttgtcgaagcaggagtttaagtcccatttgcccccgtagccaaattggtttaaacacgatgtctcgaagtcggagtccttctccaataagatgtggattgccaagattttaaaagcaccagacctgctcctttgacccagtgcgtggaaacagctgctttctccagtgccgccatctgtcttctgtgtctgcctcagacctcacttaagataatgtcaaaaggcaattctgtgtatcaccccacacagagagttaaatgttttggttggcgcatttgtaactttaa

SEQ ID NO: 88625 - DNA, 690 bp, Homo Sapiens
  misc_feature (390)..(402): n is a, c, g, or t
ttaaccaactcaatatgtgtttgatgatagtgaattgataaaacccgaagcttttccctgtaaatcttacatctttgcctttaaagaatgggttacaaccatcactagatcacagtagtgcctaatgaaggttgagaaccgtaggagaggctctcatgctgtaaataatgttgcaggctaataacctttcatcacttcctttgtgcgcttcctgccttaagtgacaagtagcaacatggcttgggtcccctgtgcagcatcagcttatgctgccacaagtcagtttgcaccctaggtgcccaggagctagtatccttagatctttctatcgctaacttaattctcttcgttatttatctgaccctctaactccatgtctaacttgcattnnnnnnnnnnnnnttctttacagtcaacccaagcttaacatggactcaggttccccagcagccttaatttgttttgttaacatctgttccttctttttcagctctcctagagtatttctgagtgttgtgttcatctaatcttagtattcttttaattacaaattgacctcacagcttgaggtttcttgtgtcttattctgtggactacctgtgctcctttgcttcccctcccctcgcataataactatattaagaaattttttttggccttgagttggctggaaaaaaaatataaaattta

SEQ ID NO: 88626 - DNA, 559 bp, Homo Sapiens
tttcagacaaaatctcatggagcagcccaacaaataaatcagaaaaaaggcagagctgctttgatacaatctagaagcaagcagccagaaccccagccccatgaaaactctaagaaatctttcagctctgcaagcaaagttttaaaataaaattaaatgggaagaggaacacagtatattgctttggtccagtggaataaaatctgcataactaatgctggaattaaattagctatctgattgagggatcaaaatatagaagtggaatgggcagtacttaaaagctgaaaagaataaaaaggttaatatttggttagagtaaataggtacccaacaattatttacttcaacagtttgagaaagtgaaaattatcatgaaagactgtaatagattaattactttcccatgttcatatctctgcttggcttctaagcctaggtttcagaaagagtttgatcaactgctgagttttaacgatctcctactgcttttatcttttagtaaagcttctgtctacaaagacctcccgcaagaatcatggagtatgaactataggat

SEQ ID NO: 88627 - DNA, 387 bp, Homo Sapiens
taactgcacttcttatgtgaccccaaactcagcttaagcatccttttcattgatcaaacttggatcctaaggactatttccaaatatttaaatttattcttaaaggccaagattgactgccattgggaatattcaaaagaatgggggtactggccattcaagcagctcacacaaggagggccccacatgtttatagcacaggctgtatcaacggaataagtacatgggctcacaaggtgactgaaggacccatcatccaagaggatgtgtcagttctgatgtgttttttttaaatcatcatttcaccattatagtaatattacacaaaggcatgaagatgaaacttcaggtgtaacttttttgggggtattactttttaaagtaatg

SEQ ID NO: 88628 - DNA, 425 bp, Homo Sapiens
ccaaaaccattcccgcggagaatcaactctgaacggaaagctggcagctgtcagcaaggtagtggtcctgccgcctctgctgccaccgcctcacctcagctctccagtgagatcgagaacctcatgagtcaggggtactcctaccaggacatccagaaagctttggtcattgcccagaacaacatcgagatggccaaaaacatcctccgggaatttgtttccatttcttctcctgcccatgtagctacctagcacaccatctccctgctgcaggtttagaggaccagtgagttgggagttattactcaagtggcacctagaagggcaggagttcctttggtgacttcacagtgaagtcttgccctctctgtgggatatcacatcagtggttccaagatttcaaagtggtgaaatgaaaatggaaa

SEQ ID NO: 88629 - DNA, 424 bp, Homo Sapiens
  misc_feature (14)..(14): n is a, c, g, or t
ccctcacccacagnaagctatgcctggttcagtaagagcagtgcctcggcttctgcacctgaaaccgcactaggcatataggacttaccagtgccccaggcttactcggccgacagcaactctctgcttccctcaatgcgttgtgcagaatgaggaggaatgtagagaatcagactttccaaacctcagcctgggtactgactttcagcctcgagattaagagcttgagtccaggagccaggctgctcaggttacacttcccctcagtgttaacctactcctgcgtttaacttgggggtaagttaccagacttttcggtgcctcagtttcttcgtctgtaaagcagggtgaataataatgcaccttcctcagaaagctatcgtgcagattgagttaataaacatgaagtgttaggaactacaaa

SEQ ID NO: 88630 - DNA, 1945 bp, Homo Sapiens
  misc_feature (950)..(950): n is a, c, g, or t
ggaagagtggtatcaacgcagagtgcattacggccggggattctggggttcgtttagaggtttgaattttctcggagaaagacaggccggccacgaggaaaacagaaacaagccgcagcaacatctaagcccttgaaaggatcctgagagaggggggaaagggaaaacagcagccaccagcccaaccacttgtgtcttctgccccttcccacctatcttgcccaccccaccagcccacgctgcttgggacttgaaatctgtggccgaaggaccgtcactacataacttcaaaaataatcaaccaccctcccttcccaaaccacccaaattcactcatccagcgtttacttttttgaatccactcagaacttttttctgcgacccccctccctaaatggagttgggtgggggggaaatgaatactgagttggcctttattttttaaaagactttttgatccaatgaggccccctaaataattgagttttgggtcctggttggttgtactactcactattcctccaaaattttaccccctcccccctgagcccgaggtgctgacgtcgcaaaaaaattggataaaaccaccatcatgggttcgggtcccatagaccccaaagaacttctcaagggcctggacagcttccttaaccgagatggggaagtcaaaagtgtggatgggatttccaagatcttcagtttgatgaaggaagcacgaaagatggtgagtcgatgcacttacttgaacattctcctgcagacccgttcaccagaaatattggtcaaatttattgacgttggcggctacaaacttcttaacaattgggctgacgtattcaaagacaaccaacaacattccccctcctccagcaaattctactgaccctgcagcatctaccgctcactgtagaccatctcaagcagaacaacacagctaaactggtgaagcnagctgagcaagtcaagtgaggatgaagagctccggaaattggcctcagtccttgtcagcgactggatggctgtcatccgctctcagagcagtacccagcctgctgagaaagataagaagaaacgtaaagatgaaggaaaaagtcgaactacccttcctgagcgacctttgacagaggtgaaggctgagacccgggctgaggaggccccagagaagaagagggagaagcccaagtctcttcgcaccacagcacccagtcatgccaagttccgttccactggactagagctggagacaccatccttggtgcctgtgaagaagaatgccagcacagtggtggtttctgacaagtacaaccttaaacccatccccctcaaacgtcagagcaacgtagctgctccaggagatgccactccccctgcagagaagaaatacaagccactcaacacaacacctaatgccaccaaagagatcaaagtgaagatcatcccgccacagcctatggagggcctgggctttctggatgctcttaattcagcccctgttccaggcatcaaaattaagaagaaaacaaaaagtactgtcacctacggctgccaagccaagcccctttgaagggaaaacgagcacagaaccaagcacagccaaaccttcttccccagaaccagcaccaccttctgaggcaatggacgcagaccgtccaggcaccccggttccccctgttgaagtcccggagctcatggatacagcctctttggagccaggagctctggatgccaagccagtggagagtcctggagatcctaaccaactgacccggaaaggcaggaacgaggaaaagtgtgacatggcctgcaggaagagcacactggagagaactattcctatctggaattggatgaaacctgaacgagtaacctgtgaatacgagtcacggaccttgggctgaggcggctaagcgagagaatactgtcaaaaccgcctgcattcgagaca

SEQ ID NO: 88631 - DNA, 742 bp, Homo Sapiens
tggtgtttacaggtcagccatcaacgggcaaggcctgttctgtaagcgcaacacgacaggggggagatggtcatcgagtactatggcattgtcatccgctcggtgttgaatgcaagcgggagaagttctacgatggaaagggcatcaggtgctatatgttccgcatggatgactgtgatgtagtgaacgccacgatgcatggcaatgccgcccgcttcatcacccactcctgtgagcccatctgcttctctcgggtcatccacgtggagggccagaaacacattgttatcttcgccctgcgccgcatcctgcgtggtgaggagctcacctacgactacaagttccccatcgaggatgccagcaacaagctgccctgcaactgtggcgccaagcgctgccgtcggttccttaactgaggccgtggctgcccaccacgacccctcacacctcctgctgccgtcgctgccatcttgcccctagcctgggggctccctagcccctcccagagcatctcacccccaccctcatgttcagggtggatgtgggcatgcaggtgacaagggccctgcctccacccctccagcccatccagcaatcgccccctttctgccctgggggcccaggatgtagatattgtacaaaggtttctaaatcccttcttttctatgcacttttttatttaagaggtggggtcccaggtgggaacccccccacaataaagtctgtcaatgtttggaaaaaa

SEQ ID NO: 88632 - DNA, 826 bp, Homo Sapiens
  misc_feature (106)..(106): n is a, c, g, or t
cagttcttggccgggcacaaggggccaggcttgcagcacgtggggctgtatacgcctaacattgtgaaggccactgagggggtggcaactgctgaaggccagttcntggctccccttggggcatactaccagcagccaggaaaggagaggcagatccgagctgcagggcacgagcctcatctgcttgctcgacaggggatcctgctagatggtgataaaggcaagtttctgcttcaggtcttcaccaagtccctttttactgaggacactttcttcctggagctgattcagaggcagggggccactggctttggtcagggcaacatcagagctctgtggcagtccgtacaggagcaatctgccaggagccaggaagcctaaggatgcccagggctgggtgcagccagctgtcctgcagctctggggagaccagcacagaactgaggaacatctgcaggaggcccaactagtgaaaggctttgcctccggggggcaggtgtgacttccatttcatcagtgcctgccagaagctgtgtctctcattgggctccaaagaggtgggattttttaaaactaaaacatttcttatatacagtctataataaatatgtaagatacaaagaacaataaaagaattacacactaggaaatagaacataaccaatactttcgagtcctccctgtgtcccgctgtgattctatttcctcccacccactcctcaaatcctgtcattattagccctttgcttttctgtattgtttcactccgtatgtaacataaccctaaataaattatttcgtatttgaggtaggaatttaaaacaga

SEQ ID NO: 88633 - DNA, 226 bp, Homo Sapiens
tttagctgttgatctagggataataatacacatacctaagggtaacagtcaacttaaaatcaatgttttaacacttcaagtaaaacactgacatctcacaactacaggcataccttggaaatattgcaggttcagttctagaccacttcagtaaagtgaatattgcaacaaagtgaatcacacaaggtttttggtttcccagtgcatatataagttatgtttaagg

SEQ ID NO: 88634 - DNA, 529 bp, Homo Sapiens
  misc_feature (396)..(404): n is a, c, g, or t
cccttcattaagaatggagggaatgtttactatgggcaaggcactcacccatggcctgacagaccacattcaagtacaaagaatcattagagccattccaaatctaagtgtcagaacactttgaagcaggatgtagagtggtcagaatgacttgaggtaaagcagaaacactcaacaaccagtacattaaaaggggattttaatttttgacattccttgggatgatattcctttaggaagaagtagactgtgttaaattcgcatccatggcactgcttcctgaggcagtaattcttcaaagcctttccttccgtgtcaatactttccacatttgtgcgtttgaatggatccatgtgtttagccattattttactaaacacaaaatcatttgcaccnnnnnnnnntaaggaaaaacctattaccatacttgtctggtcatacagaattttagcaccacagaagaggaaagatgtttggcctgagagggcctacactccagtctgtgtaacctaaaagcaacttaagcctg

SEQ ID NO: 88635 - DNA, 542 bp, Homo Sapiens
gaaggactgaacgtttataccgccccctcacaaatccttatgttgaatctctaatcccaacatgatggtatttggaggtggagtctttgggaggtgattaagttatgagagtggatacttcctgaatgggattagtgtccttataagaagagctcagagatgtagttagttccctttccaccatgtgagaaaacagcaggaagacagccatctgtaaatcaggaactggatcctcaccaagaacctgaccctactagcaccctgatgttggacttccaacctccagagctgtgagaaataaatgtctattgtttaagctactcactttatggtattttgttctaacagcctaaaatgactaagacattccccttagtctgagagatattccttttggaacagaaaacaagagagacagtatagtgtggtggaaagagtgttgactttgcacaagagagacctgggttcgaatctcaacttttctatttaacttttagctacataggtgaatttaacctctttagcttttgtttctccatcag

SEQ ID NO: 88636 - DNA, 2554 bp, Homo Sapiens
  misc_feature (848)..(856): n is a, c, g, or t
  misc_feature (2226)..(2226): n is a, c, g, or t
aattgtattaatctgcatctagataatgactttgtgaagggtgtgtgttgtgtgcaaaacttaaggtattggttgagagttaaatacattatttttataatatgttgggtatagtctagttactaatgattttttttaagtacttttataaaaagttcatgtggttaaaattgtttgtttttaaaagccaatatacgttgcagaattaggaacagtatttatatttatttacacaagacattgtgccatagcatcctagtaaaacaccttcatgaatgagtaatgttatctcccagaattacattaaaattatttctaaaaagtagcaaagtcattaccttttgcttttaatgacccacacctcaccagctcctggtcttttcttcactgttgcccttattttgaggcaatttttcttaaaatatgacttttatgcaccacatttagtagaggcagtgacatcagtgatctcagtacccatcagctgtccccctcctctgcccttcttcatctcttctaccttgtgaccatttcccttaccggttcatgttctcctttatctctgcttttctttcttagccaggatacttccctcacaactctcactcccaaattcttttagatatacatttttctggataatggctgctgaaatctgaaactctggtaaagttcctagtataagagatcaatcctggaggaggcctagttcactattagattacaaagactcctcacaaagtaaaggaaaatcaccttcaaaaccacaaccctttatgttgtcaagtctaatatgagtgtttttacgaagtatttctttctacccattgttcaagaatgtaaatgtnnnnnnnnntacaagagagttgggtagatatgcatgcttgaggaaacttgcttttactgttttcctacttgtatccccagttcagttgaatttacaaggacctacaagatggtcatgtttgtcttggtatgtgctaccccaattttagtgtttctttctttattttaaatcagtaattattcagttgattgtttatactatataatgaagtaacaaaaacattttcggtttgtatgttttaagtaacagttgtgcaaattcctcctgtttggtaggtgctccctttgaatattttgtgaactgtgtcagagggagaggggtggtggctaggaagagggtcagaaagaagctagagggaggtcaggagaagggtaacagggaggatgcaaagcagacatctaccctggtcaccccaggatcaggatatctgtccttgtttcatgttgaattcaaaaattggatctcacttaggctttgaaggtgacagccatctctgatagctgagcataagtaaagaaaggtggagtgccgatgcagaaaggaaaatattcagctttcctctcttagatcgcactttgaagatggccttttggagacaatctgacaggttaaaacaggaactgttggaattattctagctgtaactacctattggctatgtgttgattgatcctagaaagaaaaaataatttttcattttagatcttgattgaatttaagatgtatttatatgcctacaaaaggtctgtcttgtaactgttgtataaaataaacctaatctatggtttcatttttaatctaaaaaaagttgtgccttaacaatagggcattgtatgttaataagggaaaacaacctttttagtagatgggggaaaataggaactttttgccattaaaacttaagttcttttgatgtttttaatattatagttgggggagattcattaaaattaaattgaaataaaattatttttgcataacgctaccatttacaactaaagtatggttttttataagaactgccatctctgatgtatatacggctcgacatagtatttcatccttttggatttttgaatttctgagtacaattagcacccgggaatagcattcgaccagatattcaccaacatcttccactttttgcaataaaaccttattttccagctggatagcctggtcaaatccccctccaagcaagcacaatcttacgcggttttcaaataaaagatgggacccacagcttctgacatttcgactgggcgcacacccaatttatttcacaattgtagcatgctcacattttccaagattgggtccgaaacacaaaaaatataactcttgggcgcgtcaattggaagtcactgtgtatccggacnagtcctcgattaacgccactgcgtctcctctccctggcacagcggaacaaacgcggcacctttctccaaacgctggcaactgtggcgccccaatctttctctcaagagacgggggctgcctgaaacgtcacttggccaccaatatctctcaatgctctttccacgatcatgagcagggcgttctccggggcgctcttaccacacggtgaccaccggggctattaatgggggacatatcggactgaacatccttgagaatatcagcgctacaccaccgcctcgtccctgacgtaagacctgccacttttccccacgtcgtaccccacag

SEQ ID NO: 88637 - DNA, 495 bp, Homo Sapiens
ctggaatcagtgctgtcgggctggggaccagtgtctctggcctgtaaactttctcccaaaccttctgggaggctttgagggtctcagaggaacctggcaggaaggattctctccttgccatggggatgaggacaaattctcccttcatccttgagattggactcccgccacacatcctggaggagcctacagagaagccggcaggtctccctcacctggatggtgccagcgggtggcctggaccacccagaggccctctcctgcacctgacaggaagcccctggggcatacctctcccctgccacttccactgtggccactggaagtgtggcagagaaaatagctaggacaaaaagaagtcaatgatttcaaccaacggaatttctttgtcctttgtaaaaatcaacacatgatctgttactgattgggatgtgaaataaaactaaaaataacagccccctgagcctggctcagggctcagctcacctttaaaaa

SEQ ID NO: 88638 - DNA, 481 bp, Homo Sapiens
agacaaatcatctgccaggtttccgcctcgggacaccaagctcagcacagacagcctagcagcctgggtgacaggatcccaggggacaggattctctccttgccatggggatgaggacaaattctcccttcatccttgagattggactcccgccacacatcctggaggagcctacagagaagccggcaggtctccctcacctggatggtgccagcgggtggcctggaccacccagaggccctctcctgcacctgacaggaagcccctggggcatacgtctcccctgccacttccactgtggccactggaagtgtggcagagaaaatagctaggacaaaaagaagtcaatgatttcaaccaacggaatttctttgtcctttgtaaaaatcaacacatgatctgttactgattgggatgtgaaataaaactaaaaataacagcacactgagcctggctcagggctcagctcacctttaaaaaa

SEQ ID NO: 88639 - DNA, 568 bp, Homo Sapiens
tttcagagtttgattgttttattttattgattgtgtagagggagaaactgatggagaagatattaataatgcagaataaacttaaaagtgtgtcatgtctctcagtaacacgcaaaaccgaaaaacgtattcttccagtattattctgttattcaattttctcacatcattgatgaatgagtaaatttcagatgtatatctttcttgttccactttcattctactcattatcataaatgaatataccaaacaactttcatatcttcactacactagtttatcaactgcagtgataggtttgataaggatccaagagtcagcaacaatcaacagcaggagtctgagcatcaatgggctttagtagttccatttctgaatttctagagaagccactgaatcttgtagtgaattcctgggatcattctccagcttcacacagtgactagtatgaatggggtctatggatgctcatccagtcactactggtcttactttgggatcccagggcatatgttccaggctctgcccttgtccttgttgcatccaggcatttctaaatcttttaaaa

SEQ ID NO: 88640 - DNA, 430 bp, Homo Sapiens
  misc_feature (156)..(156): n is a, c, g, or t
ccagaagaatcatagatatgtttgaatacttaattcattatttgccccagatagaaaatgtttgttaatcaaaaggcaaaagttataatgaggaagataatattgcctggggcaatgttgagacaaataaggtgaagatcaaccaaacgccctgangtcctttggcccaaatccctgctggggacccaaatacttttgatatagcatcttgctacctgaggaacgcaaggagaataatactcataagcagagcctctgttttcccataggactgactctaactatgtgaagaactgctacatattctacagtgcttaataggcggtgcctatctaacaggagctgtttggcttgtggatagcagttccaagatgaacaaatgacattgtgtttgaaagccactgctcttattaaagaagagtcaagcaaa

SEQ ID NO: 88641 - DNA, 486 bp, Homo Sapiens
ggggtcgcagcctgactgccaggagcggagtgcgactcggcccctccaatgcgcatgcgcaaggccctggcgcatgctccagtcacagtcattcccacggttgtcttagaaacccgtccctgaggcttggcaaagtaggagccctccgtggcagtgcttgggtgtcggggctccgaggctccggcctgacctctccacggggtccacaggaacatctccggctgccaggagtcgcaaagggccgaccaggatgacgaaaccacaggcgaagtccgggggaagcagcatggcatcccagcctcaggcctgccaggacggtgttcgggactgactctaactatgtgaagaactgctacatattctacagtgcttaataggcggtgcctatctaacaggagctgtttggcttgtggatagcagttccaagatgaacaaatgacattgtgtttgaaagccactgctcttattaaagaagagtcaagcaaa

SEQ ID NO: 88642 - DNA, 538 bp, Homo Sapiens
ctgaatcactccccaagccagagtagacctggttccagttgtcccccccttgtttccgggcagagtcaggcaggtgtcataccatccctccccgcccaaccagtgctggccagactcccattcaccgaccttgactagacagcgaacagccaccttttagtattcatcccaacaggtccaggcggtcagtgtgatagccacgcagttcctaagggactgtaggtctaggaatcattaggacactcactcagccaccctcgatgcccccatcttccccacactgcccttggcctccccgctctgcacgcctggagtatttgcactggtctagcctactccaggtcagactcattaggaactcaagattctcgtaaagaaagttgtttccaaagttgtcttgtcactctatttgggggttgggagagagcccgtgggggccagcgttggcgaatacaggaaaaagggagaatgctggagaaactggactcgtgagagcttaaagacatcccaacaatccaaagaaaaagtgagtggtgac

SEQ ID NO: 88643 - DNA, 650 bp, Homo Sapiens
ttttatgtgccaatattgtttttattttcaaatacttcttgtagtgctacaagtttattagatacatgtttaagcaagttatagcacataacagcttcataagtgttgctcatgtgtaacatggattgtcacctttctcaccactaggactctaatattaccccacatccaccacattagcattggctgataatcctgcagttacaaaaacacccaaactctcactgggttagtgaaaatatatttcatgctactgccacatgccaatgcaattaagcattgtgtcacagtcgttatagagacaagggatacaggcaatataagcttcatcacaactgagaagatctagaaacacttgttaaatagcattgctgactactatgtatgtgtaacacttggaaaactttcccaagtaacaggttacatgacatatcgtaagaaatattcaagaaactggatcacatagaattatatgcctggggtagttttgtttgggttgcatctgtttggtgatctctgacctgcctgtacctggatatgtatatcattctgtaggtttagaaagatttttgttactatttctttgaataagctttctactccttgttctttctcacctcactcttgaaagacaatgactcagatttgct

SEQ ID NO: 88644 - DNA, 728 bp, Homo Sapiens
gttggttgttttttactttattttttcaattccactggagaagagggagagctcttgatgtttcctgaactttttccatatctagcacaggatgttcaatgttttgtaataaaatataaaaccatattttatgtacatagtctacaataaaccatcctacagctgaatttgtaggccagctcatgatctgcagcctgtcataggtggcaaaggttaaccctaaaggttatctatttactcactggataactgaattttttatagaaattttttctagtctaaacctgaaggcctctataaccctagaggcaacctacctgatctttaggcagcgctaaccattaataagtcttccttgtactaattttaaatatgcttccctgaaccttccagccattgattctaaaggatatgaacaaatctcattccatttctatatttgagctcttcaaaataattgtagacaaccacttctccaattacttttcctatatgtggttcagaaatgagtaatatactaaaaatatataaaatatacagtaaaagtcaacatttaagagttaaataatataagaaagaataactttaaaaaatgaaatgttgatttctaggttcccatatgataatggcagctacttatagccatacttcaacatatcctccaaagaccttacggataaacaaagcaagcaaataaacccataaaacaaaactcatcaaactaaaaa

SEQ ID NO: 88645 - DNA, 473 bp, Homo Sapiens
  misc_feature (172)..(180): n is a, c, g, or t
cgcaagtctttctttcggggaaaatgaaaaggggtcaagatttggaccagatgacacccaatgtcccattcagcggtcgcattctgtcatccacaggaattagtcctgtatccgaaacattctctggtagtcaaaagcttataagcacaagatgtgaaggaggccacacttnnnnnnnnncttgaaatggagtttcatttggaaggacactgactaaggaaaaacagagaaaaggatgaaacccaagccaactctgcaactctattaaaaacaccaagacttcaatataatctccttaaagggaggcagtgcattcttcatggctagagcttcagcagctatctagaaccatatggtggaagccacttactgagaactgtgaaacaagagcctgggtccctgacatatgaagccaccatacctaccttaaactctctttcacttgagggaaaaatacatctttcttaggtaaa

SEQ ID NO: 88646 - DNA, 518 bp, Homo Sapiens
cctcagaatatctacctgcttggggtctggttgggatttcctgggatgtgtttgcatatacgcattttgcagctgagagctgtcttcttactcaggggattgctcaccatgaccccagagctccctgcagaacctcctcccaaagcagacagaatttttgccatctcggtattttcctcaagatgagggatggtgatccagggaacaggaaactgaccggaaccaaagcagtagctgctgagggagctgctactgccagccaagctctcaggggatacaagagaaagaagacatgttccaggcttccagggcttaaacaaacaagataagaagaaactgatgaaaacttaatttcctctgaaatcttgtgtataagttcaaaataataatagaacttgtctggaatgatcttagagaatcttacctgctctgatttccacgagaaggtcatttgagggggcaggggtaggccacatctcatctcattgagaataaactccagttacatctccagaaaa

SEQ ID NO: 88647 - DNA, 589 bp, Homo Sapiens
  misc_feature (26)..(26): n is a, c, g, or t
cccaccccgcccctttccttttcggnctggccccacccaaaaattttggcttccactaagatgaagaaggggggcggggcagcaagtggtgggggtgtagccagcagtggggcgggtggccagcagccaccacagcagcctcgcatggcccgctcacccaccaacagcctgctgaagcacaagagcctctctctgtctatgcattcactgaacttcatcacggccaacccggcccctcagtcccagctctcacccaatgccaaggagttcgtgtacaacggtggtggctcacccagcctcttctttgatgcggccgatggccagggcagcggcaccccaggcccgtttggaggcagtggggctggcacctgcaacagcagcagctttgacatggcccaggtatttggaggtggtgccaacagcctcttcctggagaagacaccctttgtggaaggcctcagctacaacctgaacaccatgcagtatcccagccagcagttccagcccgtggtgctggccaactgaccatctacctgcccgtggggccaggagcacccaagaccacagaaaagagaaaggaaaggccaaa

SEQ ID NO: 88648 - DNA, 757 bp, Homo Sapiens
ctcacctccatctaacaaagcattttcacaaattgacttaaactataagcctgttaggattgcctgaatccagtcattttgaatttttctgaaattcctgtagtttactctgtttgccagctttatatatgggttggtggcctaaaacttcagttctgggccccatatccatgcatgactttcttgaaagaaagagaatactctgctgcaatccaagctggagcccttcaattgagcttgatttgattgcttaggggagtggaccatgctggttagctcaaactaaccatagtccactcctggatgtgggggtagattcatcttcttccaaagtatatggactgtggggagttgggagggcaccagaacaaaaggctgccatcaggaaataggaggaggtaagttggagaggatgttaaggtaaatggttagtattcatacctcttaagcatttttactgtaactcttcatcagatctcaactacaaagaaaacacatgaatttcattaattaattcatgtatttaatattttttagagagagcctgccatgtgtcaggtactgttgaggatatagcagtaaataacagagaaataatctctgctctgtgggcagtggggagggaccatcccattttgccaagaggatgtgcgatagtattgttggatctcatatgatgtttatatgtgaacatttacttgatacagcttgtaaatgatgtgttgaaggcccttgtgtatacaaaggtgataagaag

SEQ ID NO: 88649 - DNA, 472 bp, Homo Sapiens
cagccagcctccagcgctgctaggctactccgagcaggggagaaaagacgccggtccgccggggaccaggagggagacgtgaaaccagaggcccgggggccccctctccgcctgtgcgacttgtagtctcgtaccagacgcgtccgcttcactgctgaatctgaaaacgtgggctcttgagagctgcccttggaaggagctgtgctttctgcctcatctttaacttttcgtttattcagcaaatatgtatcaagttccgacttcgtggaagagattgtgttagacactgggagtaatagaaacataattaagaagcaggggtcccggacctgaagggcctgagcgtcgggtaaggaggcaacgcttacaccgaacctgtgctgagataaataacgaacagttctggctcttagagttggcctgggggaacaaaaattcaaaaagaataaaaccccaaacaaacaggagaaaa

SEQ ID NO: 88650 - DNA, 500 bp, Homo Sapiens
aaggtcctatacaagttacactccgccattttgcctcttagtgctcatgcttgagcccacgggcacagtttgtgagatgtaatcgagaagatgctgatcaccagttttcagcagagtttgtgaaaggcagcagaatcccgctccccatgcttgccttcgggaccctcactggagcagaaccattgcttagagcgtgagaaggagaagcgagtgtccgtcaacatgctggctctgggtgagacctcgatgttcctggttcgccgggacagcagctcgaagcagctggtgctctgtgtccactttccttctctgaacgaaagctcggccgaggtgctcgaatacaccattaaggaagaaaagtcgacattccccttttcagcctccaacactggagttgggccaggaaaaaaatacatcatgagataatttaactccaagaactttattgtaaaaattcagtcgtgaatttcttttaaaaaaaatagatcttgaatcataaa

SEQ ID NO: 88651 - DNA, 708 bp, Homo Sapiens
  misc_feature (140)..(140): n is a, c, g, or t
tgccttgagactttctatcaatgtctttgcatctgtcgatgacatattttctgtcacagtaccatttatcttcaatacagcatcaccttcttgaatattgccatctcgtgctgccaaactatcttgtgaaatttccttancgaatatatggcttgccaatcgaagaccatattcttcatttttccgggatttcaccagtgtgactttagtaggtttagcaggctggctggaagccactgaccgcctgtctgaccgcgaggacaagctcctctctctacttgcacttctatccctcggccaaatcttctcactccttctgttaaccacaccactccggccacttcttggatcatgtatttcctcatcataactatcttcttcattatcagatactggttcaggatcaggacgacttactggtatttgaactttcttcttccttctaattgtaatttttgcatttttcccacttttccttagttgctgaacagcaaaagcatgttcaacattatccattgaaactccgttaaccattgcaactcggtcattttcctgtagctgtccttcagctggtcctcctttcagcacatctgaaatcactattgacgtttccccactctgaaaatgaggattatctcgtccaccagatattgcaattccaaatccaaatccaccagccctgtgaagcgtcactgtatgttgttccca

SEQ ID NO: 88652 - DNA, 576 bp, Homo Sapiens
acgccgccgcccccgccgggtgcctaagcaggcccggcgcggccccaggacttgggaccctggaggactgacgctgctggcctgggcgtccccttccgctgagccatggcgactcccgacgtgagtgtgcacatggaggaggtggtggttgtgacaactccggacactgcagtggacggcagtggtgtggagggggtgaagaccgtgttggtgacgaccaacttggcccctcacgggggcgacctgacggaagataacatggagacagaaaatgcagcggcagcagctgccgcggccttcacagcctcctcccagctcaaggaagccgtgttagtgaagatggctgaagagggggagaacctggaagctgagattgtgtaccccatcacctgtggagacagcagagccaacctcatctggaggaagtttgggtgtcccggcatcaatgtgaaatgtgttcagtacgacgagcatgtaatcagcctaaaggaatttgtgcacctggccgggaagtccaccctgaaggaactgaagagagccatccgcatgaacggcatcatgcttatgaagatcatg

SEQ ID NO: 88653 - DNA, 484 bp, Homo Sapiens
aaaaaaagttgaatggcgttttattttcatggcctataagcaggtaccttagtagggcagatataggaaaaacaaattagagcaaaacaaatcctctacaaatccaaggcaggaaaagtggtggcagagtgactcattctcctgtccctcccatcaggtcaaatcaggaggctgcagtgaatgcctgttctttgaatgtgtagcagttgttcctgtaactctttaaaacttggctataggctgtttagcacagtacagattaaagatacagttacgtaaacagcaaagtaattttatagtgcttcatccatttatcatgctttggtttgctaattttttcacatacctttttctatcacagtctgttgcttttgtacacatttctcatattggggttcgacaggtaaacacaaactgctatttcagtagaaaaagttattgttatgaatattaaacccaataaattgtataaaggtaaaaaaaa

SEQ ID NO: 88654 - DNA, 299 bp, Homo Sapiens
gtgccttttttgctgtgagaccagcgactgtatttttaaccctgattttatccctagatctacccaacacataagtgtccctggcctggactagaaattctccatccttcggccttctgcgagactgcaggaacattacttttgaaggatgctaaggaatccgagggatgaaaaaaatcaagagattgcaatgatgtcacaaaacaaggaaacaagtgcagcatcttcactccgaagcagaaatttgccaaaaaagcatcctctttttatcagaaaataaaatatcctggtttcttaaa

SEQ ID NO: 88655 - DNA, 445 bp, Homo Sapiens
gcggccgccgccctcaagcgcggagcagttccagcgctggtcgcgcagctggtgctgacactcgtggaccgcgatgtgcagaccctgaagcgcggacgccgtcacgtcggggttgcgcaggcacaggcctagctgccgcttgctcaggccggacagcgtcaagcacacggtgttggccgtcagcggcggctcgccaggcaacttcaggcccagaatctcattgcttagagcccgactgcacaacgccaggaacaggagacccgcgaggcccgagggcggaggccgcggccggggctcctccagcatgtcgaagcccggaggctccggtgggcagatcgatcaggacctccagtggtttgggtgcggggtccgagacaggcacggttgggttgcctgggcttcactagtgctgcttaaaccgtggggagactgcgctgggttctgt

SEQ ID NO: 88656 - DNA, 844 bp, Homo Sapiens
gggttccgaggaggcggtgctggggcgggcgcaggactgcaggctggggctccgctccccggcgggagcccgcgcgtggttcccagcgaagtccccgcgcggctgggcccagcgtgagtattctccgcccgctgtcctccccctggaggcggcagcgcccgtttatttgaggaggatgaggctgtcactactacagttgggactgtttcatactccgtgctcttgtgctatgccagggggtactgtctaacccacaagtctctgccaggaatgttgctgtccacactggagtgtaagacacctgcggagctcgtctatggggctcatgttggctgaggctctgaactacagaactgcaaacaaccaagggagcgccccaggccccaggcttctaatgtgaggaaaaacacggaatgacaagtgtgggaaagagcaagcactaaattactgtcagaaaaataaacggagtaacacagtgctgctcggtgatttacggggggcaattagtcaccaccccacggcgcctgctgaggacagcacggcagcagacaagtcaggcccatgaagaaaaagaggctttgcactgctcctccagaaaacttttcaaacaacaagagagggatatttgagcacattaggttttgggtcctccattctgggtacctactccttcttattaattctacccaatttattacttaaacattattttttacccattatggccgcccacctatactccgcgatattcttcctggctgggcccgcctcggcccttcaagaaactttcctaaaccattctttttggggggcgggccccagtgagggaagtggaaactgggcc

SEQ ID NO: 88657 - DNA, 503 bp, Homo Sapiens
aattcagcaaaacatacaaaaccatctatcctgtgtgggagaccagaatataccttctcaaatatgaaggattgctgccctgaagacaagaaccagcagatgcaggagagctgtccacctgccctctttttacccagaagcaagacatagattagaaagagaaaaggtatcctgccccactcctttaccagggagaacaaaggttaaccactgaagacagcgtcagaccctcattagccttgaaatgatatcagaggaattaatattagctttttttaaaccatcttttgtctgctatttgtttgcttagcccaagttactgcctgtagagactcagagtccttttcctttgtcacatctctaaaaatttcctagtctttgttgaagatgctatacaagctggaattcaaagacgcttctttgagaactactcattctctgggtgttcctcatatataaatgaaatacattaataaacatctgtttttctaaagttaaaaaaa

SEQ ID NO: 88658 - DNA, 529 bp, Homo Sapiens
  misc_feature (171)..(171): n is a, c, g, or t
gttgggagttaggaaggtgaacttttctatctgaattctccgggtccctgaagccctccttgccgctctccatctgtcttgcactgccagctgggtccctgctggggctctgggacttccccacttcttcagtccacatagggaacccaggcttccactgaggtcactgcncaaacctggccctcctagcaacagatgccacttatattttggcccctggcagcctcgcccagcccctgatcagcccaggcctagggcagttaggacctttctgtttattttctgaagcagagagaatgatctcagagtttgcaaatgaagccttttttgcactttcattcacatgcactttggtggggttacatttttgtacttgcctcttgtgtgtgcacatgtgtgtatgtgttctttaagagaatcttctggcttaagctaaggtgactcttgaaggagaaaaagttacaaacaaaatgtggtgtgatctgtcagtgtatcaaaacaacataaataaacttgaacaactgataaa

SEQ ID NO: 88659 - DNA, 564 bp, Homo Sapiens
  misc_feature (109)..(109): n is a, c, g, or t
  misc_feature (139)..(139): n is a, c, g, or t
gaagtgacctttccatccattgctgggccgcctgttccctccacgacaaaagcacttcttcaacatatccctaaactcccctcaaaaacttacaaaagggagcacacanccccccatcatgcacagagatggaccaccnactgttgagaatgcccattcttcctgagttcctctgtactgggatgtatattttcctagccccaaatccattgctggcaatggatgcactgaatgtgccagcactgaggagttaaaatgagaactccaaacactaacgactcttcttcaagatgcagtataagacaatgaattttaacctagatgtaattatacaatggaaatggtattccagtttagaatatggaaagaccgacctagaggaattggacaactgattgcacctgaaaatcataaagggactttttctggccaataggcaggagtcctctttttgtgaagtgatcttttgtgaagtgatcattaaagggatggagaacacagtctagtgtccagcaggcccacatgacagtttttgtaattcaaattatgcaaatttaaaaaaaa

SEQ ID NO: 88660 - DNA, 527 bp, Homo Sapiens
acacatttacctcgttttctttcaaggcaacaggcgctgtagatcttagtaccctgcccatagacccaagcacttttctcatttcttctgacagttcgagtcacttctcacagttgacttcctcaccaaataataagggggtgaagaagactcggcctacctactactcagtaatcctgctgtccagtcgactggagaagagagatttgttcacctctactagttttatttgttcttagtagttgtagaatttaaattggttttaatgaaatgttccttttatgaaattttaaataaaagccatttagtgtatatttagtatagcaagaagcatgtgaataagctccatataacctgacattgcgcatcttacagcatcctcttggtcagatgtctaataaaaagattgttattttcaaatttatcatagttcctgcaacttgcactttttaaagctgtgtttgtgagaatttatagactgcatatcgctatacctgatggaaattaaactatttttattttgaaag

SEQ ID NO: 88661 - DNA, 825 bp, Homo Sapiens
caaaaaatacaagttgtattttacttctggttcattaaaatattgtgtttagttggattttttcctcctttattttcagaaacataaaagaaattgttttatttcctaaaggataaaattggatatagcctctttagtagacactatcacagttctgttgtttgctgtgttcatttgcttaatgaattgcgtgagaacagtcactgtaatgaaatatgtgtgctgggggtggggggaagggcatgggaaatgttttatgaaaaaaagttataagcctaatactatgaagtaacatctaatgcagttctttttaagtgcaatatatttatttctgctagaaatatattatcaaccttatgtaatatttgaagcattacatattatttgtaaacagcttaaaattatatattaccccaattgtacataagtacaaatgtgtggatattagtttctttcattaaaagtggtgtttttttaaaaatacatttgcacccatttacacctttcattcactgacactgttttatgatgtttggtacctgtttcctcacctgacaaaaaggattagataagattgtgggtcccagctggccactcacaggctggacacagcccgggattactgcatagtattttgagtttgtctttagttgcatttgaaagccttggaaaagacattgctctcaagttcccactattttccattttctgcacccagtccccttcattcgtgtatgctacccaatgaaccctcagaatcacatgattttgcacctctctgtactgaattatactgaagactccatacaacttaaaaacgcctgt

SEQ ID NO: 88662 - DNA, 456 bp, Homo Sapiens
gagccttaaaaagaaggaaatgtgccatctgcaacaacacagataaacctgggggacattataacagtgaaataagccaggcacagaaagacaaatattgcccggtctaacttacatgtggaatctgaaaatgtccaagtcacagaaacagagagtaggatgcaggttaccagaggctgtgggtgggtaggaattggggagacattggtcaaagggcacaaagtttcagctatgcaggatgaattaagttcagaagatctattgtacagcatgatgactagtcaataataatgtacccttgaaaatctctaagagtagattttaaatgtactaatcacaaaaaatgggatgtgaatgatgggacacattaattagcttaatcactctgtagtgtaaacatatatcaaagcatcagattgtacaatttttcatttgttaattaaaaatatataaata

SEQ ID NO: 88663 - DNA, 971 bp, Homo Sapiens
agcgaggctgagtggcgattcacgacgaggccgcttctgaggcggcggcggtgtcttcgccgtctttgaaacagacacatcccctgtccttgaaactgcaggaacggtcgcagcaatggctgcgaccccgtcagcaagggctgcagccgcggtggttgcggccgcggccaggaccggatccaaagccagggtctccaaggccgctttggctaccaagctgctgtccttgagcggcgtgttcgccgtgcacaagcccaaagggcccacttcagccgagctgctgaatcggttgaaggagaagctgctggcagaagctggaatgccttctccagaatggaccaagaggaaaaagcagactttgaaaattgggcatggagggactctagacagcgcagcccgaggagttctggttgttggaattggaagcggaacaaaaatgttgaccagtatgttgtcagggtccaagagatatactgccattggagaactggggaaagctactgatacactagattctacggggaaggtaacagaagaaaaaccttacgataaaataacacaagaagatattgaaggcattctacagaaatttactggaaatataatgcaagggccccccctctattctgcatttaaagaaagatggacaaagacttttccacctttgatgaagaaaaggggaagcctaaaaagcaaaaccctggccaggccagtggattggtatacagtatctccccttcaaaaattccaggccacccattttttcacattaccatggctgaatgggggaaggaggttttttattatcacaaaccttgggtcacccgacccttgggaaaaagaaattttccttcccgtggccaatgtggctaggaggctgtacccccgaaccaaaaaaggcgacccttttttacgcctaagaaaaaaccaggcccccgttctttgaagaacgaatcggggccatatgtgag

SEQ ID NO: 88664 - DNA, 353 bp, Homo Sapiens
atgagccactgcacgtggctcatggttagtttcttaatcatgtcctataactgatcatttgtccacttttcatttgagaatatatcaccttttaatattgattccaaaaaaatatgaattgaaattattttcacagctaaaatgttttggccaccatgcccacgaagttattaaaataaattatttattgaaaagcaagataggtttcccatttaccattttaatttttattgtcttgtaaattaaagaacacagttataaagtagagacccagctaataaagcttaaacaagttgttaataaatgaactgggagcataaaatccttaaaccacatcttcattagcaatgagg

SEQ ID NO: 88665 - DNA, 593 bp, Homo Sapiens
gcggccgcggcggcggctggggcgttcgcgggccggcgcttgcggcgtgcggggccgtgctgctgacggagctgctggagcgcgccgctttctacggcatcacgtccaacctggtgctattcctgaacggggcgccgttctgctgggagggcgcgcaggccagcgaggcgctgctgctcttcatgggcctcacctacctgggctcgccgttcggaggctggctggccgacgcgcggctgggccgggcgcgcgccatcctgctgagcctggcgctctacctgctgggcatgctggccttcccgctgctggccgcgcccgccacgcgagccgcgctctgcggttccgcgcgcctgctcaactgcacggcgcctggtcccgacgccgccgcccgctgctgctcaccggccaccttcgcggggctggtgctggtgggcctgggcgtggccaccgtcaaggccaacatcacgcccttcggcgccgaccaggttaaagatcgaggtccggaagccactaggagattttttaattggttttattggagcattaacctgcgagcgatcctgtcgttaggtggcattgcctatattcagcag

SEQ ID NO: 88666 - DNA, 624 bp, Homo Sapiens
ggcccctgagcctgcttcttcacatgggagctagtattctcagcccatggggagaaacggaggcctgaatacaggcggtcacctaaggtggtgcgtacagtgttgggccacatgtctagtggtgccaggactgagagatcacttacctccaccggttacccaggaggtaacagagactgatccacaatgttcctgaggtgtcttgggcacccataggcaggtgacttctggcttagggcagggttcaggaggctgggcactcacagtttctctttggtccccacagaacatgtttgggttgtggaagcctatggtattcttggctattgcagctgtggctctgtatgtgttacccaacatgcgacagcaggagtcagagttctgcctcatggagtgatggcagaccttggccagcgcgagggcagatccccagtggccaccaccctcagctttgggcaggacacactgtgccagaaccctccccatatgttccatgtgtccccatctcctcagcctcagtcacccaggctgaaaaggcttgtggggagcggctgacttccatctcctgccttgtgtaagaacctgagttccttgtaattaaatatcaactgaattacatgaaaa

SEQ ID NO: 88667 - DNA, 481 bp, Homo Sapiens
cctttaaagaggatttctgtctctgggaccctcgctgcacctacccctcccaattgcaaagccaacttggactgggaagggcccttcaggtcaccaaacatccacctggagcggcgagctagaggcctgttggcttgtgaaatgagccctcctgccacacggggcctctcccaaaggctcatcccttggccgcccccttcctaaacacaaggatccccagctggactccccaccccctggcttccccacctctccaggtgtcaaaggtgaaccgagtccagtattagctgaatgtcatttcgtacaccacagctcagtcagcccatggccttcgtgaactttgctccaacacactgatgtgtgggcttcccacagcaggactgacttccccctttctgttgtttgcacatgcccctcttactgtactgtcaatagatatttttgagatttatttttaaataaatattcaacttgcaaaaaa

SEQ ID NO: 88668 - DNA, 471 bp, Homo Sapiens
ctgacgcgatatgcctctcctgcgtgggcgctgtcctgcccgccgccactaccgccgcttggccctgctcggcctgcagcccgctccccgcttcgcccactcggggcccccgcgccagcggcccctgtctgccgcggaaatggctgttggacttgtggtgttttttacgaccttcttaacaccagctgcatatgtgctaggcaacctgaagcagttcagaaggaattagatggaagatgatgttgaacagctgttaacgtccaaaaaactttcagaaaaagctgtgtttttgttaacgagcaaaattgcctagttgagttgatgcaaccattgtggtattcactttcctcatgtttatgatgaatattttgcacttttttagtactgtgcattatatagatgtatagtcaaaaatgttctgcttaagtgttaaataaaacggaaacacttattcgtgcttggtaaaaaaaa

SEQ ID NO: 88669 - DNA, 749 bp, Homo Sapiens
tttgcatgttattacgtttagtgtagagtgcatatacagcaaattaaaggacccagaaagctggatccaatagtgacctgggtacaccaatcggaatattgaatttggggaagtcaagggctgggatcaagaggtggattggaactaatgccatgtaggatggtatgacaaggcaacactgtattgctctctgtttatatagcaggtgtcacaactaacttgtctttagccttggtgctttgatccttctatattttgaccccacaggtgtggtccggtttacttaatcaggacatgggcctaagaacaaaccttttcccttcatgataacatccatagacaacttattagaagggactagagtttttgcaaatttccctgctggatggggcctatagctatacttagtatatgcctaaacatggtaattggatagtaaatggttttctagttccattgctgtatatttgcctaaatggacttgtgttcaaattatttcttcaattgtcatagataatcctgtaccaaatggggaagaattaggaaataatcatgttgtctaatggtactctggattcagggcagcaactgccatttaaatgttgtcttgttcatttctaaatctgttcatgaagtttaggttttccctgaaactaagttgaattatttccaaaatgaaacaggcttctcagggacatatccacttcttcccagtctgcctttggattaaagcaccaaacaaagaccac

SEQ ID NO: 88670 - DNA, 462 bp, Homo Sapiens
gggaaaagggctctagaggaattgggggtttggtcctcttaaggtctgaggtctttgggtctctgggtttggtcaggcccttagggactgtgggcttaggctgagcaagggtagccttgggacatgtctcaaactctggtgaagtcaagaaaggccacagagtggaaaatccagaatctacatcccattcgtgccagagccctgtccaatccactctctgagcagatgtctccctacgaaggcccaagggactcctgaaaagcaggcacgaatagaccgcagagttaaacagtgcaagggcatgctgtggacccacccactttgggtaaatcttttgacttctctgtgaatcagaaaatcaatgggatagactatgcctcacagggccaccctagggatcgaataagatgatggataccaaagtgcttcattaacaataaagtgccaaaaagagttactact

SEQ ID NO: 88671 - DNA, 539 bp, Homo Sapiens
tttttttaaaaaatacacccactatatgctatctataaaagatacacaacttaaaactgacaaacccacaagcatagctggagacttaaaacattactagaatagtcaaagaaaaaatacgtgttctgaacaacattatgctccaacttgagttgatattcacagaacactacacccaacaactattacatattcttatcaagtgcatatggaacattcaccaagatagactattggtagtctcagcagatttcaaaggcttaaaacattacacagtacaatttctaaccaccccagagagtaaaatatctagaaaagcctcatatatttggaaactaaacatatttctaaataacccatgggacaaagaagaaaatcacaggagaaattaaaatatagtttcaactaaacaaaagccaaaacatcaaaattttgaaatgcattagttttagagcttagaaggaaatttatatacttaaatgcttataatagaaaagaagaaaagtttaaatcagtgatataagctttcaccttaagct

SEQ ID NO: 88672 - DNA, 541 bp, Homo Sapiens
cagtgccctaggaatggggttgcctgccttggtctctaaaggatgggttcaaaaggcaagagcagcacacaagaagatagcttcaagcaggagaaaaagcttggcccagggcccaaaggggatacgacccttcagcaaactgacatgctgaaagctgccctatggagaggctcatgtggcaaggaacagagggtggcttctggccaacacccagtgaggaactcaggccctcagtcaaacagcctgcaaggaactgaaccctgccaataaccctgggttgaaagcttccctttggagaagaactgagggctgtctctggtcaatagcactgaggaactgaatccagcaaacaattatgtgaagaaacttggaagcttgtcctcccctctagttgagctttgagatgactgccgccctagtggacaccttgattgaagccttatgagaaaccctaagccagagaacccaattaagctacgcttacattcctaacacagagaaaatatgagctaataaatgttgtttcaaaccactaaaaaaa

SEQ ID NO: 88673 - DNA, 396 bp, Homo Sapiens
cagtattctaaaggaaataaaaaattctatgaggtcagtgcaagagaagaaaatggaagacagttcccgaccttctaccccacagagatcagctcatgagaatctcatgggaagcaattcgggggaagcagcataaaacagctaaagcgggtggaagttccagaagccctgcgataaaaacatgatctttagaagaggatgcagaactgttcagtggtattacatgaaatgcattgtgagatgtttctaaaataccttcttcaattcaaaatgatccctgactttaaaaataatctcacccaggaattccaaagagaatcataagaaacacatcagcatgtttcttctgtaaatatgaaaataaatttcttttttatgtcgtgagatttgtattgg

SEQ ID NO: 88674 - DNA, 178 bp, Homo Sapiens
tttaagtttctaggatggttttattaaagtcccatgctgtgttagaaacatacaagtgatgagaaaaacattaacttgaaacatgcacttactggcattctctaaaataccattatacaagttttcatttaattagaaaaatacccactaaaacaatcacagttcttcttaaagattt

SEQ ID NO: 88675 - DNA, 515 bp, Homo Sapiens
  misc_feature (475)..(475): n is a, c, g, or t
  misc_feature (494)..(494): n is a, c, g, or t
ttccggttgatgaatggctaagcgccgagtcggagcatccccggggcgggggagggaaggggctgccgggagtgctccgggatgcaggaagcctgaagttaagaaggggtgggagcgagagagattccgatttatcgactggaaggaatcatgctgcaaaccacgtttctcataattaaaacggtccaggagtgcacacatgtcacatgaggagactcgaagtttgcctgaatcgtaaaatgcaatccttctagggctggaaccgcgtctcagtgtcgagcctgctttctactgccttaaccacggtcatctttgccaagtggtttaccttggcacctgggcccccgagtacccttcgtcatcaaataatatttatgtcgcaagaccgctgtacccggtgactcaacaccttgcatgccacggccttaggcttggtcaagatgaattcttgtccctgggggcgctttcaagcggngagaaacttaccttcgcanaacttaaggctatagaagatg

SEQ ID NO: 88676 - DNA, 531 bp, Homo Sapiens
ttttgtttatcttggtctcctcagttcttggatccccatgaacccggcctggaacggcgtctagggtgcagggtctgcaggggcagggctggggtttctcccagggaggagtctgtttgggctgcagtttcccatgcattgcctcactaacgtcacgtggggcgctgtcctaagcaggaagaacggtgagctgggagagagccccacctggtggcaacaggcagaagggcagccaggggatgccccaagagaaggtggtttccaggacaggcacctgccctttcagacccgtgcttttcagcggtagaggcctctcctgtttcctatcatctccgcacaattactaccgatctgcagggcgagtttggtattccccctggtgaaccatgactaggcttcatctgccagtaaagcaggtgaacaggaggacttaaaggatttgtttctttgatctacagaaaagacactgggctttggagggcaaatcctaagctgggcactcacatcgcgacaacactcacttgccttcca

SEQ ID NO: 88677 - DNA, 462 bp, Homo Sapiens
gcaggggggtaactatgtaatgtgtaaaacttcactactattttcattaggttccttttgggcttttttgttgttgtcactgatgaagtttttcagtgataatgtacaaatcaaacccacaagaaacatgtcttgctccaggaaaggaattaagtggtcatcactgtgctctcaaacaacacttacaaaaaacagagaaaggtcattttaaacactctttgataacccaacattctgtgctcttaaattttgcaaaaataagtcatatttatgtggtacttcagaatttaatgtgttagtcatatccttttttatctagtcttcactgcaaataagtttaaaaagtagggggaaaattatcttcattgtaagatagcagaaacagaagcaggaccagatgaagcatgtttcctaaagtcccacaagtaactgtggtataaccaggcctacaatccatgcctt

SEQ ID NO: 88678 - DNA, 1254 bp, Homo Sapiens
cgatattgtgacatatagaccagtggtcaaaaaacaggctgttacggtcggatatcccgggatatcgtcgaccacgcgtcgctcaagtttgaaactcctgcaccaaactattacaatgcctcgtgtctcttgctgcagtcagataaacaacgtctgtactcgagccgggtttatgtcaaactcacccaaagaggatctttcgctttgctgataaaggacctcccccagggcattatgatatcaacgaatcccttgtgaagcagtcgccaaatacattaatgtcttgttgtaaatcaaaaaccaaccgtggattaaaactgacgtcaacaggcccgggacctggttattacaaccccagtgattgcacaaaagttccaaaaaagactcttttcccgaaaaaccccatcctgaacttctctgctcagccttcgcctctgcctccgaagccacctttcccaggtcctggtcagtatgagatcgtggactacttaggcccccgcaagcatttcatctctagtgcatcattcgtgtccaataccagccggtggacagcggcgccgcctcagccaggcctgcctggcccagctacgtacaagccagagcttccaggaaagcagtccttcctctacaacgaggacaagaaatggatcccggttctgtagggatgtcacacaaggtcaaggagaactccagccaccagcccaccctgcccagcgtccccaggacattcctcaggaggagaccgatcatgagtgtggcagctgaacttggggggtggctctaccactctggcctggcatcctagccggactgctgccattgcctttgtcttgagctggagacattgctcccgggagacttcaccccagccccacagactccagtggcttcctgagcagaagggaggagtggacagagccccctggctgcttccccacgcacccatccaggctgccttccggcacgactccctgccgcagactgaagggactcctgaagcgcagacttcaaggaggatcagtccaccctgaaggtggccaagcctggaagccccacccttccctgtttcattccttcattcatttacacattcattcattccctcactcctgcctttctcatttgtccctttctgacctcactcacttacggtatgtctactgggcgaaagctacctgcaggcaggtgatgctttttccaccagtccacagcttcctttctaaagtgaccacctgtttggaaagacctctcaaa

SEQ ID NO: 88679 - DNA, 546 bp, Homo Sapiens
ttttaactaactgcatgaactgacaaatttctggcattcatacatatttaaacatttagtgctaatatttgtacagaaaaaagttaataatactaaaacatatgttactatgatttcacttttagcctacatcatatactaatttccccttttacatgcagctttaatattgtccaaacaatggcacaaataaagaaacaaagtcaaccatctattccccactgcccaccaccccatccccacatcaaaccgttcaggactctcttccccagccgggctggagtggccctcgggctgctcagtgagacccggacccaaggccactggagcgagggagctgattcctcctcctctggggcacaccttcctgtaaacgtggctggggccaacacggccccagagccaagggaagctgctctctctgggttgcaagccaaccagttttgcagcaagaagagaaaattatcatcaggtgagggtagggtatgtgtgtgattcgggaaggggacagggagggttcccggtgatagcttgtccaaagcctca

SEQ ID NO: 88680 - DNA, 513 bp, Homo Sapiens
  misc_feature (318)..(360): n is a, c, g, or t
tttggagacttgacatttaaatgtattataattaggccctacacatgcaaaaagtgaagcagggacatgaaggtactcagcctcgtaaaggcacagcctctaaaactggccagaaccagtccatggaggatggtctcttatcaggagaaagttactgaaatcagtcccttgtccagagaaagctgtcgttaaggttagtggggcaggagatcagttactcagcatctgtgaactgggtgagttgtaattgttttaatcttctctcacagccatctctcacagccagtgcttgcttggcttgaaaggtgaataatcctnnnnnnnnnnnnnnnnnnnnnnnnnnnnnnnnnnnnnnnnnnnttcttgggaaggaggatctctgctggttggttgggtgatgtgggggctgtgtgaaaacaacttgtcaatacaagccgaaataggaatatttctccacagagtatgaaggtcaaatgagagaatacatttaaattaaatggaaaattaaaatgg

SEQ ID NO: 88681 - DNA, 488 bp, Homo Sapiens
ggcacgaggcgcgaccactggtgcgcactgtacagcttgtatcagctgctcgtaggacatgtccagcagctagctgctcgaggtccacgccgcagcaggtgaacttgcggaaggtgatacatcctcttcgcagacagcagaaaaacatcagatttgtgatttaattgggagttttctgggatcgaacagtggcttcgtttacagtcgtgacagcttgagccagagggtgccagccagtgccatgatgtgaccaaggccatcaacagcagagccgcaagggagcaggagccttggtccctgaggacatgctggagctaacttgggaatcctgaggtggccacctccaaaatgttacatgaaagagaaaagtaaacatctaacttgcttaagctgctattgttttggggtttgtcatttacagccaaacctaatcctcattaaaatagtgctggaactggaatttgaaccagtttactcccaagaccaat

SEQ ID NO: 88682 - DNA, 564 bp, Homo Sapiens
tctgggtagagtctgatggtcacttcagctctcatagtccagctatccagccatagtcctagaaggcaagacatcactgtgcccgaccaacccaagggtctccacctgcccccctcaacacaaggtgccctgagtgcctccgcggggatagtccccgtccccacccctgcttcccccgcccatcgcgacagatgctcagagctcatccctggtgtcacaccacataaaggaggagggcggtggccaggctccgagctcctgccgtcctgggtgggtggcttctgtcctgcgtgccgccgggcagcccgggggtcctgcgcgcgggcgcggtcggtggagctgcaggggggcgctctgggatgtctccaggcagagtagatactgacccctccgcagccgggaccctcaccctttccttcatcactcaggaaacagaaaaggcttcagaaggagcggccatgcccccggcctaagcgctgcgttcccggcccagcaggcctaccctgcacctggcgttcctaggggcccctctgcgggacccactgcgcggctcgcagcggccgc

SEQ ID NO: 88683 - DNA, 418 bp, Homo Sapiens
gatgactgaactctccagggagcctatggactcaccgcttaggggtagagaggaagaacctccttggtcacgtccctgggggtgggcagtgaaagctgatccatcaagagagaagcaagagtcacctccaaatgggctgagagggacggacagccacgggccaccctggtactgagttctgttgctggactagggactttatgaggacaaacactgttttcagtcatctctttgttctcatgctctagaacatgcttggtatatagtggacacctgaggaatatttgttgaaggaattgagacttttcaaaatatgacaaatatccactgttggaatgagctgccctgaagagttgtgtgagttctagcactgtcacagtttaagaaaaaatgataaatatctgttgacaaataaaaa

SEQ ID NO: 88684 - DNA, 199 bp, Homo Sapiens
cctccaaaaatgaaaccttgaaatgaggacattgtcctgtccacggactgcacaacaacactgagcctcaaggactcatactggcatttttcttcttttgcagagtgtgggcaccctggcttcaagctcacgagaaaccaggtcgggatttaaacaatgttgggttaaagcaaagtttcataaagacagaatcaaaaaa

SEQ ID NO: 88685 - DNA, 559 bp, Homo Sapiens
agctgaagccttactggcttggggttcagaggaaagaccctaatattgcccaagcagctgaaaacttaggaggaaatcacaagaacacaaaagtcacagagtgtgagcccctaaatctgagtatgatcagcctaaatccctggctgtctgccagattacacagaagcatgggagaccccagggagctaggctagacgttgtaagagctgagcagagatagcagctgcttcatacgacagaagagacagttcgcagtttgaatccaggcaagttaactgcctactagaatataaaaagagaaagttctcagaagaacacagtagaatccagagttgctataacatcttatctacaatgccaagttttcaatctacaattactagacatgtaaataaaatggaaagtctaactcatactcaggaagaaaagcagtcagtagagactgactctgagcatctaagtgggtacagtgctggattttgcaggcagactgcaaagccactgtgctatgatcaaaggattaaaggaaaaataagtgaaccagatagagaattgtaca

SEQ ID NO: 88686 - DNA, 1072 bp, Homo Sapiens
tttaattaatatgcattgaatgaaacagctcattcattagctcattcatccagaacatttatagctgcctgatatataccacttattatgctgggggcctgaaggacagagagatcctggtctctagggcctcactctgtagtagataattaagagacagatgacaaatatcgtgggatagatggcacatggtgagaaggtgcctgaacacattctcccctaactgaggagaggaagctggcaaggtgttaacagtattcgtacgtcctcactcttctcataatcatgggccttcaggtaaaggatgatggccaccccactctccatgacggctttgtggaataagccttcggccatgggagacagcatcaaagatggtcacagagctggggtccccaccgaagaactcgatgttcttctggacccaggatagagcagccacctggtccttgaaggcccagttcccgggagcgtgctgatcccatgtggtgaagaagccaaatattcccagccggtactggacgatcacaaccagcatgtcctcataggcagccagggaggacccatcgaagatggaggctgagccagtctcgaaggcaccgcctgggaaccacaccaagacggggagcttggagcctgtatcggcgtgggcaggcgcatagatgttcaggtagaggcagtcttctgacactgccgaatttcgggtaatgcaccttgagcatgtgttgatctaagagcagccactctgagttctggaggcacaaattagggtaggaggtggcttctcgcaagttatcccagggcgatgcaggctgcgggttcgtaaatcgcagggatcccagcgggggagcagcataaggggactccgaggaacacgttcacaggcacagggcttcccagcacagtgacttgcttgccctgaatccatcccagcctggtgttcctctgtggcccttcagcagaaggcccccagttaaagtggtttttatcaaaagacaggaaaaaacggatgctggcaagagtgcagaaaacggagaaccctcgtacactgttgatgaaaatgtaaatttag

SEQ ID NO: 88687 - DNA, 736 bp, Homo Sapiens
  misc_feature (11)..(11): n is a, c, g, or t
  misc_feature (59)..(60): n is a, c, g, or t
cacttgattgnacgttgcaagctcactcagagagggatgagagaagaagagaatgaagnnatagtccactacgaatactaagaaccaaggaagctatcatacaaataatgaaaatgagaaagaaaattagtaatgctcagctgcagactgaattagtagaaattttgaaaaacatgttcttgccacaaaagaaaatgataaaagagcaaatagagtggctaatagagcacaaatacatcagaagagatgaatctgatatcaacactttcatatatatggcataattttgaatatcatggacaatatttagaacccaaattttggagtgcttgggcagaaagttgtaaagtttgtgctggagaaaggtttatttggactttgattacataaatattaaaatctctgccttaccttacaaaaacaactatattttgccaatcacattagttagcatgatggcattcccttcatgttgcacactctttgacagcatgctgttttgtggagaaacttgcattcatgaagagcccattatcaacttttaaaagtgaatttgatttgtacccaccaggagaaatacagttgggaagggtgagggtggggttcttgttgcttttttctcttttttcctctcttaaaaaatgtacttgcacaaggaaggatcttcagatattcatgcactgaaaaatgctgttatcttttgtttttaaaaaatgcaattaaaactagaaatagc

SEQ ID NO: 88688 - DNA, 451 bp, Homo Sapiens
tttcctgttggagtccaatgtcaagagtggcagaaggagcaacgtatgtggcaaaaagatattgcgcttgcttgcatactttaaaaggctgaagtgtttcttggtagaaaagctgatgataagcctgcaggtcaaaccaaaagtacacactgttcttccacaacttgttccctgaatgctcgcagaatttagtaaagaagaatccagctctattttctacatacaaagattgcaacaaattttccatgtcaagatcctcccaaggcaccaacatctgacacggttttaaccctaggttcttctgtataagcgtatcttctatccagctggggcttgagacattcagaaatgtcagtaaaagatgttaaatgaatgactttgctgcgttctgacatgtactttgaccctttctcaatcacatcatccttagaagaacctggatacaaaagct

SEQ ID NO: 88689 - DNA, 712 bp, Homo Sapiens
gacttacactcattttatttaatatgtctggggatgatatacaataagttaagcttaatgttcatgacatcactctagttcttcctaattttgtttctagaaataagaaccagcaagggaagtagagccgctctatggtaaagaacaaaaaaagcaatattagcatggacatgttaagagactcagaagctgattgtatacaaggtttcaaaagaaaaaagtcattcagtattatggtcgaaggttttataatttcaacctctgtgtttcttcatgaacattttcccttaatgtagccatctttttgatggtcataaagtgtcattcagtacactttcagtaccctcttctaatgaaatggctgacaggtatgaaaatactttttccattagaggttccccgagagaaggcattggagagttccttttcactagagaatcatcagaaaaccagtcatcagctgcttctatactttggctgtaataagaatcagatggtaatgttgataagcttaatgtaacactgctgcgatttgttgtggagctagtctctgagggatcacaaatgatattttttgttgcaagttggggttcatctttagaatgatctttaattgcttttatatgtgctgcttccttttttctttgctcctcctgtaattggaatctcccagtatgaaaatttcgagaaataaaaacacactgagaatgag

SEQ ID NO: 88690 - DNA, 580 bp, Homo Sapiens
tatttgtctgccttcctgtcagaacaaggacagatctgggccagaaactgggcatgactttagcatcttagcaccactgagagggagcagaaggaattggcaaagcccctcaggctggctccagggagagcatgtaggtggtctgaagcaccacagcccaaaagcagagaaactccaagctgctgtcagtacctggagaagccctggagacagcagtcagcatcctgagggtagcacctggcaaagccaagccccttaggagttctcatctcagttctgccagttcctagtcacccatacagaagcctgatcaccacctttgactccttcccgtcttccttccccatatccagtgagagaccaagtcctgccaattctgactcctaaacatcttttgaatccatcaatcctctctgtctcacttttcctaggtcctcccatctgtgcctggactcctcaccagcctctctccagaaaaatcattttcccatacaaacctgataaagccattatcctgcttaaaagccttcaatggctaccaattgcctcagaataaaatccaagctccttgccgcaaaaa

SEQ ID NO: 88691 - DNA, 451 bp, Homo Sapiens
gacaggaagaaagtggtggagtcagaggtcacaatccaaagcaaggtgacagtctcttgacgaagacaccctgagtgctgaattaaggggctaaataacagtgctatagtggtttcataatcataaagcattccaggaacacaatattgcttatcaactgagctttaaaacagatatgaggcaggacatggtggctcacacctgcactcccagcaatttggcaagccaagctttgatggctctggcagaaagccttcctgttccaaactcaccacttatcatcatagtacccgcgttcaggcattaagaagaaaagagcatccaatccctctgctttcctgcatcggctcccatgcacaagcaaatgtgttgtgttagtggctatcaaatattcatgtatttgatcaaggaaatttgtatttccaaatggtaaaacaaaaatactactaaa

SEQ ID NO: 88692 - DNA, 493 bp, Homo Sapiens
aaaaagggctggagaccacccgggtgatgacccacagttctcggaatggcgctgaaggcaaatacacaatggaagtactttctgttttgaagtgctttcccttttgaatctggtttgaaacatgcagcttctgtctctagcccaaggaaagaccaaaacatagggaaataaaagcatttatctttgtcttggaagtaattgttgaagttgtgcagttgatcagtgcacagttagatgcaatgtttatagaaattgattgttaaaccaaatttacactggcatgtgtggtgtagtttctaaaaggcacttcacatttgaaatttttcttaccttagaaagtttctagtgatctaaatgtctagttttgtattcttttgtgtgtgttcactgtttctcagtattaccacttgaataattctctgtacaggggggtttgtgctataccctgggatgtctaattgcagcaataaagcctttctttaaaaaagaaaaa

SEQ ID NO: 88693 - DNA, 486 bp, Homo Sapiens
agtgaaatgagttgcactaaagtacgtagttgaggctccttttttctttcctttgcaccagcttcccgatacttcttggtgtgcaagaggaagggtacctgtagagagcttctttttgtttctacctggccaaagttagatgggacaaagatgaatggcatgtcccttctctgaagtccgtttgagcagaactacctggtaccccgaaagaaaatcttaggctaccacattctattattgagagcctgagatgttagccatagtggacaaggttccattcacatgctcatatgtttataaactgtgttttgtagaagaaaaagaatcataacaatacaaacacacattcattctctctttttctctctaccattctcaacctgtattggacagcactgcctcttttgcttacttgctgcctgttcaaactgaggtggaatgcagtggttcccatgcttaacaaatcattaaaacaccctagaacac

SEQ ID NO: 88694 - DNA, 684 bp, Homo Sapiens
ttcgtggcagcagggtttacaacatttgacctgatttcaagaatgagcagtgatgacattagaagaaggggagtcatacttattggacaccagagacgaatagtcagcagcatacagactgtacgtttacacaatgatgcacatacaggagaagggatttcatgtatgaaagtaccacaagcacctgtgttttgtgcctcagcatttctaaaatgaacgatatcctctctactactctctcttctgattctccaaacatcacttcacaaactgcagtcttctgttcagactataggcacacaccttatgtttatgcttccaaccaggattttaaaatcatgctacataaatccgttctgaataacctgcaactaaaaccctggcccactgcagattattgctacgcaatgcaacagctttaaaacctatctaagcccatgaatggaaaacaaatccaaatccgatccttgaaaagcaaaggctctaaagaagctcttcagaagagacggtaaagaatgaattcttttacttatcacccaaccacatttcttaaaaatgtgttttggtgtcttttcctaccaaatttctgctctacaaggcagtcagttaaatctctcatttcataattttcactgtgatagatccttgctctctcctcttttaataaatttaataaaactttaa

SEQ ID NO: 88695 - DNA, 521 bp, Homo Sapiens
  misc_feature (362)..(376): n is a, c, g, or t
tcagcctggaaggaatgggagtttctgcctcaagactgatcctaggttcattcccattttctcacccaacaaagtcctggcatcttggctccctgatgttgatgactgaagacacaggttgttacctgtttccattttttaggtggagtacttcttttttcttcttgaatgtttagaaagcatggtcaagttagacttatcttgcaaatgtcaatatagatcaaacaaaagattgaatatgaaaaaggatttatgatttggaggtttggtttggtgattctgttggaggaattctgatgtgaagattaagaagcttgctataggcaggatacttaatggaaggacaagaggtagatggagcnnnnnnnnnnnnnnntccttaaatcccagagttaaaacaaggtggtgcttataaaaatcatacttgctttgtataaaattttatcatctataatttattaatcagtaaaactgtaggtatccttgatgccaaaaaagattaaaattctatttttcctaaa

SEQ ID NO: 88696 - DNA, 569 bp, Homo Sapiens
  misc_feature (387)..(517): n is a, c, g, or t
tttttttaatgtttcatttctttttatttctgtgctagagccaaacttaaagaggctgggaattcattcattccttaatgcaacaattgtgacaaatacaagttgtacaccctgtagaccacacttaccatgtccaagttcctgtggactataaagatgaagacatgaagatgctctctcttctggaggctcacagtccactggggagatggcagtgggatcacagaggcgatgacaaagttctgcctctgctgattgaattgtgtgcccacttttctgtgtgccctactggatatcagtgccttgagctgccttgagggcatttgttcctttttagtcccattggagtgtctgacataaaatcagtgggctcttgagctagacagnnnnnnnnnnnnnnnnnnnnnnnnnnnnnnnnnnnnnnnnnnnnnnnnnnnnnnnnnnnnnnnnnnnnnnnnnnnnnnnnnnnnnnnnnnnnnnnnnnnnnnnnnnnnnnnnnnnnnnnnnnnnnnnnnnnaaatagccctcacttcctttagaggcatccaattgggaactttcaaaatcct

SEQ ID NO: 88697 - DNA, 420 bp, Homo Sapiens
agatgaacgtagtcttcactgtgctacctgctctgaatatatccatgcagtttcattcaatttttctggaggagaccgatcagcaattttcataagatgggggcgagtagtagcgtgaatgaaccctgtctaaagcatgtggaagacgaggaggaacgcaaagcccttaacatcgaagctataggacaaactggctgtatactttgcttgaagaattatgaatcatgataaaagtaacctgtaatgcccctagaaatagggctcttgtttaatctctgcttaaacattgactaaagacacaatggccacatctagcaatgtgattctggagacagtgctgcggtctgcaacgggacatgaatggccaagccaagcttgcaaacatgggatgctgtgcgtggggacagacctatggagtct

SEQ ID NO: 88698 - DNA, 821 bp, Homo Sapiens
  misc_feature (169)..(177): n is a, c, g, or t
taatttgtaagttatgttagcgggatcctcaaggccttgctctgccccgtggagacgcttgctcggatgagctcaggaaacagtaccggctgcgtggcaggtctgggtgttgtgtgcgaggacgtggcctttgcacaccgctgtgttctcagaggtccttaggagatannnnnnnnngtcttagggggactgtgttaagttcagacaaatcatgctgggtgtggagagagtctgaaatacgtcagtgaagtaagtagcagtgagcgattgtgaatgtgtaatgtaaatggaaaaccgggttttaccgtgttaagttattcactagggagccagtcgtagttctttgtaatcctctttcttccaaacctgctttgctgaaagttgcagaaaaggaagtgtgtggagagaaacagaacccttcagggtgggtcagaggacgccatccacagtggattcgtgttcgtttgcaggtggaagcagtgatttttaggacccactgattaaaaacaaacattcccaagtgtctctgagagatgctgtttatttgttaattaaaaagcttttttctctgtcttttaaattatggctttcatgtaataaggatatttttagtgaaaaattgttttcctttcaaattacagaccttttaaaaaaacttaatttgagcgagtaccttttcatttgacacttttcctgtttctaaccttaggaaaccagaatagcgtttggcagacacgacgttttcagtttacctttgacacctgccccactccattttgctttgtgatgtcttcatttaacaataaattatctgaaaaaac

SEQ ID NO: 88699 - DNA, 422 bp, Homo Sapiens
  misc_feature (58)..(294): n is a, c, g, or t
agtgaaagaggagggaggagtggctgtcagtgtgggcactgggctattatcagtgagnnnnnnnnnnnnnnnnnnnnnnnnnnnnnnnnnnnnnnnnnnnnnnnnnnnnnnnnnnnnnnnnnnnnnnnnnnnnnnnnnnnnnnnnnnnnnnnnnnnnnnnnnnnnnnnnnnnnnnnnnnnnnnnnnnnnnnnnnnnnnnnnnnnnnnnnnnnnnnnnnnnnnnnnnnnnnnnnnnnnnnnnnnnnnnnnnnnnnnnnnnnnnnnnnnnnnnnnnnnnnnnnnnnnnnnnnnnnncattgagtgtaagatgtcctaccaagaaagaaacatcacagccaactatgttgtgccatccaactgaaagatgcatcccagtttcagagatgttaacatgtacgtcttcaataaatgagatgccgcgc

SEQ ID NO: 88700 - DNA, 788 bp, Homo Sapiens
agaaagcaaaaaggctagagaagagatgtatgaaaaatatgtagcatccagagaccattataaaacagaatatgaaaataaactacatgatgatactagaacaaatcagattgaaaaccaaccaagaaattgatcaacttcgaaatgcctctagggaaatgtatgaacgagaaaacagaaatctccgagaagcaagggataatgctgtggctgaaaaggaacgagcagtgatggctgaaaaggatgctttagaaaaacacgatcagctcttagacaggtacagagaactacaacttagtacagaaagcaaagtaacagaatttctccatcaaagtaaattaaaatcttttgaaagtgagcgtgttcaacttctgcaagaggaaacagcaagaaatctcacacagtgtcaattggaatgtgaaaaatatcagaaaaaattggaggttttaaccaaagaattttatagtctccaagccctcttctgaaaaacgcattactgaacttcaagcacagaactcagagcatcaagcaaggctagacatttatgagaaactggaaaaagagcttgatgaaataataatgcaaactgcagaaattgaaaatgaagatgaggctgaaagggttcttttttcctacggctatggtgctaatgttcccacaacagccaaaagacgactaaagcaaagtgttcacttggcaagaagagtgcttcaattagaaaaacaaaactcgctgattttaaaagatctggaacatcgaaaggaccaagtaacacagctttcacaaga

SEQ ID NO: 88701 - DNA, 674 bp, Homo Sapiens
  misc_feature (25)..(25): n is a, c, g, or t
aatggcctggcacggtgaccacggnagtgccctggcaccggtgcccgcggctgtgacggaaaaagggtgggaagaacagggaagaggaagcagaaacagagaaaggtgtctaatggtctagtctaccaacttcactatgctgatttatgaaagaattgctgaaacccagtgaataatagcatttgcccttctttctcaaaaaagcagcatttgctttcttctggcaaggaataattaagctaatttctccatgaaccttggaaaaagtggcaacgaataatggatttgtccctcaaagaacatttcaagcaaacatcttatcagctacaaattcatttgaggcagttccaggtcagccacaggcaatttttctcattaaaatactgtttaaactgttgtatccagatgacacaggagacatatcagacaaacaacacctgcaagaagaattggtgaagtattgacttttcatcaatcaaaaagtttactaagcagatgaaaataatttgccttcacagtgacattttcctgacgtcttgctagtacttaaaggcattgttttttctttaacacccaaactttaattaccagaaaaggttagcatcaaaacaaaggacatgttggtaatttagaggccatatcagaaaaataaattcattttggtttgaatgaaa

SEQ ID NO: 88702 - DNA, 465 bp, Homo Sapiens
ggacccgggcttgcgtcggagggggcggtggggtcacccatgggcctttccaaaagcaaagagaaacccaggaaaggtgaggagcaaaagaagggatccacctattcagttccaaaatctaaggagaagttgatggagaagcattcccaggaagccaggcaggcagacagggagtcggagaagcctgtggacagcctccacccgggggccgggacagccaagcacccgccgccggcagcttcgctggaagagaaacctgatgtaaaagcaaaagtccagcaggaagaaagtggtcgttccacagatcatcatcacgcgagcgtcgaatgagacgctagtcagttgcagttccagcgggagtgaccagcagagaaccattcgggagccggaggactggggcccctaccggcggcacaggaaccccagtacagcagacgcctataattcacatctcaaagaataaac

SEQ ID NO: 88703 - DNA, 477 bp, Homo Sapiens
aagtgatgatctttcacacctagtgcccagatcttagtttctaaatatcattccccactggtattcagggttccttggagaaatgcctgatcccagaaccagggcagggaaagatgcctggaaaaatgagccttgaatattttattgcataagaaaataaggaactggtcaaagaaccatggggagaggtcaaaaatggaactggaaaagggctcttactggccaaatctgggacaatttgagcatcaaaataaatgatagtactagtttgtcacccatcgaataaatattcatgagtccatgcagtataaataagtaaacagaggagaaagtgaaaagtcttctttgcagaagaatgccaactaataaataagaaggaatagtagcattaaaagatcatccatggtagaggaagactgataagaagtggtttatgtagtctcagattgtctccccacaaattactgattaattaaa

SEQ ID NO: 88704 - DNA, 961 bp, Homo Sapiens
cggtccggaattctcgggatatcgtcgacccacgcgtccgaagatcagccacctgggcactccactctatttggcttgtgaaaaccaacagagagcctgtgtcaagaagcttctggagtcaggagcggacgtgaaccaagggaaaggtcaggattccccacttcatgcagtggccaggacagccagtgaagagctggcctgcctgctcatggattttggagcggacacccaggccaagaatgctgaaggcaaacgtcctgtggagctggtgcctccagagagccccttggcccagctcttcttggagagagaagggcccccttctttgatgcagttatgccgccttagaattcggaagtgttttggaatccagcagcatcataagataaccaaactcgtcctcccagaggatctgaaacagtttctcctacatctttaaatgcatctagggaatggattcacaaacgatgtgaaaacattattgagtgttgtagccactagaattttaaaatcaagttggatttatagagtttgactagttttttcgattagatttgtatttgttataaacttgtttatggagtttgactaattttttctattcaatttgtatttgttaaactcaagccagggtggaaagacactgcatacgtttgtattattagttagaaggcatgaagacttttttccctgcttggagagtgtcataagttattgttttgcatatctactgcatgccaagcactttctgcatcatctaatttagccctcacagccactgggtcaagatgtccaattttccagagtaaggatagaggagtcaaattcaaatacaggttttctgacattaacttatgtgatgacttgatcgaggcaggcttttccagcatcactgtcctggttccatctctgctatatgggaatgaaaataaagaaacatatttcttggcttgtctaaaaa

SEQ ID NO: 88705 - DNA, 421 bp, Homo Sapiens
gtgaaactgcctgtgtcgaaatgcagtgtttcccaagacctggaggctctctccagctgctaagtggcaggtaagggactgttattctcctgtccctttcacagaggacaggaggaaagtgaggacaggtggtgtacatgcatcttttctgcagcaggccccagatcagctttgcacacggttggtgctgacctcaaatgcagccctagaggggcctatctctgccctgagtgagtattgaagtgcaggcttcttcccctttgttctgtccatttccaaaaatgtgaacacacacctccaacatgtttctgtgtatattattgtgtgcatagatactaccattgtaaaatattatgcagattaaaaatgcactatgccattgaaaatttcaaaagaaatgtgtaataaaacatttaaaatt

SEQ ID NO: 88706 - DNA, 601 bp, Homo Sapiens
  misc_feature (354)..(363): n is a, c, g, or t
ccattgtgacatatagaacagtggttacaaaaagcggcggtaccgctccggaattcccgggatatcgtcgacccacgcgtccgctaaaacatttttttcacagaagcaatatgatttccatacatccaacccatgttctgagcaactacttacttttagggggaaattaaatatcttttcatttcctcttctattatgaaagaagtttatttgtaaaacaaattttctaacaaggttaggccatagaattctcttgtatgattgttgaccttttataatcttctgtaggctatctttcaaacactggcatcagaatattttttataagtttgtgtttaaacagcttagttggtnnnnnnnnnnactcccaagagacttgggtttagttatagctttaagtaaaatttaaaaataaaatgtttttcaggaaacttcgtatctaatggtttgtaaattcaaggtgcaaaaagttgatttaaaccatttgcagagttgaactctattatgaaaataaatttgctacggtatgaggaagaaataaaacttgtgtaatgttggtcataatactgctataaatataataaagggttatgtagaattg

SEQ ID NO: 88707 - DNA, 522 bp, Homo Sapiens
ctgacctgatggcagcaccctgctagtcctcacatggagccctggagaagccgggttccttaacccagatttgaatcaatagcctcacacctggtatgcacatacaggccaagtgtggctgaatggggagcatctgttctggagacggccaccctcatgggctcctctgcttcctgtcccttcgggcactgatttatggcacacagcagggaagggcctgagcttgagccctgaccatcgttatcatcaccatcttcattccagtgcagtgaagaacattctgaaggtagagatgaaggtcttctttctgaatgaagctccttgcatgattcagggatcttcctcttgaaggcaccaatcattttgactttaatgcatgcactctgacttacttgtggtgatctctcctggaaatacatggaaaaatgaaaaataggctaactggggagatttcttaaataccagtttgtatggctgtgttaacctgaatgattaaatataggattgttttttaagttaaaa

SEQ ID NO: 88708 - DNA, 803 bp, Homo Sapiens
  misc_feature (498)..(513): n is a, c, g, or t
tggaaaggtcctacttgatgccaacagggaggcatggaaatttctctggtttcaatgggtacgattattgtaagcaggatccattcaataatcggacccatttaaaccggagattttaaaagacaggaatagaatcccagccttatttcagtgcagggtagggtgtcaaatatgaaatgtaattctacagggcaattctattttggtaaaagaagtggggagaaaagcatcaccagccaggctttttaaatttttaccacaacctattttgtgatccctacgtgtcatttcttcagtatattttttaaatgttttaaaatatacgaacatggtgagattttttaaatgtgtctttttaaagtgtacagtgaaaagtctccctcatgccctcaatttcccagccactgttccttctggactcttctacaaatagtccctgtttctacaaatgtattggaggtagggaggctattttgatttctacccttaaaagcttcnnnnnnnnnnnnnnnngaggctaccaactgaaaaatattttgccattaggaaaaggctgcattcttgttttaagttatgaacattacattatttaaacggcagacttaaaatatgcatcaaagcaaaatgaacctgctatatattttctatggtaacccatgtttctgtgtatttatgaaaatccaagatctgtgcattgttcaaaacagactttgacatctccaatttttaacattttaaagagaatgaattcatgtgttactgggaaattaaaacgaataataaaagtgtcattttccaggaaa

SEQ ID NO: 88709 - DNA, 471 bp, Homo Sapiens
ttgatgcaacaacaggaacagtgtaattaaaagtggattaagtccttgaattccaattgaacaggagaggaaatccaatatatttgaattcttttgggttagaatctaagagtactgacttctctcatgacatctgcatagttaatgtgccatttccactgtaagaaacttggctggggccagtcaagatggttcagtttaacaaccttaatcagttttaagacaagctttgcagagctccatgaccctctgaagagaccgtggccaccttgaaggttagagtatttcggacagatggctgtactactgagagcttttctggacgtggccgttctggctaactttcatcttgtcattacatttccttttctgagaaaggttgcaagggtggttttgacagagtgatgctgttggtatttagaatcctgactttcttgatccttttcggtggagctgcgggacacatgtgcg

SEQ ID NO: 88710 - DNA, 1507 bp, Homo Sapiens
  misc_feature (1295)..(1442): n is a, c, g, or t
ttttctcacttggatattttattttgcttaatacataagtttgcatgtcaatgttttgattatgagtacattgatttgagtttgcataaataacacccaaaattataataattataaagcaaaagttactttacaagctgtttagcttaaagaattttacttctggaactcacgaactctgaaaaatattacttagctagctttcatgattaaatggtggttcttgggagaaacagaatcaatggaataattttattatcaacttcaatgatcataacagcatattttatttaaaaacttattttaatttcaaaaatcttacaggccttctatggagctgtatcatttactctatattgagaaacaattattgaaaatttatacacataaataacacagatgacattttaaaagggaacaaatgaattaattcattgaaatcaggatggagtcctcaacatcaaataataaatttttttaaacaatgtgatatttatgatttttgtgattgctgttttattccaagaaatactagttgtatgtgattgcaatcaagacttaaatctaggaaataaaaatgtgtgaagagactcaaaaattaatgtatttcaatggactggagatcctgtagaaattcattttcattaacatgtctgtatgaggaaaacagtagcttatataagtttaggtggagaggaatagaaggccctctctatagctaggaggacttggtgatctgagaaggaaaggagtgatcttggtgaaagaaaggaagcaggaaaaactgacaggaacaggagtatatgcaccatgatataataaaaaacctgacttacaatgtccttcattcatactgtaatttaaatgaacacgttctaaagtaatctcacaccctaacacccaaccctttcccatcatttatataaacagtccattatgacatgtattctttgcccaagccaacttgaagctccttttggatagagactttatgtatctggattaatattgtattcccatttaggagagtgcctggcacaccatagatgctcagaaagattcaattgaactcgaataggtaggccaaacacacacggggtcctaaattgtgcagaagggtcagatacctaaattttgcttccatggtcttatgaagtataaactaaaagcccaagtaaggagcaaaggttagtttaccaattttatctctggaacccaggtacactgaaaagtattatttagctagctttcagtcctctgtaatacagaaagtaaatatctgacactaggttcannnnnnnnnnnnnnnnnnnnnnnnnnnnnnnnnnnnnnnnnnnnnnnnnnnnnnnnnnnnnnnnnnnnnnnnnnnnnnnnnnnnnnnnnnnnnnnnnnnnnnnnnnnnnnnnnnnnnnnnnnnnnnnnnnnnnnnnnnnnnnnnnnnnttagttattttacttttgtaaagatcaggctggcttcgaactccaggctctagcggtccttccgg

SEQ ID NO: 88711 - DNA, 526 bp, Homo Sapiens
  misc_feature (185)..(185): n is a, c, g, or t
catggatggcttctgtatagagaagcttgttgtatcttggggtctaacgtgcatgggaaataccattctaacacactgcttgcttctaaggtaagactataggaaacacaggaaagttgccccattgagtgacatttaagacgttttctaaaaatagatggacagtgtctagcaacatcaaatantatgatgcaattatgctttgtgggtttttcatattttaatgtgatttcaatatgttataactatttttatatgtatttgtcaaatgtgtgttatttctataactctttagaattttgaaccacctccaacatttaaaattacagctggagcaatagtttttgatgagcactgtgtggtcataatgttactcaacatacatattatgagaggcagaactgagctgcagtttagtagagaggcgtgaggcaaaagagaatggatagtcttagtatttaagcagcacttaatccaccagaagtaattatatcataatagcttctgcaattaaataatcaccaaa

SEQ ID NO: 88712 - DNA, 308 bp, Homo Sapiens
tgctagataaattcattttgctcctcattggctggattgggtcatatggtcacctatagctacaaaaaaggatgagagagtgagtacctgaaacagtgattggaataaacctaaccatgatctactgctagagaggtggcacttagacagagtgatgatgcctaaacttctagaagtagagttatctggctcctctaagacctagactaactgtaggtcattgataagccaaacatctgattaagaatcacattggaagacttctcatcatttttgtctttgtaaataaaggacccctatctaacttt

SEQ ID NO: 88713 - DNA, 1151 bp, Homo Sapiens
  misc_feature (125)..(159): n is a, c, g, or t
  misc_feature (877)..(1104): n is a, c, g, or t
ccctcttatagtcacaaataacaaattttaggttttccttcctttcctcattcattttgcaaaaactatttcatctgccataataatgagacatgtaaaattcactaaaatcaatagcagtagcnnnnnnnnnnnnnnnnnnnnnnnnnnnnnnnnnnntagcaattaaatttcctttagcttgtttgcggacagcagtagttccctttccttttatcattcttacttttactatctttttccatcttactaacagaaatcaggtccttatcttcagctcttctctctatatctacttgcctaacatgagacaaccgtcttgacaatatattcccaaaccgcttgggtcctgtatcatcgtcttctgaacatttcactgataacgttaatagctagttgtttcactatgaaactaaaatccacctcacaacctatttctgtcactaaaatcccattcagatcaataatttatatcctcttttggcctttcatgtatcatgatgtttaatagcacaaaaattccctttttaattccttcaataaatcaggatattttatatccttatcatgcatgcatgccacatcattaataacgcttaactgatttctgtttggttaagccaacaaagacattacacttaactgtcctaaaatgctccttctgagtagttaacacaaccaggcgacatgttggacaaaatgctaacactacattttgttgtaaatttctcactgcaaaatagggaaactaaacttcatgacctttaaagttctttttattaacttgtctctttaaatctccaattgctgtcatctctcacttactatccatgacctattctttccaagtagtaaaaataatactgaaaaggtagcnnnnnnnnnnnnnnnnnnnnnnnnnnnnnnnnnnnnnnnnnnnnnnnnnnnnnnnnnnnnnnnnnnnnnnnnnnnnnnnnnnnnnnnnnnnnnnnnnnnnnnnnnnnnnnnnnnnnnnnnnnnnnnnnnnnnnnnnnnnnnnnnnnnnnnnnnnnnnnnnnnnnnnnnnnnnnnnnnnnnnnnnnnnnnnnnnnnnnnnnnnnnnnnnnnnnnnnnnnnnnnnnnnnncaccaaattgcttctccaaaacaatctatcttgtttttccatgaatc

SEQ ID NO: 88714 - DNA, 447 bp, Homo Sapiens
aggctatggtctcgggcccaagttcaaggtcccagtggagtcattgttggtggaaggatctgaacccaccaatcggccagctctgtatgagaagacaaggacctttctccatgatcctttcgtccctgtagcccagcctacagcagaaagatggggctgcacccctcccgtgggctgaggctgggaaggaacgcggacggggaggaggacccaggcagcacctccccgcggaccagaactcgaacccacagctctggacttagccgggggctctggcgctcgcctccgcctccgagcggatgtgccggatatttgttgccctaagttcctgaatcacctcctgagaaatgcattgtggtgggcgtgtgtgttcctctggggactccgtgcttgggcttaaagcatttaggaaatcaataaaataaatactctctaagcctcagaaaa

SEQ ID NO: 88715 - DNA, 796 bp, Homo Sapiens
ccacagaagaactccactgaacattcattgaaggcccagatttagagtgagcggggcaaaccaagttttgtgctgggtggaaggaggggcggctgctgttcagcccacaggattcctgtgaggacaccacatgttcatagttgttaaaccatcttgcaaactcattgcctgatgttcagatctcccggctcagctggtgtctgtggaggacaggatttatgtttcagagagggcatgagcccagatgatgcctcaagactcaggttcatagtaatgcacacgaatccggaagtgacgccagaagaagaggaagtgaaggctacagggtatccacgtgggttctgagcgtgtttctacgtccctggaagccggtcatttaagctcattcctcgccacggcttagtcaacatgggtcgctcgggaaagttgccctctggtgtctcagctaagttgaagcgctggaagaaaggccacagcagcgacagcaaccccgccatctgccgccaccgtcaggccgcccgcagccgcttcttcagccggccgtcaggaaggagtgacctgacagtcgatgctgtgaagttacataatgagctgcagtcagggtccttgcgcttgggcaaaagcgaagccccggagacgcccatggaagaagaggcggagctggttctcaccgagaagtcctcgggtaccttcctgagtggcctttccgactgcacaaacgtcaccttcagcaaagtacagcgcttctgggagtccaactcggctgcccacaaggagatctgtgctgttctggctg

SEQ ID NO: 88716 - DNA, 489 bp, Homo Sapiens
cagagagttctgcagattttggcatagctcaacaaaataactattactgctactggcaaagtctcccctctgctattagagtgaagcaggagttccagcccagccagagttaccgctatggcaactggtatgcgcgacagcacggctcttaccttctttctggctacagctatggctgtgcagtggatggaaatggaaaggactgtttttctgcgcatgagacccctgaacacacagctggaactctggttatgcctaaggaaaccacacctctagctgaaaaccaagatgaagacccactagaagatccacatcttcatttgaatattgaggaatcaaaccaagagtttatggtgaaaagtgaagaactctacgactccctcatgaattgccactggcagcctctggacacagttcactccgaaatcccagatgagaccccgaagtgaagcaaggtgttcattaaactccgcaattatcataaaaaaa

SEQ ID NO: 88717 - DNA, 684 bp, Homo Sapiens
  misc_feature (180)..(275): n is a, c, g, or t
tttatgataattgcggagtttaatgaacaccttgcttcacttcggggtctcatctgggatttcggagtgaactgtgtccagaggctgccagtggcaattcatgagggagtcgtagagttcttcacttttcaccataaactcttggtttgattcctcaatattcaaatgaagatgtggatnnnnnnnnnnnnnnnnnnnnnnnnnnnnnnnnnnnnnnnnnnnnnnnnnnnnnnnnnnnnnnnnnnnnnnnnnnnnnnnnnnnnnnnnnnnnnnnngtgggtcttcatcttggttttcagctagaggtgtggtttccatctttaatttcactcagcagcttcccaacaggggacacccagcaggatggcaggcagatggcacagggggtcacttaggcataaccagagttccagctgtgtgttcaggggtctcatgcgcagaaaaacagtcctttccatttccatccactgcacagccatagctgtagccagaaagaaggtaagagccgtgctgtcgcgcataccagttgccatagcggtaactctggctgggctggaactcctgcttcactctaatagcagaggggagacttcctgagatatgcctgcttgcccccgatttttttctccttgcagtgagaacctcctcatgtggcatctttacttattctcttcttggaaaatc

SEQ ID NO: 88718 - DNA, 491 bp, Homo Sapiens
cagagccttgatggggggaacacaccactggggttccaggcagccttaactatcgaggaatggcaggaaattctgtctgcccagcacctggtgaccctggagctcctcagtttcctggggagttgagttttggagcagtctcttccagagaggctgggagtgcatcactttccccctggaggtggcggaggctgctgggcccaactagctcattgccaggcaatccagagagagttccagacaccagatactgaacaacctacttgtctccacacctagtaaagcttggatccaatgctgccaacttttctgcctctccagttttggagcccttaatgtgaaggtgcaacccagaagcctgcaggctgttcgtagcctgtagatgtgttttcttcccagtagctggagtacacagtgtttttgtattatttttcaaataagcaatacatttgtgtggttcaaaaattaaagcgctatagaaaggtaaaaaa

SEQ ID NO: 88719 - DNA, 591 bp, Homo Sapiens
cagccgagtgtttccatgataccagccatacctgatgccaggagactcgctacacttggaagcttcaaactcaaggtttaacagcctcccaggatgtcaactggaagatcatgccactcctgacaatgagaagaggagttccctgtgcaagggaagcacatggtagggttaatgctacacggaacatgaactctgaagaccctcattttggtttccatgaaggtggtgaaggttctccaaataaaagcatttccaataagggtgaagagtagagagcagtgatgtttccaaaaagtttagaattcctccttcaaatgacttcctaatgaatatcagaaggcaatgtgtggagtcacaagtcattggaatggcacccactgtgtaatttcaacaaaacacttcatccctctgagcctctggtggctcatctgtaaattaaggcaaattctatcttcaaatttcttcactctttgatcaacaacttttattcaactttgttgaaaagaacaaaaaaattgcatctctggttgaatttggtggctatttctctggttaatataaaacgtgactgtcagaatcccatctctaaaa

SEQ ID NO: 88720 - DNA, 748 bp, Homo Sapiens
ctgtcatggctaagaaagcaactccaaccaacacactgcaaatatgaaggaccacgaaaggcacgcaggctctggtttgcatagtgaagatgagcgtctgtgttcctaagcatgaaggaggaccacatgagtatcctggacacctactgcatgaatgtattcgccctttcagatctagggacctggtaaccatttattatttgtactctgattttcttccatttctttctccagtccataaatgtaacttaagtgacttattaacactgatggtttgatcaccaatagcatgttccagtttcagtcttagtgtaggtgcccttattacagacttgagataaagtccagggctaaccactcttacaaatttacactttgctaaagggtaccttgggacagagggagtgcagagcagagaaaacctacctgtgcaactgagaaggccgctcaggccacagggacagggcaggaatgctctcaggagtgtcccctgaacctgaacttgatttcacgccatcaccttccacctcttaaccagcatctcctggacagtcagccgagtgtttccatgataccagccatacctgatgccaggagactcgctacacttggaagctcttcaaggtgggactttctgtcttgttcagtttttcattctcagtagtcaacacaggaccttatacttaaaggaaataagtataatgtcctaacaagtgcttctggaataaatgatcatggctgaaatgag

SEQ ID NO: 88721 - DNA, 1538 bp, Homo Sapiens
ggtaccggtccggaattcccgggatcggcagcggctgcgagaggcggcggcacgacgacggtccctcagcccagccaccatgagcaccaagcagatcacttgcaggtattttatgcatggtgtgtgtcgggaaggaagtcagtgcctattctcacatgacttggcaaacagcaaaccgtccaccatctgcaagtactaccagaagggctactgtgcctatggaactcggtgcagatatgaccacacgaggccctctgctgcagctggaggtgctgtgggcaccatggcccacagtgtgccctccccagctttccacagtcctcaccctccttccgaggtcactgcatccattgtgaaaactaactcacatgaacccggaaagcgtgaaaagagaacattggttcttagagaccgaaatctctctggcatggctgaaaggaagacccagccgagcatggtgagtaatccaggcagctgcagcgacccccagcccagccccgagatgaagccgcattcctacctggatgccatcaggagtggccttgatgacgtggaggccagcagctcctacagcaacgagcagcagctgtgcccctacgcagctgctggggagtgccggtttggggatgcctgtgtctacctgcacggggaggtgtgtgaaatctgtaggctgcaagtcttgcacccattcgacccagagcagaggaaggctcacgaaaagatctgcatgttgacgttcgaacacgagatggaaaaggcctttgccttccaggcaagccaggacaaagtgtgcagtatctgcatggaagtgatcctggagaaggcctctgcttctgagaggagatttgggattctctccaattgcaatcacacgtactgtttgtcctgcatccggcagtggcggtgtgccaaacagtttgaaaacccaatcattaagtcttgtccagaatgccgtgtgatatcagagtttgtaattccaagtgtgtattgggtggaagatcagaataaaaagaacgagttgattgaagctttcaaacaggggatggggaaaaaaagcctgtaaatactttgagcaaggcaaggggacctgcccatttggaagcaaatgtctttatcgccatgcttaccccgatgggcggctagcagagcctgagaaacctcggaaacagctcagttctcaaggcactgtgaggttctttaattcagtgcggctctgggatttcatcgagaaccgagaaagccggcatgtccccaacaatgaagatgtcgacatgacagagctcggggacctcttcatgcacctttctggagtggaatcatcagaaccctaaagagtagatggttgccctgcatcttgggctccatcggccgaaactttcccaagccagggtgtgcggagcttccctgtactgcagccaaggtgacgtgtgacttggatttgagtggagttgggcttagccttagtctcattcaatctccattattacagccatggggaagagtgaaagatataaagtaacctaattaaatgtaaaaaa

SEQ ID NO: 88722 - DNA, 741 bp, Homo Sapiens
atatttcatccttggcggcggttgatagaaagacgtaataatgacagagagacagattcttgtcatttgatgattctggcctgcatgtctctctaggaggcatcgttacaataaagtcaagttacaatgtgagtgacatactctaaagttggcaaaaggtacatagacagagtttgaaaacacagaagaaagaaggaaaaccaatagaatttcaggttcctgaagaagaaggaggggctagaattcagaatgtaggagttaagatattggagaagtgaaaatacaggaaatagttactattctcttgtaactagtgaaaatataggtatagattcaagttcatttgcaggtttggagataagaacatatgagaaatgtggtctgatcaacttcattttctatgtaagtctctactataagtgaggaggaccaagaagcaataaagttatttatatctataggaaggaagaaaatggaaggggaatagattaattcacttattaggactcttccgattgcaaatagagattcacaatacttaagcaaaagggagagtttattaaagggatatgtttgtgtgcatagttaggttctagatgaccttaaataccagactgaagatgttagactttattttgttagtagaagtaatccactgaggtctttaaacagcagtgtgatgaaaataaaaacctttttctagaaagaaaaatctgactgaaaatgaacactgaaattaat

SEQ ID NO: 88723 - DNA, 707 bp, Homo Sapiens
ttttccgattacataaagacattcatttattgattcatttattttaaaaaagtttgagtacctattacatggtataggccctagtctatgagctggtcacatcatccctctccaaagagtatatggtctagctttcagtgcaggctttgtaaatagactggcagagttcctcttctagggcttagtttctttatctctgtaaagctcctccttgaagggcacaacctcatctctcttccactcccaggaagggcaggctggaaacctaatagagactccctaagaaacctgcattctatctttccctgaccattcaatttccgtacttccaccagagcccaacttctatcagacaaactccatgctatctgcatgctaactccatggataatctgcatgaaaaggggggaaagagacaaaatcatgttacaaaacttgggcaagggtctagactcaacttgctttgaaagatcttaaatcttcccattcatttgtagacagcagtgggcctttttcttcctctgctctgcacgaccttctagcccaagtgctagtatcaccttttcctaaagacttttaagacaaactgtgaccatttatgtctacatgacacagtttcaggataacaaagtgtgaagacacacaaagacgtcaaacatttatcagagacctacgcgaaacgccaataaatgttacagggatcaaga

SEQ ID NO: 88724 - DNA, 451 bp, Homo Sapiens
ctttatcagaacccgtttccccactctcattctgctgtgtgttgctacaatccagctttggagcatgaactctcacactcccactgtattccttccattgaaattaaagaaatgcaactcatcaaacatttggcagcttcatatctaacgctcacatttcagtgtctcctttgatgttgtaagagaagcagatgcttctacatgagaaagcaagatagggagccatgtatttttacttttactttaactatctctcaatgtgatcaccttacctggattttaggatctttctaaactagaaagactctattgtcacaacgtaatgtctgaaatgaatgattaaaggaagatacccacattatgtgaagtgaattaaatctaaatcttaaatctctatcataaaattactctgtaatgaattaggagtttcaattaaaacatgcaaaggaaa

SEQ ID NO: 88725 - DNA, 547 bp, Homo Sapiens
aatttataaagaaaagaggtttacttggcttgtggttctgcaggctatacaggcagcatggcactggcatctgcttggcttctgaggaggtctcacaaagctttcaatcatggtggaaggcaaacggggaacaggtgtctcatatagcagagcaggagcaagagagatagagagtggggggaggtgccatacacttttaaatgaccacatctcaggagaactcactcactatcatgaaaacagcaccaagccatgaggaatttgcctgcatgttccaaacacatcatacaaggaaggccccacctccagcattggggattacaattcaacaagagatttgggctgggtcaaatatctgaactataccattccacctctggcctctccaaatctcatgtccttctcacattgcaaactacaatcatgcctttccaataggcccccaaaatcttaactcattctggcattaactcaaaagtccaaagtccaaagcctcattggagacaagggaagtcactttcacctataagcctgtaaaatcaaaaac

SEQ ID NO: 88726 - DNA, 459 bp, Homo Sapiens
acaacggcaagacagtgcctatactgcctctacagttaataggaaaaacggaagaagttacccttaagctaggatgttgctcagaagtgaccatcccaactttggtgcgggcacaataaatcagcctaaatgtccctaatttaacccagctcgttataatgtcattaaacatgacattagcattgtggttttagcacccccatgggttttgcttaggcactcatgggtaataaccaagatggagtccctttggcaaaacttaggcatgcacagctgtagtaccccaagaagaaaatgttacttctctcatctgggcaaaacccacagaagacttcccagcttctgccacataaaagacacagaacacagacgccttactggcaacctgctttcaagacccctgtctttgctgagagctttcctttttcccaataaattctactctgccctactcaaaaa

SEQ ID NO: 88727 - DNA, 565 bp, Homo Sapiens
catagggggttgcttcataataggagggagaaccacaggcaactgttggccttgaagcttcagtttgatgagtttcatagctatggagaactcttgctgatccatcttcccatccttgtttaggtctgataaagcccatatttcagctaaaacaggggccggcagacctgattgtaggaaaaaattacgtgcttgatcacctgttatgtaacctcctgaaggtttgaggttatcaaactgcctgtcatgcttagtacgttcttcagaggtaatagcccacatgtttggccctccattcatagctgtgggaaactgagccatcatggtcctgagttttccttgctagctctcagccatctggcgccctcgccgcgcctcccgcacgtcacagcgcgactccgcgtccctcagcaccggcagcctgggcgcgggcaggcgcggggagaccctgctctgccgccgtcgccgccactgcagctggcttggtcgtcaggccgccgcccgcgaacctgttgcgtagcctgtcacagccgctcagggctccgccggcgccgcctcagcccca

SEQ ID NO: 88728 - DNA, 484 bp, Homo Sapiens
tttttgccctttttcaggctatgtgtttattaaacacctttttgcatggaagctttcacttcctggttatgaagggtataaatgacaggattcaacaaaggaagaatcactgtgtggaagagagaaaccaccttgtcggctgggaaagcccagaaggggcacgtgtagatgaagatgccaggtccaaacatgaagaatataacaatgatatgggtggtgcatgtggacatggccttgttttttgcctcagaagaagacgctcgtatgcgacaaagaatgactgcataggaggccagaagtcccagaaagcacatgagtgtcatcaggccactattgaagaccatcagaagctccaccacaaacatgtcggtgcaagccagcttgatgacctgtcggacatcacagaagaagttgtccagctggtttgggccacaaaaaggcaagcggatgatgaggaccacctggataatggagtggacaaaac

SEQ ID NO: 88729 - DNA, 540 bp, Homo Sapiens
  misc_feature (46)..(56): n is a, c, g, or t
gagtgttcagtcaagttatctgtactgaccagaagaggaatgtcannnnnnnnnnnctatttattacttgaacattactttaaagtgacttataattggagactgacaaatttgtgttttcttcaaacagatgaaaactttattctcaaacatgacagagcgttccttttatcaatggcaaatcgagggaaacataccaatggttcccagtttttcatgtgagtaggcataattcagagatgagcttttcttaaacagagaagcgctgttcataagaaagatggtatagttaaaccaagtttaatgctaaaattctgtcagctttatttttattattaatttctaatatcatagtaacttataaggtctaacaactgcctcagcattcagcatatatcctgaattggaagaatgggacttaaaaaatttaaaacttatacattgttttcaaaatatgccgtcatcttcagaaaagatgacggcatatttaagcccctgtcaaattcgagtgctgactttaccaaaaccagattggtaaca

SEQ ID NO: 88730 - DNA, 298 bp, Homo Sapiens
  misc_feature (78)..(127): n is a, c, g, or t
  misc_feature (161)..(193): n is a, c, g, or t
atacaaatagtgttgttatcagtttaaaataatgggttataatatagtgtttgcaagcctcatggtaacctcaagccnnnnnnnnnnnnnnnnnnnnnnnnnnnnnnnnnnnnnnnnnnnnnnnnnntgttattattattattatttgagactccatctcnnnnnnnnnnnnnnnnnnnnnnnnnnnnnnnnnccggctttgctgcttttaactcttcttccttctgtgcctctctaagtgggtcagtatcctaaggaagccttcttatttatcttcctgcaaacaagggttacctga

SEQ ID NO: 88731 - DNA, 573 bp, Homo Sapiens
ggggaggcaaagccagggctccggaaggtagtcagggttctaattccgagtcaccaccacagcggcctcctttcagcatcgacctcttcaaagaggaacagctgctggccttggaagactacgtggtcaacacttacttccgccacttcaagctctataaatacgtcttcacaccccaggtgcggctggatctgtctttgacttacatggggctacagccacccaaactgtggccagagagtgagacggagaaagaagaaagcaaggagatggaggagcaggcagttaccccgcagaaagaggaactagagacagtggccccaccagagccagagccaagccacatccacgtcctccgagcctacatcaagacccaagtgaacaaagagctggagcagctccaggggctggtggaggagcggctcaaggccagcgaggaaaggctcagcagcaagttgactgcactagagcggcccttccagctacctccgggtaaaggcaagagcaagaccaagtgacccccaacattttccccaataaaggtctgggccagaatggcaccatccctgcata

SEQ ID NO: 88732 - DNA, 579 bp, Homo Sapiens
  misc_feature (340)..(353): n is a, c, g, or t
ctttaccacttagagaccttcaccatcccttatcagtgacatggagcacataatacttcctgtctctgcctggcacatccggtgtgacaacaaagtatgctctgcatttagctcaacctatggtaactgtgtagtccacggaaactgctcttgaggccagcgacattttgcgaaacattcatttccagggaagagtccttgaggatgtagtataaaaatataatttaatttggcagacttagaaatttatcctacatcccacagtaaccatgctttgtgtcttctgaagccaagtgagaaagcaggcatttgtctggttttccattggcatcctgctcannnnnnnnnnnnnnttgagaagataatttgcagcttagttactgggctgaaaatgaagctcacttgaaagacatgctccacctggaggtgaagaacagccttgttgagttctgggtgccttgagatctcataggcagaatttctctgcgaatactgcggatctctaaattgttggatcttccccttttgggtgttatttgtattatgtaactgattattaaagaaaaactattagctaaa

SEQ ID NO: 88733 - DNA, 320 bp, Homo Sapiens
ggtgatctccaaaaagcctcaggcgcatgtcaccacagtaagcaattaacatgtggtaggaacctgtgtggaccattgcttgaatgggcggccactgatccatcatgcgaagcctcatcttctctaccattcctttcatttctgtaccctttttttgtatccaaagtactgcctagaagaggatcagagatgaaagcctgactgtggaggtggatcattttccaaagtgtggggtagggaaggctgaatattcagatccctgttccctctggtgtgactaaggaaagactagacagcttgactttaggaatctcctagta

SEQ ID NO: 88734 - DNA, 540 bp, Homo Sapiens
gaggcaaggtttgcaggagaaagaggaattgagaaatggggtatttttgctatcagctcttctgctatgaagtagtaaaaggcagtctataattaactgacagacctaactgaagcacagagaatacatcagacttatgcatccaagacatcagaacttggattttatcaaacttgatgacttctctaaaaggagctttggaaacttcaaattcagctataggatagtaccaatgaacacatccagctgatcccaaaagctgttttcaggtataaggacaaggagaggagacaagtgacgacagccattcccctttgcagctatctactgtagtgacagccatttcttggttgatgggttggaagtcatcagaggtttgaagaattacactggcctttgtttttctggaaatgccgaccatggagatgctttagagtcttctcaaatagcttagatgttgtaatgaggttagctttgcttcataaaacaggggccctcagaagttctccttaaatttttcaataaaaatttagctcttaa

SEQ ID NO: 88735 - DNA, 524 bp, Homo Sapiens
gcggccgcagaggccgaggaggctccggtccggccgcctctgcggacccccgcctctgtgtgtgtcacggtctctatggagatctcccgcagaggacagcacgaacagttccccgcggtgctgaggcctaactcgaccgccgactggtgggagttcttccgtcgccctagccgtagctgccgcagttgaagccgctggcgacgcccgcctacccctcccctgtgcgcacagcgcccgccccgccgccgtcgtcgtcgtcgtccctgcagcctccgccgccgttgcgcctattacccctgctaaggcggctgccgcggtcgcgagccagaatgtcgtcactcatcggcgcccgacgcatttgcatcatcatgctgcgacgagctgataggcaaagaggaagggctggtcgagtccacgctctcggccgcgcggcacgctgggaaacgtagttcaacaacggaacgcggcttctcggaaaggaagagggacggggaaggagatctccggggcgccgcagaggcaca

SEQ ID NO: 88736 - DNA, 537 bp, Homo Sapiens
caaactggaaacaactcaaatgtcttatagaagataaatggataaacaaactgtggtaaatccatacaatggaatactattcagtaacaaaaaaagaacaaaatactgatacacataacaacatggataaatttcatttctgttaagtgaaagaagccagacgtaaaagatacgtactgtataattcttttatgtgaaattctagaaagcgtgtaagtatagtgagagaaagcaggtctgtggatgctcacagccaggaaagaaggggttacctataaagggcacaaatgaactttggggggtgatggaaatatcctataccttggtcgttgtggtgattgcacagctacatacattgatcaaaactcaccagacgtatacctaaagttggtcaactttagcctatataaattgtacctcagtaaagctgatattaaaaatcaatcacatggctatacagcagtgtgaatgtacttgatgccactgaactgtacaatcaaaatgaataaaatggtaagttttatgtcatgtaaaaaa

SEQ ID NO: 88737 - DNA, 477 bp, Homo Sapiens
  misc_feature (266)..(276): n is a, c, g, or t
aagctttatctttccttgtgcatcctgaccaagaaatatctttgattatgattaatgtattatgtcaaaatgtaggctagttaaacttttgtaaagttgcctggaatgtcatttgttaggttataaacacaagatctaaatgaagggttttatgtgttgtgtacaaatcttattttgaaatggacaaacttgtcattacatttgtaaccttgtacagaggatttttcactatgtgcctagcttggtgtccattcagctaaaattgnnnnnnnnnnnggtgcatgaagagttaaaaatcaaagtatatgtagagatgactattttatattacatgacccaatcctgtatttatttctaccccctttttgaaagtatttataaaactagttgaggacagctgtatttttttgttgaactatttagtagaattgtgcctttttgtctgtatgtgaataaatgctgtacattttgcaatac

SEQ ID NO: 88738 - DNA, 538 bp, Homo Sapiens
ctgggggctcccggcttttctctgtctgcagtgtccatgctcgcatctcagcctgccggattcctaccctcctgccaagactagcacaaatgcagtctcctcgctgaaatctctgtggttcctgccacctgtaacccctcctttagcatttcgtcacctgtagagcgtttgtcactgttcatctggtattaaagattccacattctcatccatttcatctttgcatcccccacgaggctaagtgcagggcttggtactgtgtagatactgcttatgaatgtgtcttgtcttgtcctttttgtctgtttccatcatctgaggatccttcctctggggggttgacatgccttatttctaaaatggccgaccggatgcagggcagagccagattgcaccaggaccctgccatcgatatagtccccctcacccacccccggtgttttgaggattaaataaattaatgaattaaacgagttagtagttataaagtgttagcacctattaagcattataaaaataaatttgaaaatgaccagca

SEQ ID NO: 88739 - DNA, 861 bp, Homo Sapiens
aaagagacctacaaaccctgccacaaatatctccaaccacactcatcatttccgattttcatcactgctgctcctgtgcaaaccaaactatcctttccctggggcatcctaggtagaggccatgccaggacaaaggcagagatatgcctgcctggtaaggaaatccattttggccttgtaattctcaccctctcccaagatgtttgcctcaatatctccttcccaccttaccccgtcttcagctagccaaaacattccctggtatttgaggcccttccaatttcctcctggttttgtgggtgggagaataaagaaaaaactgcactgttcccacccacatagttacagccactttatcaaacagaagagcagtctggagccattgcaaaacaaaatacctgccacaactcctctcttctcatttcgactccagcttttcatcttagcaaaaaagttgcaatcagcaccccctagacggaaggaatatcctgtcttaatgggagtccataggaggctgcaggctgctcccctacagagactaacatcaaggtagttgcagaattcagattctaattacagtgtggttggaggcggggtggattccagggaggtcaggaagaggtaaagtacagaattgagctccttgggaggaggtcataggaactttgcagtatgaaaatggctagagattgggtagaattgagcaggctggcaatggcagttttgtgtgggtggtaggacctaggattcaaacttgagggcaaattgtggagcacatacgacaaatgatgtagagcctttcctatttcccttcctggtgtgtcatccgaaacaataaataataaaaaattaacaaagaaa

SEQ ID NO: 88740 - DNA, 553 bp, Homo Sapiens
  misc_feature (42)..(114): n is a, c, g, or t
aaaatgcaataaatttattatgaaaaacataatttattgagnnnnnnnnnnnnnnnnnnnnnnnnnnnnnnnnnnnnnnnnnnnnnnnnnnnnnnnnnnnnnnnnnnnnnnnnngagaggaaatggaaggggaagactgagagagccatcgcacagtgacgcaggcctgaccctgagtgaaggacagagggaaggtgttcaaggtggaagtgtctcagactgcaatgaagttctaaggaaagtttggcaaggccattgaggagtccttgagtcaaagtcacccatcggaagagtatcacttatcccaggaacagtcctgtcctaaaatccccgttgggctcagttattggctatgagcagcgtatgggaagacagacctcggagtaaagggcaatggatttcaaagctcaggatggatttcagaactcagcagctggactgctggtaaattacaatttcctcagtcagagatctgagaagcacattctcatggccacacaccctcccagcctagccaatacatagatgaagaaggataaattctacaaccttt

SEQ ID NO: 88741 - DNA, 603 bp, Homo Sapiens
tctcctgatgccctgttacagggtttgcactgactggagcagaaacagcaacctttctaaaaaagcaaacctttttcctgggaggaaaatgccagagcctgagccaaaattcttatgacaggtaacatttgggtgttaatgtccatgagagctgacagggccatctctgagcccatataactgtctggaacccccaaatgtgtccacaggttgaatgtccatgagtgtgggaagaacacggctcatctggagcacagctgaggctagtaagagctaaatgactttccttgctatgacttggcttacctgaattagctgtaagagttgccgaatgggatgggttctgctatttaataaacagcattcatattcatttttccccagatggagttacctacctttccacatggtcagcttagaaatcttcccctaaagatgctaatttcctttgggctgtctcagaacacagtatccttcaaataagaaaaactgagtgggaagtgcagtgtttccaaacaatacctatcataactacgtattcattgtttacctgctaagtcaagggttcactgcatttctccttcctcagaatacactttggac

SEQ ID NO: 88742 - DNA, 1273 bp, Homo Sapiens
  misc_feature (1194)..(1228): n is a, c, g, or t
tttcatgaaatattttacttaatagccaggaatgactgaggttaaaaattgtgccgggcttataagtatctctttgatctggccaacagctcttcctctcttttctaaaaacttcaaaatgccctcatttctattttttccctttcagttaacaagtttagtttaaaagtgcacacttatggttcagtacaatgggctttgtctagtagtcacagatgctgagctatgaatttcaatggatccgttagctttactactaagatcttgctgagatcagagaagggcttctgggcaggctgagcactgggggtgtgcaacatggtaactctgaataagagaaaccctgagttttactgggcaaagaaagaacaagtggtaggtatgatttctgaacctggaaatagcgaaaatgaaggaaattccaaaagcgcgtatttccaaataatgacaggccagcaagaggacaccaaacctctagaaagaggtattctttcttccagctactgatggctttggcatcccacaggcgcattcctttggccttcaggatcttagatgcagatgtggagagtcaagaggtaggctgactctgagtcttcagctaaattctttggaaaattagtttaaaaaaaatacaatgtataacatttaatgttctatgtggatttgctcctctttgaacaaagcagagcccaggagtttctggataaatacatgttctggtctagttacaggttctggtaaatcagatggagaaatgttgttgcagaaatgtcagcaaactttacagcagtagttcacacaagcaactactatacattcattcattgctattttcctaagaaatggagcaacctaggagcttatgctacagtagattccaatgaaccataatgactacttcaagaacaaagaagcacatacaaaggtgtgatatcttcctgttggtttgagttttcaaacctgaaattctttaaaatacatttctgggattttatttaaatattgatgcaacacacctaaaaagcagtgacttcttggtaaaatgtaatactgaaatggaaaattgtcttttcaaaaaaataagaagtgtggttggaaattaaataccttttaaaaaattaaaaataaacacactctcaccccggccgtaatggccgaattcccgggcatatgtccggtaccgtcgactgnnnnnnnnnnnnnnnnnnnnnnnnnnnnnnnnnnncggccgcttcctcgctaactgacttcgctgcgctcggtcgggtgt

SEQ ID NO: 88743 - DNA, 377 bp, Homo Sapiens
aaatggagcatggaggcactgtgggctatgatagactgtcttcaaggaaaacaactctatgctgtgtccatggctccagcaccagaacagatagtgacattatatgacgatgaacagcatccagttcatatgccgttggtagaaatggggcttgcagataaagatgaataagtgcctaagtgtatacagtgagagcatctatagaagcctagaagaattctgttatgtttagactatgtcttatctttagactatttcaggcttaattttcctaacttgttcagcactagtgctttacctctcatttttaattgaactgttagaaaatcgtcccgggaaaaaaagtaaataaatagtaagcaaaccgaagaataaaa

SEQ ID NO: 88744 - DNA, 491 bp, Homo Sapiens
ctgaaagggccctaccagttaagggatctcttctaaataacaggcaacccctagatccaagtagttcagtccaggaagactgggagccaatcactcttgaaccttgtgggcaaacagtatgggggaggaccctcttgacaggccttggtaggcaagattccaacacaggaagacagcaagatggggcctagagtatggggccctacatgctgttaaggttgtggttaggaatggtgcaatgctgcaggagctggaacaaagctacaccaaggaacagagcacagagcagcaggggccgaaattgaggaggccttaaatgctttgagcttttgccttcagtctaaagctgtagaatagggggttaagagcttaggctgaccacagggaagtttacaagctagagcgaatatctggactgctaatatctgacaacagtaggcgaaatttactttttcttcaaatacacattttcaagaattgacacccaagac

SEQ ID NO: 88745 - DNA, 760 bp, Homo Sapiens
tgctaactctgttctctgtgtagctgcttttggcagctcctcatctctcttctaatccaccactcacagtcctagagaacagaccacaagttaagaccgtcacctacagaatcccaagggccaaaactgggcagaggacaactccatccttcttacaaaagggcttctccacaagaagcatttccgttagactctagcagtgagataccctgcttcaagaatttctcatggagccagaagcctttgaaatttgcccttatgatcctcaccaccgaatcccactcagcagattccagtaccacctggcatcgtgcaggagaaagaaccccaagaaagccaaaaagatggccacctgcaaatacaacgcctgccacgtggtccccatcaaaaatctggaggaacatgaggctgtttgtgtcaacaggagcgctgtggaagaagaggacaccgagaaccctctgaaagtcagtcctcctagttcagagcagaacgatgacacccagcaggtctcaccctgccttcccagccccgatatctggaatgtcgatggcgctaattgccagcatgtgtttgtccttaagactttttttcctcaaaaggttgtttgtgaaaatgacacgaaagagtcagcaagagagaccagtccccagaagatcctcagaccaggacagtaaactgccagctgaggaaggagcacacgcctcatcaatgcatggaagaacgtgcaatgcatcagaataaaagacatgcaaagtaaact

SEQ ID NO: 88746 - DNA, 503 bp, Homo Sapiens
  misc_feature (212)..(242): n is a, c, g, or t
ctttccagtaaattcttaataagggcaattatttctttatttgcatagactacaggaattattcacatcatctttcagatgtactttaggcatctgcattttgtctgagatgtacattcctactgttatcaaagtccagcgggcgacagaatgagaccccaacttaaggaaaacaaaaactgtaggaaaagcaatccaaagaagaacagaannnnnnnnnnnnnnnnnnnnnnnnnnnnnnnactatctcttctttgggtttctttgacatcaccactcctgtgagaattgcaagtgacacaaatgacctaaaaattgggaaacaaagttacaataaaatagggcatgagaatggagaaggaggtaaaggtgaatggagatcgctactttttgagccgagacttgggaaacaagaagagtcactctgggccatacaacaaagtgactgtgactttctctcccgcatccctttcactctgtctttccccatcctttgagggccc

SEQ ID NO: 88747 - DNA, 527 bp, Homo Sapiens
ccctctcaataataaagctcaaatttccttatcggcgggttacttcagtatttccacaaattttttaaagacccttcgtataatgactggtaatttcattcactgaaaagacagttctgaggctcatacaaagagctttttattatctgagacagacctgagaaattaaggaacctgcctaaaacatcatttccaggcagggaaacaaacacctcgcacctggggttctgaacggagaggcaaggggggaatggctaaaaatcaacatattttctagttgcacccacagtcccctcattcaagtagtgagagtcgagtgactgtcagcactgggcctcttgtccatcttcctgcaggactgtcagcaactggagggcacagacggtttgaccattgagtgccggtttcaacaaatgtccaccaacgaaatgaagggaatgtatgagataaaatgactctcctagtgtcattcaggaagggccatattttctgttgagtaaagcaagccctcatttttttctgcaatc

SEQ ID NO: 88748 - DNA, 456 bp, Homo Sapiens
aagcggacataacactttctcagcattggtcatcggttggattatattaatggaggaagaaccccactaaataatcaatgtatcagttagctttttgctgggttgttatcatgctgcccaaaacttagtgacttaaaacagttaacgttttaatccattattctggtagttgtttgggatggctgggatggatggcagaaccttcctaatctggcccaggggatttattaacctattactgtgtaacaaattaccctaaaatttagcaacttaaaacaacatttattgtcttgcagtttctatgggtcaggaattcctatggctcaaaagatgcctctggctgaaggtccctcatgagtcaagctatctggcttacagtcaagctatttggctgtggtcctcatctaaaggctaaactgggggaggatatgcttcaaagttcactcatgtggacct

SEQ ID NO: 88749 - DNA, 1122 bp, Homo Sapiens
  misc_feature (990)..(998): n is a, c, g, or t
gaaatgggagaacctcggaaatgttgtctttggggggatcacgttggccggcgtaaaagggtagttcccctgatgcccccaatatgggagaaaagggaggggaaggggccccctttgtccccgccttattggttggtgccatgtttgccgaacaccccaccgtggaaggaataccccgggaaattattttgtaccggaaaattattgttcctttctccagtccaaagtgcaggaaaaaattttcatttaaatattcagcacgggaatcatagattcccaaaaaggtggtcctccaatcactgccagcaaatgcatgattattatgaagatttgcacttcagtcacatcaattattccaaatcgcaatgttccagaaacatacgtttgccagtgcgcacaatagaacataaatgtccccgcaaaacaacaaaaaaacatccaatcagggtttgtccccagctgcactgcaatacaagttccaagaaccacaaaaactgttgatagtgaatcacagccatgatcaaaaagttctcccagaggagaactactattggttcttcttgcctgtttcccatcaatagcatccaaagactggtaaatgaaaaggccacaggcacaagcaatatatgcccacagaggtgcctgctctgtagctgtagggcagtagaagactaataaaatagttgtacagatgtttattgacagtccaatgatggtgatgagatttggggcaatccaggagggaactcttctaacgagccattcccaatacccttgcattaagggctcaagcagggaccgtccagcactttgatatctgtgttcttctagccgctttagttggtgtcttgacaatggtggtgttggtaactgaaacaatttatttaatacacatcctgtagtactcatatgcccgaagcccactggggactccgggtgagaatctccacatcttttccttgttgatcgatgcccactcatggatcttgnnnnnnnnnaatatttaaagacagtaatttcccttcttttgtaggtttttgtggctggtgcttaccctgaccccaacaagtacacccctagaaatatcgcctccgactccagccgactgggtgactgatcggc

SEQ ID NO: 88750 - DNA, 762 bp, Homo Sapiens
atttacaatgttcaatttctgaatgatgtaatctggacatcttttgtgctggttgatctttacaacaacatctccaaaagcccgagtgccctcttccattgacggccagtattctgcacacttgttcctgtttccttcttcacatcgagtgaccatgacaataactgtggctttctgttcccaaatcatcctccagaaatcatcaacagtttcatccctgggaccttgtgcagcaatgtatttcctgggttctttgaaaccatcaatatagctggcatttatgtagtttgaccctgcatctccgtttatctcagagagttcaacacggttataatcataaggaagaatgtcaacataacggtttttattctggttaaagggctttcgagcttcctttataggaaacttgctgaacacccgcgggatgctctgaaattcagccagaaaaagtcttccttcatcagcaatcttcctcttataagtttccaacaaaatatctgcatggattggctccacattcatcagttgtttttcatcatccctttcaacaagctcctgctgttcatctaaattgcaggatcttttcttatgtagatcatagattttgtagagaacaacaagcagggctattgatgtcacaataatcagaaatgccagaaatgctatcagtgccttagaattataagatgttgaatgatgtaaaataaagggttctccaggatagtctccattgtgaaaataggccttaaaagtgtagtctgt

SEQ ID NO: 88751 - DNA, 668 bp, Homo Sapiens
agatggctgcaagtgtaatgcagggcatcccaacatggaaaaattcagatggctccgatgaagagaaggccttgttaacacatctggataatttgaagcagtactagttgttgaaggttcttctgtattactgactgctggctcaggtgtgattctcccatcagtaatattagagctctcctcatcggcatataccagatggtcctctttattttctggccagcgtggaacctcgcttgtgtctgttgaacagctgcatacatcttcattcttgttgaagtatctttgtaaccaccctggcacaatattcttaacagattctgtaaccctgctaagaatgccctgatgctgttgtcgcccctgctggtaaggcttaattggcccctggtggcaacgccgcgtccggatcttgccgccaccgccccctccgactcctccggctcccgaggccatggcggagcctccgccgcttcccgctccggggcgggtaagggggcgggagaggcagaggcggaggccttagagagcctcccccgccgcccggccccggcccaaaagtccgcccgcgctgtccacacagtgggcacaagcaccccaggaaccgcgaggttgcgagcaggagcggagagagggtgagtgctggcagcggggaagggggtggcggccgc

SEQ ID NO: 88752 - DNA, 451 bp, Homo Sapiens
tgcgaccgccacccccttccccgctgccagcactcaccctctctccgctcctgctcgcaacctcgcggttcctggggtgcttgtgcccactgtgtggacagcgcgggcggacttttgggccggggccgggcggcgggggaggctctctaaggcctccgcctctgcctctcccgcccccttacccgccccggagcgggaagcggcggaggctccgcaatggcctcgggagccggaggagtcggagggggcggtggcggcaagatccggacgcggcgttgccaccaggggccaattaagccttaccagcaggggcgacaacagcatcaggtatgggaccccgacgccgcggtggcctggcgggtggggaaactcggctggaggggacgggcggttcgaggccccggcgccccacgtggagcagacaggagggcctgaggaaaggcccgagtga

SEQ ID NO: 88753 - DNA, 503 bp, Homo Sapiens
ctggagacctggcccctgccctggctgaggacgggcctcccaccgtggcccctgggcccgtgcagtccccactgccgctgtcgcccctggctggccggccaggcaaaccaggtgcagggccggcccaggttcctcgtgagctcagcctgacgcccatcactggggccaagccctcagccactggctacctgggctcagtggcagccaagcggcccctgcaggaggaccgcctcctcccagcagaggtcaaggccaagacctacatccagactgaactgcccttcaaggcaaagacccttcatgagaagacctcccactcctccaccgaggcctgctgcgagctgtgtggcctttactttgaaaaccgcaaggccctggccagccacgcacgggcacacctgcggcagttcggcgtgaccgagtggtgcgtcaatggctcgcccatcgagacactgagcgagtggatcaaacaccggccccagaaggtgggcgcctaccgcagc

SEQ ID NO: 88754 - DNA, 819 bp, Homo Sapiens
gggggccgcgggtggcgcggagggaggccttgcgggcggatcgggcgcttggcagcggaggtggtgggaggcggcgggcgggagcgcgggtcacgccggccccggcgatggcggacgcggcggcctccccggtgggcaagcggctgctgctgctgttcgcggacactgcggcctcagcctcggcctcggctcccgcggcggcagcggcgagcggagatccggggcctgcgctgcgcactcgagcctggcgggccggcacggtgcgggccatgagcggggcggtgccccaggacctagcgatctttgtagaatttgatggctgtaactggaagcaacactcctgggtaaaagttcatgctgaggaagttatcgtgcttctgctggaagggtctcttgtatgggcgccccgtgaggacccagtccttccccagggcattcgagtctccattgcacaatggccagccctgactttttactccccttgtaaataaactgggtttgggttctgtgggtccagtggaatatcttctggatcgagagcttcgcgttcctgtcagatgccaatgggctgcatctgtctccgatgggaaccgatagccaaaaccagattcttttgcgacatgctgccactgaaagaaacagttaacggctttgatccgtgaccaaaagcgtacaagagatatttcggccggaaggtcccctacagtggtttcagggccccggggtcacaaaatatatcccccccacaggggggaaaaaagggctgggcttctattgggggttggcgaggccattaacggaccttcccattcactccgg

SEQ ID NO: 88755 - DNA, 557 bp, Homo Sapiens
  misc_feature (195)..(203): n is a, c, g, or t
tttttaaaaacctgcaaagatataaatttagccaagttacctgacgggtgagaagaaaagagcaggcaaaattagtgatttttttagaagtctgctaaatggatatattgtgtgtgttgctgttggaaatagccccaacccatcctcccaatccaaaacgtaactgaaatataatcagaaacattaaagcctgtnnnnnnnnnttgctgcgtttttggtaaagggtgtaatttgtaaacagtgcaatttaaagtgaccttagtgatgcagagttcctgagtggtgtttgtagaatgagtttatcatacattctttctactactggaaaaaaatggatgcagtctggactgttgtaaccttaggttgtaatctgatttggaaataagtacatctttaaaagttgctacagatttgagttcatgattttgttaaaaattgctatggagtactttgttatataacagaagccatcctgaaatgaaactagtctaaaaaaattcattgttctacttagttgcagctgtacctgaaataaaaatgttattgatgactgaaaa

SEQ ID NO: 88756 - DNA, 522 bp, Homo Sapiens
aagtccatcacaggagggcatatgcacaaagacattaaatgtaaaagaaatggcctgtgctgagcaacagagaaagctgtatcagagataaaaccaaacagtaagcttcctatgacacagctccagtggaagaagagaaagcaccacctcattactgcaaggtggaaacagaagtccaagagagattctttgttaccacttgacatggatgggaatctaggcactccctgatggagagaagaaggactgcctcattatgctcaccatgtaacctacaatagcaccatggaagggggatgtggacgtctgttatcactgggtggttgtgaaagccctgactctattggcttctttggacataatgccagtggggagggggaagaatgcctcattaatgccatctgtgggtagaaatccaggctacccactttgctttttgatagtgtggtgggggatggggccacatatttttttctgcgatatttagcagaaatacaaagcagttaataccaacaaaaaaaa

SEQ ID NO: 88757 - DNA, 373 bp, Homo Sapiens
agggaacggaagtctctggctggaaaggggaaataagtgactatatctgggctgtagagtggttgaatgttgccttttcctaagccacccatggctctgccctgcctcatcctgtgcctagaaagaccccagactcatctggcagagaggagaagccagctggatgaggggacgaccatggctggatgtcagagagaagcagcttgtcttcagagggacagcttaaggcgtaacttctgagacgaatctggctggagatagctggacttcaagggaagactacataccggcctgtcccacccccctcttttcagctcaccttccctctgaaaaccaccctgaccagcaataaaatcccaggcatttgaccttt

SEQ ID NO: 88758 - DNA, 970 bp, Homo Sapiens
atcctgggcggaggcggcggggcgccctacaaagtgggggcctagacaatttgtgcgccaatagaaaccacatgcgtgggggaagcccctcccctttgttgccaagccgggattccaattaaaaccctcaggccgggaggagaaaaagggtcccgcaaaggggcttgtccaggggcgttctgtttggttccccctgcgtggggggaacaggagagggagtgggtgacgccccctgggcctccagagcctggctatgctttgtgctgtggcttagccggaggggacgtggccaagggtgaggtggccaaaaccagaaccagcagtctcctgccttgttccctccctggccctcaggccctccttccagggatgtctctccagctctactttatgtcctgaagctgacccgaggtcttcctatctggaatgactagagggagccaagaggatggggtgggggccagggccccccagggcctatcgtgggagagcctgggcaggatcccatcagaaaggtgctgactaaactggttgcccggacactcaacagcctccacctccctttctaccctcacagctcctggggccttcctggctctggcccagaaagtgattcatttgtaaattatcatggttttctttctgcattaaaatgctcatttccggactgctgtgtcttgagtgacaatggtgaggaactgacccctgcgtgggggctgaggggtgctgtaacccctcctgatatcccccctccacctgggcttcatgctgaagtcaaggtagccgcctgcacacatcctcctgtgcacctagctccgaaggctctgggcagggccccctatttctctcactcagcttctgtgcctttgactctcttagtagaacctaccagttaaacccggtaaagcactgcttagggggaactaggctgcggacgcgtgggtcgacgatatcccgggaattccggacc

SEQ ID NO: 88759 - DNA, 497 bp, Homo Sapiens
aagctcagatcgtctcatctttggcagcactaacaccagaataacactgatgttgccatcagcagtcacacgactgaaacatgaggactgccctgcacgtgctgctccgcagcctgctgatctaacggccgcgcccgcgtctgttgcttgagtcaccacggctgttacatcccgtgctctcccttctctgccttcttggtgttggttctgcgggcgactgcccatgtggccctcagccccatcctctgttcatggctctctgccactcttgttgtccaaagctctttctctgtaggttccatgggaagagctcatgggaacatgatcttcgacctcatgcttgctgatcatagtttattgtgccttttatcgttgatggttttgctggttacaggattcttggctgacatttccttgagtgtcttaagttattccatattcttctggcagagagttgccagatttagcaaaaacaaataaacaggaagccccgaaaa

SEQ ID NO: 88760 - DNA, 1228 bp, Homo Sapiens
  misc_feature (817)..(817): n is a, c, g, or t
gggaggaatgatgacaagaaaaggccgaattgcagtgtctccatcagcagtttgctctccatgggcacacgatgacaaaatatcctgaagcgaaccactagtctgacctcagtagcaggattggaagcttcatgccatgggagctgtcaagaaaggcatcccaaagagaactgaaatttaaaaataataatagaccttcaggaataggtgattgtccccatatactggggatgaaatacccaatgtaaccaaattccccagtaagatcacttagtttggcaatagtcttttcttttgagcatgttgaagtttatttgctcaatgaaggctgaaattataagtcagtatatatgtattactaagtagaacttgaggtaattatatgttttagtcaaaagcagtttctgtgggcttggtataaaccctactttgtgatttgctaaagcacaggatgttgactcaaaccaaaactagttttgtagttaatatgtgttgtgtttctgtgacttaatagtcaactagaaacgccacctacaacaacccaggtacttaagttttaaaagttttttttaaaacacttgtcaccatattttggaaaaatactaacatttggattactagttataaaagtgtaatttctactgggtcataatcagccatgcagctggagacttggccctctttgtacagcaaagttgtgaaaaaaagtatttgcactacatttatttaaacattagggaaaaaagccaacccatgcttttctttgccgagatgtagggctgtattattggctagtgagaagcctgggaacactagngacttttgtgtgggctgattgcaggtatcagatccgggattatacaggtactgttggaagtatcttggggattttcctgataagaacagtagtgattgcataaaaaggacaggatgtaaagtgaaatcagtaaaatatcttagtagacagagggtgctgaaattttaacaaatgtgtaaaaagttcttcctatgcattaattttccagatacccttaaaatgtttaaggaatgtaattcaaaatactgtttaaaagagacatgtgaccatcattctcccagcgaatgtgaatcatttagtgtgctactcaaaattaggtgtaaatgtatatgtacactataagaataaaaatcgataccatttctttaaagctttctaaaataaacttaattatttctaatagttaaaaaa

SEQ ID NO: 88761 - DNA, 262 bp, Homo Sapiens
aaacatctttaataatttgaatcatcttggattctatcagataatacttggaacaaaatcttatttcaatcagctcaatctatacaagttataagatgcaacacaatgtaaaccctatagtctacagaatatgcactatttaatactcattaactaaagaaaagtcaatgaagattaccaaataggaaacacaaagcattctaaatttttaaatcactttagggtagctaaccagaaactacagaaataaaatatgcacgac

SEQ ID NO: 88762 - DNA, 749 bp, Homo Sapiens
tttgacagcttgatactttaatatctattaggcagagaataaaatatcacacaaaaactgaacaaggcaagtataaaccagatgacgactgcttgtagaaagtaggacatcacttccagcaagagcaaaagatgtgtctttttcctcatgtctagtaagattggcacttttctccttgggctcagtggtctaatgaagtcatgaaagtgcattcagcccactgaacctgaatctttagaaaacacacctggtatcatatactaatacttggcttccaaaactattattccaaaggaaggcggaaagtagaaattgtgttgaacttagtcccgtgactcagcagaaaggtgaagactttgtaaaacaaagccaccaatgacacctgtggttcccattgtcatcttccatcatatgcaggcgaagttcttcaaccttgtctctgaagcacagcttttccccaagaaccgatctaggcgaagtttaaacttgcagaatgaacgtgtcacatcacaagctgtgataggcagcgcagcgtttctacaataccccgcaggcggcttttaagaaaaaattaaatatatgactccatcgatgtgttgagtttttccagattcagtgctcttggagtacaggaggcccctcccttatcgtcagtcttgctttctctggtttcagttacccttcgtcaattttaaatagaaaattttaaatggaaaatttcagaaataatccctaagttttgaatttcc

SEQ ID NO: 88763 - DNA, 793 bp, Homo Sapiens
ctgcgactggagctctatagagagagagaaattagagaaaaccttgaaagacaacttgcagttgagcttcaaagcagaactactatgcaaaagcgcctgaagaaggagaaaaaaaccaagagaaaattgcaggaagccttggaatttgaatcaaagcgccgggagcaagtggagcaggcacttaagcaagccaccactagtgacagtggcctgaggatgttaaaagatactggaattccagatattgaaatagaaaacaatgggactcctcatgatagtgctgctatgcaaggaggtaactattactgtttagaaatggcacaacagttgtattcagcctgaaaggtcctcgctggctttacataaatgaagatgcttgtgattccagtttatctctgaaactattcaacatggagttatttcagttttgtttatcagcaaagctttgtttactgaaggagctatttaatctatgttacattaaaaaagaaacgcgtgtacattttaaaagcaatgatgtaaactttgttcttgcattagactgaccagtttaaaaatatgaactaaatcctaatggctaaagtaacttgaccatatttgatgcttttctatgctcatttcaacttggctttttgtcttttaaatttttaaaaaatgcagtagtgtgttagagactagaaagttatatgtatggtttccctgttctactatacataacgttaaagtacaccttctttgttaaaaacgtacttgctaaacttcagcgtaaataaaaacattttgactttaaaaa

SEQ ID NO: 88764 - DNA, 825 bp, Homo Sapiens
gcggccgcgctgggcgtgaggggggccttagagggcctccccaggccgcctccgcccgtgaaggtagttgtcctgggaacccctgcagaagaagatggtggtggcaaaattgatttaattgaagcaggggcttttacaaatcttgatgttgtttttatggcccacccatcacaagagaatgctgcttatctaccagatatggctgaacatgatgtgactgtgaaatactatggaaaagcatctcattctgcttcttatccctgggaaggattaaatgcattagatgctgctgtgctggcctataacaatctgtctgtgttcagacagcaaatgaaaccaacctggagagttcatggtataataaaaaatggtggtgtaaaacccaatatcattccctcttattctgaattaatctattacttccgtgcaccctcaatgaaagaacttcaagttttgaccaaaaaggcagaagattgcttcagagctgcagctttggcttcatggtgcacagtggaaattaaaggtggagcacatgattattacaatgttcttcccaataagagcctatggaaagcctatatggaaaatggaagaaagctaggaatagagtgcatttcagaagatacaatgacgaatggccctgtcacgatctaccgattctggaaatgttagctatgtggttcctcgaattcatccatatttcacattgcatctaatggcgtgatcattactgacagtaccctgcagtcgctgcgtcacaggaagctcatacttacactcttgcgacggcgtcgctctggcatgacggccgtggtgtttgtttta

SEQ ID NO: 88765 - DNA, 323 bp, Homo Sapiens
ccagactgatccaattattacagcttcatagtaaggtggtgtttggaatgcaccacactctcgatgtgcgtacagagaagatggctggctggctggatccagggttttaatgtttccaggacaagagcatgggaacaaccatctcctggaatggcccttccacaggaagagaggaggacacatggcacagaggaaggatggggcacctggattcaaaatctgcttacaccatccatggagcctgggatgttgaagaattagttttttctcttggaacttgctttccttacttgcaaaataaagttaatcctacaaacacaaaa

SEQ ID NO: 88766 - DNA, 600 bp, Homo Sapiens
  misc_feature (111)..(111): n is a, c, g, or t
aggcccagaattcggacgagccaggactttctatacaatcgcttaggaagtaagccttgtctccctccctgttctctgcctcttgtacccctctgacccacccgctttgcnccactcccagccctcctcagccccagccctgcctgccctgcccctccagggggccatgagtgcctaggtttctcataccccacaaggtcacagcaggggagggagggacaattttataatgaaccaaaaattccatgtgttggggggtgggggccggaggagggtgaggggtgccgcccatgggccacaaatctctacaagtgcctgctatccctctcccactccccaccccagcaccggtccaaccccttcatccccagctgctcctaggactggcccatgggcaggcgggtggggggatgggaagggggtgccctgaaaccaaactggaagccccctctgcctcccagctggggcctctggggtggggtggggggctgtggtcaagccttattctgtattggggactgagggtggggggagtagaggggccgctggagaatgtattcaaaacaataaaactttggacctttggatgcagtgaaaaaa

SEQ ID NO: 88767 - DNA, 475 bp, Homo Sapiens
  misc_feature (290)..(317): n is a, c, g, or t
gtcagtccgtttaagctctgaaaatagttcagcatgaccacattgagacaggttccctggtttccttgtcactgtctatagtctattatttccttgtttgtcttcattgtcctgtgaatttagagctcctccaatgaatacacaaagagagtcagaagagatgcagcccattagcttgtgatggagaagccaattatgatgttcagttcattattaattatcttttttttcctacttgcatggagcaaaagctcttttttcttttccttacctctcccccaaaacatatnnnnnnnnnnnnnnnnnnnnnnnnnnnnaagacttgtgcacagactcgggctgcttgcaacaggtttgagggagcgaaaagaaaaagaagagctgggctcctgaatggagggaggagacactgagtggataaagtaaggagaaagaatggagaaaggtaggctagagtcaccaaatgaaaagatat

SEQ ID NO: 88768 - DNA, 730 bp, Homo Sapiens
accatttcaaatattgcaatattgccgacgataaacctctaaaaatgattattcccgtatattccatttatttctctagggggtctaggtaatttgaatcaggagctccaagtaccatttaaaaaggggagtctttaaaaaccatcagtgttttaaacacttgattagaaaaaagataacagctccttgtagtgatctagcttatgtgctttatggtatcttttcaaaaggagagtataaatcattgtacataaaatcaaaatagctaatatacatttttttctggcactttcgagaaattaggcattgaacataaaacatcttataaacttacataacaaaaataaatgtctacattttaatcttagattaccttagggtagcagctaacttatgaaatgccacactgttggtgtgggcagcggagaccatgggaaatacacattcatgtccacagcccttcagcgatggatgcatggctgccgtccaaatatgtggtctgtgtcccaacataaagattaaggctctctgttttgaaggaatgagttctgggcttaaacaagtctagaagtaccacaatactcatggaaaatactgaaaagattcggacgagttttcaaacactgggggaaacacgtttttgactagaaaaataaaataaagcatctaaaactgacttcaagttctttggggagaggctgctgatatcaaatgccaaaataagaaggaa

SEQ ID NO: 88769 - DNA, 248 bp, Homo Sapiens
tgctgccctccacacccagagaacctccacagactccagccctccgacacctgcacagatccatctcccaagacaccacccaaagagagcatttgctgctgcttcccagaactgtccaacaataccttagcaacaccaagagttgggccctagatgggcccagcacattcacaggtcacacccacttccctgcaaaacccaccccctcccagcctcctcctgactctaagccctcctcttcctctaaa

SEQ ID NO: 88770 - DNA, 444 bp, Homo Sapiens
taccagctcgtctacacctgcaaggtctgcgggactaggtcctccaagcgcatctccaagctggcctatcaccaaggcgtggtcattgtgacctgccccggctgccagaaccaccatatcatcgctgacaacctgggctggttctcggacctgaatgggaagagaaatatcgaagagatcctgacggccagaggcgagcaggtgcaccgtgtggcgggcgagggggccctggaactggttctggaggctgcaggggcccccacatccactgcagctccggaagcgggtgaggatgagggtccccccagccctggcaagacggagccgagctgactcctgcgctccccggcactgtgggacttcggccttccagaaggaggttttggccctgggcctctctggacgtggcctgttttctatcaataaacagacattacttccaaa

SEQ ID NO: 88771 - DNA, 884 bp, Homo Sapiens
  misc_feature (642)..(718): n is a, c, g, or t
tgcaagcccatggcaggggtgttgcatctcacaccagcatcctcctcgtggttgcagccctgagactcggcattgaacttgcagtctataatggacttctcattgcctgtgcactgcatctcgttgaggtggatgggtccgatcccttgccccagtcgggagccagagactgcctctttggcactcccggacttggcctccacgtagcccagctcccggcagacgacgtgggcagcgtggatggagaagtcgtcatcgcacacggtgccccactggccatcatagtacacctccacccggccctcgctgtgcttcctcttctgcccagccaggcgcagctgaatcttggccacgttggcgggggcctggggctggtgatactcaggagccggttgctggaagtactcggggtaatggggccagctgtcatactgtgccaggctcaggggggacaggagggccagcatagccaggcagctgcagaggtgggagcacagaggcctctccatccctgtcttcgggctgatgatcccacgaaggggccctgcgcagctgggagggacaggcggggtacagaagcagcaggagctttctgtagtcccagttactcaggaggcttgaggcaggagaatcgcttgaacnnnnnnnnnnnnnnnnnnnnnnnnnnnnnnnnnnnnnnnnnnnnnnnnnnnnnnnnnnnnnnnnnnnnnnnnnnnnngtttcagggatccgcagtggccgggctgggaccgcgctctccacggtggtccccctccgcttccgccgccgctgagcccctttctcgagcagagggggcggctctggtctccgatggctcctcgtgccgaattcggcgcgccgtcgacttcatactctctcgccct

SEQ ID NO: 88772 - DNA, 1658 bp, Homo Sapiens
aggggggagagagtatgaagtcacggcgcgccgaattcggcacgaggcgcgcggctacctacgcttggtgcttgctttctccagccatcggagaccagagccgccccctctgctcgagaaaggggctcagcggcggcggaagcggagggggaccaccgtggagagcgcggtcccagcccggccactgcggatccctgaaaccaaaaagctcctgctgcttctgtaccccgcctgtccctcccagctgcgcagggccccttcgtgggatcatcagcccgaagacagggatggagaggcctctgtgctcccacctctgcagctgcctggctatgctggccctcctgtcccccctgagcctggcacagtatgacagctggccccattaccccgagtacttccagcaaccggctcctgagtatcaccagccccaggcccccgccaacgtggccaagattcagctgcgcctggctgggcagaagaggaagcacagcgagggccgggtggaggtgtactatgatggccagtggggcaccgtgtgcgatgacgacttctccatccacgctgcccacgtcgtctgccgggagctgggctacgtggaggccaagtcctggactgccagctcctcctacggcaagggagaagggcccatctggttagacaatctccactgtactggcaacgaggcgacccttgcagcatgcacctccaatggctggggcgtcactgactgcaagcacacggaggatgtcggtgtggtgtgcagcgacaaaaggattcctgggttcaaatttgacaattcgttgatcaaccagatagagaacctgaatatccaggtggaggacattcggattcgagccatcctctcaacctaccgcaagcgcaccccagtgatggagggctacgtggaggtgaaggagggcaagacctggaagcagatctgtgacaagcactggacggccaagaattcccgcgtggtctgcggcatgtttggcttccctggggagaggacatacaataccaaagtgtacaaaatgtttgcctcacggaggaagcagcgctactggccattctccatggactgcaccggcacagaggcccacatctccagctgcaagctgggcccccaggtgtcactggaccccatgaagaatgtcacctgcgagaatgggctaccggccgtggtgagttgtgtgcctgggcaggtcttcagccctgacggaccctcaagattccggaaagcgtacaagccagagcaacccctggtgcgactgagaggcggtgcctacatcggggagggccgcgtggaggtgctcaaaaatggagagtgggggaccgtctgcgacgacaagtgggacctggtgtcggccagtgtggtctgcagagagctgggctttgggagtgccaaagaggcagtcactggctcccgactggggcaagggatcggacccatccacctcaacgagatccagtgcacaggcaatgagaagtccattatagactgcaagttcaatgccgagtctcagggctgcaaccacgaggaggatgctggtgtgagatgcaacacccctgccatgggcttgcagaagaagctgcgcctgaacggcggccgcaatccctacgagggccgagtggaggtgctggtggagagaaacgggtcc

SEQ ID NO: 88773 - DNA, 909 bp, Homo Sapiens
  misc_feature (755)..(755): n is a, c, g, or t
  misc_feature (767)..(767): n is a, c, g, or t
  misc_feature (861)..(861): n is a, c, g, or t
gggagagagtatgaagtcgacggcgcgccgaattcggcacgagggccatcggagaccagagccgccccctctgctcgagaaaggggctcagcggcggcggaagcggagggggaccaccgtggagagcgcggtcccagcccggccactgcggatccctgaaaccaaaaagctcctgctgcttctgtaccccgcctgtccctcccagctgcgcagggccccttcgtgggatcatcagcccgaagacagggatggagaggcctctgtgctcccacctctgcagctgcctggctatgctggccctcctgtcccccctgagcctggcacagtatgacagctggccccattaccccgagtacttccagcaaccggctcctgagtatcaccagccccaggcccccgccaacgtggccaagattcagctgcgcctggctgggcagaagaggaagcacagcgagggccgggtggaggtgtactatgatggccagtggggcaccgtgtgcgatgacgacttctccatccacgctgcccacgtcgtctgccgggagctgggctacgtggaggccaagtcctggactgccagctcctcctacggcaagggagaagggcccatctggttagacaatctccactgtactggcaacgaggcgacccttgcagcatgcacctccaatggctggggcgtcactgactgcaagcacacggaggatgtcggtgtggtgtgcagcgacaaaaggatcctgggttcaatttgacanttcgttgatcancagatagagaactgaatatcagtggagacatccgatcgagcatctctcactacgcagcgcacccatgagaggctactgagtgagaggcgactgnacaattgtacactgacgcagatcgctgctggagttgctctggagaaca

SEQ ID NO: 88774 - DNA, 474 bp, Homo Sapiens
tcagcattttttaagaagacatcacttcccccttggggaagaaagaactcaatgacttgaagaaactgatgcttcaggtaccttgaaaaattcagctggttttgatgagaaacagtcaatggggctgttaggggtcctggcggatgcttaggcagtggctgtcctggattccagggaatgccccaaacccagtgatgcaggacccaggactccatctgctcattcttcataaggttggctcacaggtcatctgctgagaaggtcatcttctccgtcttcactgggctcactgaatgaggacattccaagatcccagctcatctcatttgagctttccttttcctaatcccatgcatctgtgtttgagaaaatcttcccaagtgatagatcttctattttccgatttcttccatgttgtattactttttttattaataataataaatacacatatttttggtgtgtaaaaaaaga

SEQ ID NO: 88775 - DNA, 426 bp, Homo Sapiens
cttgaattcttgccctggctcttggtgaaggatcggcctgctggatctgagtcatccacctataagagggacaacaccacacattggtcgctgctctcaagcccctggaataccaccccacttggcttctcctgattctgctatcagctacaggtctgggtttgtgtctccgacaaagaaccacctcaaaagccccacagaaaaggactgtaccgtatacttcaaactattgacacctcaaagaacagagcttgggttcaggcttctgatgcattctgagacactctcagaccataccagtgggctgggtcaggatttacagaactattttcatttcaagagcatacgggctcatgagattgctaactcaagatccggtgcaacacaaatacttatatcggactgaataaaaaaatgaggaaaaaa

SEQ ID NO: 88776 - DNA, 509 bp, Homo Sapiens
ggctttcgagtgtgacacactggataataatgaaatagtagcaactattaaattcacagtctatacgagcagtgtgaattgcaaagccctgtccgtgatgtctcctacatgttgccttgaaactgtccatcgcctttcattactcctgtgactgccctagttcaggctgccccgtctctttatgtagatgctttttaaaacaatctcatgacttgcttctccaactatgagagagcttttaaatgcaacttttacaattttacacgggcagcagtcaaggctttctggggggcaaaagcctctacacctgaggtacaatccgagcagagttctgtgagatacaaagattcaacttctcttgaccaattaccaacagaaatgcctggtgaagatgatgctttaagtgaatggaatgaatgatgtttgaatgatatataacaaaccaaaggatattacagaatattagattcattattacaaaaataaaatacacattgaaatactttaaa

SEQ ID NO: 88777 - DNA, 640 bp, Homo Sapiens
attgggttaaatatctattggaaatcccaattcagtaacacacattcctttatcctacatgttcagactagtgttaaaagtgacttcagatatttcctatgctcatgttttttaaaaaaaagtccaaccattctcctcaatgaacatgacattaaatcaagctaagtccagtcacatggtctcaactttactcactaaagctagcaggcaagggcctagtgagttgaattagaggtttaattagaagaacaagcaataaatgctaaatgttctgttgcaactgtgtaactttctgtgggattttatgccttgtatcttttttcctgaattccagaccaacggggctgcactagaaccccagaagcagagaattccataactcagactctttgattcagatatttttcttttcatcaccttgagagagcaaataaatcccccaaactacttttcccacctctcaagcttctagaggatattcttgactggaatttgtccatgttcttaaataacaggttacttcacgttctttgtgtttaaataaatgtaattaggcctgtttttaaaaactatggaaaatattaaaaagaaaattaaaatcatctataaacttaccccttagtggcagccacatgaaaaa

SEQ ID NO: 88778 - DNA, 509 bp, Homo Sapiens
  misc_feature (16)..(16): n is a, c, g, or t
gcctagcctactgagnaagtcattggtcttggctttaggtattaagaagtggagttcaaggcttttgcaagaatagtagatgtgaaattgttgacatttaaatctgaaataagatgaaatggcacttcttgtctcttctgcctccatgtgagaagccaacagtgcttcaatataggatcacaacagctatgtttttgtctccccttgcatctgctttaggaaacacctgtttttttggcaagttgttttgatatcaggtagtcaattaagctgcatcatattgagcgtcaaatcttaattttttttaatagcaaaaggtgaagatccagaggactctgaactacaccaggcatcatttgaaacatcatgcagtttgtacctctagttaccacaggtgaattaaaccagctaatcaactgcagaatacatctagtatttcccaatggtgtgctgctctttggggaaaagacttaaaggtttaccaaataaagttttgttcatgcactaaa

SEQ ID NO: 88779 - DNA, 533 bp, Homo Sapiens
caggtgagaaagtggaattaggtcattgatacttggctggatctgccgggcccttactgaccctttgcccttcaacaggtgaccctgcccttagcatgagccactggatgttccatcagcaggccctgcaggagtacatcctgatgtgctgccagtgccctgcgggggggcttctggataaacctggcaagtcgcgtgatttctaccacacctgctactgcctgagcggcctgtccatagcccagcacttcggcagcggagccatgttgcatgatgtggtcctgggtgtgcccgaaaacgctctgcagcccactcacccagtgtacaacattggaccagacaaggtgatccaggccactacatactttctacagaagccagtcccaggttttgaggagcttaaggatgagacatcggcagagcctgcaaccgactagaggacctgggtcccggcagctctttgctcacccatctccccagtcagacaaggtttatacgtttcaatacatactgcattctgtgctacacaaaaa

SEQ ID NO: 88780 - DNA, 1933 bp, Homo Sapiens
ccccgcccctcccttcccgcggccccacgcctcctaagcaagatggtaccggtccggaattcccgggatatcgtcgacccacgcgtccggaagcagagtcctacacactgtctgctgctctcctgatcatggcttctccgagttctttcacctactattgccctccatcttcctcccccgtctggtcagagccgctgtacagtctgaggcccgagcacgcgcgagagcggttgcaggacgactcggtggaaacagtcacgtccatagaacaggcaaaagtagaagaaaagatccaagaggtcttcagttcttacaagttcaaccaccttgtaccaaggcttgttttgcagagggagaagcacttccattatctgaaaagaggccttcgacaactgacagatgcctatgagtgtctggatgccagccgcccatggctctgctattggatcctgcacagcttggaactgctagatgaacccatcccccagatagtggctacagatgtgtgtcagttcctggagctgtgtcagagcccagaaggtggctttggaggaggacccggtcagtatccacaccttgcacccacatatgcagcagtcaatgcattgtgcatcattggcaccgaggaggcctatgacatcattaacagagagaagcttcttcagtatttgtactccctgaagcaacctgacggctcctttctcatgcatgtcggaagtgaggtggatgtgagaagcgcatactgtgctgcctccgtagcctcgctgaccaacatcatcactccagacctctttgagggcactgctgaatggatagcaaggtgtcagaactgggaaggtggcattggcggggtaccagggatggaagcccatggtggctataccttctgtggcctggccgcgctggtaatcctcaagagggaacgttccttgaacttgaagagcttattacaatgggtgacaagccggcagatgcgatttgaaggaggatttcagggccgctgcaacaagctggtggatggctgctactccttctggcaggcggggctcctgcccctgctccaccgcgcactgcacgcccaaggtgaccctgcccttagcatgagccactggatgttccatcagcaggccctgcaggagtacatcctgatgtgctgccagtgccctgcgggggggcttctggataaacctggcaagtcgcgtgatttctaccacacctgctactgcctgagcggcctgtccatagcccagcacttcggcagcggagccatgttgcatgatgtggtcctgggtgtgcccgaaaacgctctgcagcccactcacccagtgtacaacattggaccagacaaggtgatccaggccactacatactttctacagaagccagtcccaggttttgaggagcttaaggatgagacatcggcagagcctgcaaccgactagaggacctgggtcccggcagctctttgcatcacccatctccccagtcagacaaggtttatacgtttcaatacatactgcattctgtgctacacaagccttaacctcagtggagctgtggttctctgtggtacttccttgtcaaacaaaaccaatggctctgggtttggagaacacagtggctggttttaaaaatcctttccacactgtcaaaacaaaatctatcagccacgtgggtgtggttggtggacagtgcatgcaggaggagcgtccctcctcacagtctcccagcaggacgatccccgagatgatgcctctggtatacggctcagagcctgttgttccactggacgcccttcgtcccgactggtgcccgtgggggtcattgtcgcagtcggttggccccaggtcctgaccgggggtgccgggcccctcgccgcttggaaccggggaccctgggctcccgagagttcggcggcgacgtgtcagggcgc

SEQ ID NO: 88781 - DNA, 438 bp, Homo Sapiens
ctgtggggcaggcaggattcctggcatagctttactacatgcctgtggttcaaggtccctcatgagattgttttcaagcttatggctggggctgtggtctcatctgaaggtttgtctgggaaagagtatacttctaagtttgttcctgtgattgttggtcaaattcagttcttgtgggttgttggactgacagcctcagtttcttgaagtctgttgcctggatgccaccctcagttccttgccacatatggctctccataaactcaaaacacagccattggctttccatgtgatgtattggttctatttcagatatgcagaaacttgcaaaaacatatctaaacatttcttctgtatcaatttatttggccttgctgctttttctctaaagcaatatatttctagagcgtatggttgcagtgacagtactacagattc

SEQ ID NO: 88782 - DNA, 585 bp, Homo Sapiens
ctgaaacaagaatataacgtcaggaggccagaggctttgtcctgcctaatgtgttatttccacactgaataaaagcacctgagtcctggtaagtctaatttgctaggtgtggcaatatgaccagtgaaaaacaacaagggcagcatttcctgcagttcggtggcacagtatggttcaaagaggtataaaaggaagtcacaggcattttaaaaaggttgtacatctagcaatacctaacaaaataggaaatcaacttggaaagccaatggctgtgttttgagtttatggagagccatatgtggcaaggaactgagggtggcatccaggcaacagacttcaagaaactgaggctgtcagtccaacaacccacaagaactgaatctgaccaacaatcacaggaacaaacttagaagtatactctttcccagacaaaccttcagatgagaccacagccccagccataagcttgaaaacaatctcatgagggaccttgagccacaggcatgtagtaaagctatgccaggaatcctgcctgccccacagaaaatgtaaaaaaaataaatttttattgttttaagccaaaaa

SEQ ID NO: 88783 - DNA, 564 bp, Homo Sapiens
ccaatgctttaaaggagatgttatctagaaaacatgcagacactgaaaatctagtttatgcagtatgatccctggtatttggcaagggctattccagaagtcaagatgggaaagggagaaggaagcagtgaggaaggaagaaatcactgaacttgagtctcatacttaatttgaccttaaagactatgaccttaaaaacaatgtccagttagattgtccttccactttagacaagtttatcaagttcaattcttctggataaaaaatatgtatcactggaaatgaggttttatacttgaattcatttcatttttaagcatatggcacttaaatattactataatataggttactaggtgcctaatagttattattagcagagttcccttgctagcagtttctatgacaaacaactcacacagagttgcttcaaaagatgcctctgcaagggctcgcttctgcaagtggaaatggctccctctagacaatggaaagaaggcaagaagaaggaggcacccaccagcagccatgactagctgaaatcagactgattccaaacacaaa

SEQ ID NO: 88784 - DNA, 512 bp, Homo Sapiens
ctaaaaaaactaccgattatgccatgctggtcaccatgtttggctggttcactatggtgatctcatatgtggtatattatgtgaggcaaaatcaggaggatgcccggagacacctcgaatacttgaaatccctgccaagcaggcagaagaaagcagatgaacctgatgatattagcactgtggtatagtgtccaaactgactgtcattgagaaagaaagaaagtagtttgcgattgcagtagaaataagtggtttacttctcccatccattgtaaacatttgaaactttgtatttcagtttcttttgaattatgccactgctgaacttttaacaaacactacaacataaataatttgagtttaggtgatccaccccttaattgtacccccgatggtatatttctgagtaagctactatctgaacattagttagatccatctcactatttaataatgaaatttatttttttaatttaaaagcgaataaaagcttaactttgaaccatggaaaa

SEQ ID NO: 88785 - DNA, 455 bp, Homo Sapiens
ctgagctcgatccccgaagcatctgaatatgactggcgaaactatcagccaagccagatgagtgaatccgagttacagatgctagcaacgctacggtggcaacaaaatgaagaactggaggatgctgggacctcccatggcctgagtgcctcccaggtggacaactgtaatgtcagcataagtaccagcagtgacgacacaaccacctggaactcctgcctgccaccccctgtcaaccagggtcgccactatcagaaagaaatgaacccaccttctccttctaatccccgggactggttaaatatgttgagcccaccaatcgttcctcccagtcaacagccggctgagcagcgtccagattcctgtgaaagtttgagtgttcaaggtgggactatgaaaaacgatatgcataagaaaataaaaataatttactataaatagagagaatccaaaaa

SEQ ID NO: 88786 - DNA, 776 bp, Homo Sapiens
ggggcggaccgcgcggagctaagtggaatcccggttggcttggggcgcaggcttccaacttcgtactctggcctctggcgtctcggctcgtcggttgggtacccgaacccagctactgctgcttgaagagaagatggatggggactcctcgccgtcgctgcgccgccggccttccctgggcggacgtacacctttgcgaagcgtcagtgaggacccagggcccctccttggaatagctcttatttctcaagcgctgcagcgtgaagctcgctctgcgggtccgagaggcctgcgatctgaagactgaaaactgggaagagacgctctaccctgtgctcctcgccggcttcgataggagccgcaggtgcctgggattttctcaaactttgtcccaaacttcagctgtgggagtggaggaacaaacaggcctctcccagaattgtgaaagagatcgccctggtggatgaaacaaaaacaaatgcacttgacttccaccgcctgcctggcgtgtcacgcgggtttaatgtatgtgtcacatttaaattcaaagtattttcttctaagggcctggacacatttcttttctccctgtatcgtgaattggaaaataccttaggatattaaaagttatctaagataaccccctttcttctgtaagttaaatactaaacggcttaagacgaaattttggaatatagagatgatgatgcagactgcagtgaattatcaaatatgcatctcactgttctccacattaaacatatttttgttgcgta

SEQ ID NO: 88787 - DNA, 461 bp, Homo Sapiens
ccgctcccgtgggagaggaccaggagtggcacaaagtctggaaaggaagcaccaaggccaggtttctatcacatgactagagatagctctctggttactcaaatggaagttgcatacctcacatgaatattaaaatatcttgaaaggtcacacagcactttatacatcattcatgaggttgactaaaaaattccaggaaaactacaaagagggaaacattaaacaagggggcagggaagtgtgaatgtgactgttattcacactgggtggcatttccagctctggctatcaacaactattccatacacatgaagcatgcattcatggttccattattcactacgacaggcagttaattcaaatacattttcaaattctcaaaaaattaaaaacaagggatcttttctgctatcaatagtcaccaattctcttaagaatattaagtcatcagtatggtacga

SEQ ID NO: 88788 - DNA, 500 bp, Homo Sapiens
cgtttataaaaattgtggctgtactaaacatacacggtgctgtggtgactgaaagcagatgagatgcagcctattttgtgtgtaccttgcagatatgcagcctccaatgatgatgtgttatggggaggtcacaaaatatacgtgaaatctacaaggccgagcagccctattgatacatattgatcatatttttccctctgcagtttatcgtattcatgattcaaaggaacaaaccaagctggccaagagagtcttccaaagttagtaaaaaagattcaatctgtgagacataagtttgcctccctctttttatgtatattaatgccatactgccgaagcacctggctgttgaaatgaaagtgagccagcatatggatttaacagatttggaatcctcccaaacaagcattttcttaccaagtcaataagagtaaatgcaggtaccaaagggaacctacaataaagacatctaggataaaacaatacttaattcttgagaa

SEQ ID NO: 88789 - DNA, 867 bp, Homo Sapiens
  misc_feature (41)..(75): n is a, c, g, or t
gcgaacgacgagcgcgcgagttgtgagcgaggaagcggcgnnnnnnnnnnnnnnnnnnnnnnnnnnnnnnnnnnncagtcgacggtaccggacatatgcccgggaattcggccattacggccgggaaataaagttcgaatcccttagatggcattcacagccttctacgttctggccccagctttatctcttgaaactcactactcaccatctgacaatgccactaaaaatccacaagagtgatttcaaggtttttctatggtgaaggttcaaactggtaataaaccatgtttagcatttgtctggtctaaaataatttctatattactttataatagtcagctgggggttatttaagctcttggacgagcctaaaacttgtatcctgaagaaaatatttttttccaccagaagaaattgctttcaatttcttaaccttcaaaacaatgtcagtgttgtcacctgtgcatttgatagccacagcacaagtattcttcaggagcataaatcctccagccttgaatggaccattgtccagctcctgtgaaaaacttaatatttgagaaagacattcaatggtacatgttttctgtacacttcatgagtagttgagattttcttgtattaaggttaatcactaaaaaggtgtttacttgggtttcgttaactaaaccccctaaagatgttttccattttattgttaaacacttggtgttagcaagggtcagcacgagaaaaggcccaatggcaagaatttctgcaaactctgtaaagcttactgaattcatttgtcatttattacattgctgagtggtgcttgaataaggaaacatgcaataaatttacttatttaaccaacatttaaaa

SEQ ID NO: 88790 - DNA, 1761 bp, Homo Sapiens
  misc_feature (923)..(923): n is a, c, g, or t
  misc_feature (1702)..(1711): n is a, c, g, or t
ggtccggaattcccgggatggcgcgggccagcagctctgcgaggggccggagcgcggcggagccatgcagtacccgcaccccgggccggcggcgggcgccgtgggggtgccgctgtacgcgcccacgccgctgctgcaacccgcacacccgacgcccttttacatcgaggacatcctgggccgcgggcccgccgcgcccacgccacgcccccacgctgccgtccccgcaactcctccttcaacagacctcgtgatacccctaccggaccccggatgtacgagccacacgccgatccatccagccttctcgcaccactccgccgccgcgctggccgctgcctacggacccggcggcttcgggggccctctgtaccccttcccgcggacggtgaacgactacacgcacgccctgctccgccacgaccccctgggcaaacctctactctggagccccttcttgcagaggcctctgcataaaaggaaaggcggccaggtgagattctccaacgaccagaccatcgagctggagaagaaattcgagacgcagaaatatctctctccgcccgagaggaagcgtctggccaagatgctgcagctcagcgagagacaggtcaaaacctggtttcagaatcgacgcgctaaatggaggagactaaaacaggagaaccctcaaagcaataaaaaagaagaactggaaagtttggacagttcctgtgatcagaggcaagatttgcccagtgaacagaataaaggtgcttctttggatagctctcaatgttcgccctcccctgcctcccaggaagaccttgaatcagagatttcagaggattctgatcaggaagtggacattgagggcgataaaagctattttaatgctggatgatgacccctggcattggcatgttcagaaaactggatttagngaataatgttttgctacagaaaatctttcatagaagaactggaaggctatataagaaagggaatcaattctctggtattctggaaacctaaaaatatttggtgcactgctcaattaacaaacctacatggagaccttaattttgacttaacaaatagtttatgtactgctcttaggttgttttgataaagtgacattatagtgattaaattcttccccctttaaaaaaacagttagtggttttcactatttataaaaaattaattttgaactttttgttaaatttttaagttatagctttaaaggttttaataggaccttcttgaacgacttttctgtaatctgtttatctcccacttaatggaaaggcaaaggggtaccccaaatccagaggtgcctacatttcaggcagccttggagtattttaaaaggaaaacattctttacttttatatgacattcttatactgctgtctcaaatccaaaaacatttcagagctcttgtctcagagatgtgtgttctttttgtcagagatatggttgatgagaatcttaaatgcttgttttgcactatcacttagtacctgtttgaccaaggtgttaaggggatagtacctcccaattcaagcagagaaactgacctgactaaagttaatcgcagatgaactagaagtcacaggttaattaaatgtaagtagattgtagatactgttttatatcaaacaatgtttataatgtgtatatagaattgttcactgtaaaaaaaatggccaaaatgtgnnnnnnnnnnaataagtaacttgactataaaataaagccgtccgtgggacgactgacaaa

SEQ ID NO: 88791 - DNA, 822 bp, Homo Sapiens
gggggggaggaggcggaagaaaccagagcctgggagattaacaggaaacttccaagatggaaactttgtctttccccagatataatgtagctgagattgtgattcatattcgcaataagatcttaacaggagctgatggtaaaaacctcaccaagaatgatctttatccaaatccaaagcctgaagtcttgcacatgatctacatgagagccttacaaatagtatatggaattcgactggaacatttttacatgatgccagtgaactctgaagtcatgtatccacatttaatggaaggcttcttaccattcagcaatttagttactcatctggactcatttttgcctatctgccgggtgaatgactttgagactgctgatattctatgtccaaaagcaaaacggacaagtcggtttttaagtggcattatcaactttattcacttcagagaagcatgccgtgaaacgtatatggaatttctttggcaatataaatcctctgcggacaaaatgcaacagttaaacgccgcacaccaggaggcattaatgaaactggagagacttgattctgttccagttgaagagcaagaagagttcaagcagctttcagatggtattcaggagctacaacaatcactaaatcaggattttcatcaaaaaacgatagtgctgcaagagggaaattcccaaaagaagtcaaatatttcagagaaaaccaagcgtttgaatgaactaaaattgtcggtggtttctttgaaagaaatacaagagagtttgaaaacaaaaattgtggattctccagagaagttaaagaattataaag

SEQ ID NO: 88792 - DNA, 571 bp, Homo Sapiens
cacgagggtgaagacggcatctaccacctcaaatcgcccagctcattgaacctgcgtgaggatccagcactgtccctggtgtgtacagctcagtgcaccgagatgaccaaccgcctgggtttgctttactgtcactgctaaaggcaggaaggcagctgccaaaccaggacaaggtggtcaccccacggtgaacatcagtcaccctccctagcccacacaggcaaacaaccgggggagactatggctcagggcttagaacccaaaggcctgaacaaatgaggaagtttttacaacaaagactttctttgacagagtaaccagtcataatttttgagcattccaggagcgctgtgcagaatcacaggtatttggcaactagtgggataaaacaaaggtgccattgaggatgtttacaaccaacccctctccggagataacctcaaggtttttcccttgcacatggcctttccatgactcatccacagcagctgcctccctccaccacacaaaggaccctgcaagttttgtttggtatttttgagaataaaaactccgtgggtcgttccctaaa

SEQ ID NO: 88793 - DNA, 1389 bp, Homo Sapiens
  misc_feature (237)..(237): n is a, c, g, or t
  misc_feature (244)..(244): n is a, c, g, or t
  misc_feature (249)..(250): n is a, c, g, or t
  misc_feature (316)..(316): n is a, c, g, or t
  misc_feature (329)..(330): n is a, c, g, or t
  misc_feature (364)..(364): n is a, c, g, or t
  misc_feature (374)..(374): n is a, c, g, or t
  misc_feature (639)..(639): n is a, c, g, or t
  misc_feature (1198)..(1256): n is a, c, g, or t
cagtcgacggtaccggacatatgcccgggaattcggccattacggccgggagtaaataaagggtgaacttcttaattattcgaaaactgcttttaatattaggatatactcttttagctcatcttcgctggtcttgaggcttattataattgtcaaatcaacaaagtttctaatagagaagtagaagaaatatcttttgagatgtaagtagcttggtctgtcttctaaagtaatacnatacctngcttnnaaacttgcagcggttaacttctatattatcaattacgtgacacggcattttctaacagtttggtcnactgtcacaaaanncagtagtttaaacaggaagcaagcaaacggcaancttttaaagntattcagaataagcctgtaggtgtgaaggaataagtgttgcaaaatagttatttatccaagctgtcaattaattgattgaagtagttatcaaaatgtttctgtttctttctttggtatctattaactggtcagtcaaaagctattaaagaatgtttttaaagtcacctaatgttgccagtttgttaaatttggtatacattttaagaatagacattctagagttattaatatggaagcagctaaaatgttttaggaaatctcaanaagttttagaagccacatttgctaaagcataacctgcacttagtctttcttggctatctgtatttttttctcattaattataaataaatttttgttaagtatagtatttaaaagtaagtttaaaggttcaatttgaactgaaatttccccagagagctttgaattcccataagtgattacagcttttactcccgacttgtttttagtaaatgttaataagacaagtaatgtacaaacacatataaattaaaaaaaacaactgtccatcgttttaggaagaactgaaggaactaaaaatgatatttgcttggaaattaagttagttgaactctttgaaccacagtagaaaccgctttgtgtggcctgtgagattataagctttttgtttcagctttgaagatgaaaagtgatttaatctcttaatctcatgctttgattgaattttagctctgttccttaaaatatgcaaaaggaaatgtaagtgcatttctagtcacctcatgccactacaagctatttatttaaaagtgaaactttttgtatattattgtgaactgannnnnnnnnnnnnnnnnnnnnnnnnnnnnnnnnnnnnnnnnnnnnnnnnnnnnnnnnnntcacaaaatgaagtcctatatttttcagtgtttatgaatattaatataaactatttttttctagaatgactaattgtgtaatatctgtattctgcgataatttgaaatctaataaatattttctccatgaaaa

SEQ ID NO: 88794 - DNA, 429 bp, Homo Sapiens
cagtggaatcatattgcagctgttctaaccacccagttcctgctctggacactgagtacattaaaggaagtacaaaacagttacttcccaaaaactctcaaccaacttttctttccttaaatgatggtcattctccatatggcaggagcaacatttttcttatttttctctgctggtttgaaatcagaactgaactagatattctttccaaattagaaggtacctctttcactgacaacaggaatttagaggatttggggtttagaacaatgttatttaagttcaataactggaaaatctcttgatgaagcaaaacctgcattaacatagtaatcatactttttggctgataaagaaaaataaacagctctcgaaaagaactttttccaaaaatggaaacattctttagctttttagggtcgttcatat

SEQ ID NO: 88795 - DNA, 1082 bp, Homo Sapiens
ccacttaatgttaatgaggaatatatcatcatgggctatgaagatgaggaacgttccagattactcttggtggaaggctctatagctgagaagtggaaggatcgactcggtaaaaaagttaagcgctgggatatgaagcttcgtcatcttggactcagtaaaagtgattctagcaatagtgattccactcagagtcagaagtctggcaggaactcgaacccccggcaagcacgcaactaaatcccgaaatacaaaaagtaacacagtggacttcctattaagacttacttgcattgctggactagcaaaggaaaattgcactattgcacatcatattctattgtttactataaaaatcatgtgataactgattattacttctgtttctcttttggtttctgcttctctcttctctcaacccctttgtaatggtttgggggcagactcttaagtatattgtgagttttctatttcactaatcatgagaaaaactgttcttttgcaataataataaattaaacatgctgttaccagagcctctttgctggagtctccagatgttaatttactttctgcaccccaattgggaatgcaatattggatgaaaagagaggtttctggtattcacagaaagctagatatgccttaaaacatactctgccgatctaattacagccttatttttgtatgccttttgggcattctcctcatgcttagaaagttccaaatgtttataaaggtaaaatggcagtttgaagtcaaatgtcacataggcaaagcaatcaagcaccaggaagtgtttatgaggaaacaacacccaagatgaattatttttgagactgtcaggaagtaaaataaataggagcttaagaaagaacattttgcctgattgagaagcacaactgaaaccagtagccgctggggtgttaatggtagcattcttcttttggcaatacatttgatttgttcatgaatatattaatcagcattagagaaatgaattataactagacatctgctgttatcaccatagttttgttaaatttgcttccttttaaataaacccattggtgaaagtcaaa

SEQ ID NO: 88796 - DNA, 452 bp, Homo Sapiens
attttcataaaggtcaactaagaaatgtgacaaggtttgtgaactataaagcactaaacataactgtgcatccctacattttaggagttacaaaacaaagaaaaacagttaacaccactccaccaaatgaatagaggaaatttagtaaagatgtcaacctctctgtattggaagaagctccttgttgcttgtcttgaccctgcctcccatcgctgaggagtctagttcacctctaagccaagtaggatgagagtatatttggtgtctgagctcatttttgaatctacttcatttgtgttaccacacattattcattccccctgttcaactatctactaagacatttaaactggccaagaaacatctatctagcaaaattttggctgagagtgttcctccaaatagaataatccacttctaaattaaaccagattagcaaaaatgtgaaaaaa

SEQ ID NO: 88797 - DNA, 459 bp, Homo Sapiens
tctccaagggaggctgtgacccaggaccccgcctcgacctcaccttcttctgtaaggcgcagtgaaagacgaagatgaagaccccctggaaggcgttgaaggtggtgaagagataggccatgaccaccgactccttgttgatgaagaggaggccgaaagcccaggtgaggcccagcaggaacagcagcgcgatggcccccagcgcccaggatctgggagtggggcgacaggggagtcaaagtacccgccggaggggacggcctcagcccaggcctcccctgcagcctacaacgggggcccttgggtgggcctgggcactgtctgcaaagccctgagcgggccgagtgggccttgggggcagtggcctgcccaggacacctccaccggagcctgggcctgagggaaaggtactgggtcaggcgtcggggtattgtgaacatcagttattcctctgccaaa

SEQ ID NO: 88798 - DNA, 312 bp, Homo Sapiens
gtcaaggtataacgtctcaacgcaaagagacaatcagtgtggacaccaaaccttgagcatgatttctgtacaagtcagtaacattcagtgcacggtagaacagacacaggtactgaactcaacaactaagtcatctccaaggcctatcaaagcaaagaagagacaggtcttgggatcccacctccaacaatcagtgattaatctcaaggcttcaaaatgtgtagtgcttgaagaccatctctaactttaaaatcataggtgcaaatctgccaatatttgtaaagaacattaaattatttagatttctagaaa

SEQ ID NO: 88799 - DNA, 711 bp, Homo Sapiens
acatcgcggctccgcgccgcggaggagacttaaatatcccagcgtgcaccgcgccgcgcgtcgcgtcatcgcgcgccctctacgtcatgcgcgcgcgactccgggagacgctaccgcccggcagcgcccgagacccaactggtttggaaaatgccgcctgcctttaacgcctgtttctgactcttgaggttttccgcgtggctcccagcgccacatccatccggaggcgatcccgtggaaggatcgcgtccaagataaaagggcccgagacctatgcttacgtaattcctaatccgtgatcttttatgggggctgaattcccctccagcacagcctgttaccaggtacttttcacaaacgctactagcggttgtgagtccctcccccctccatttctatgttacaaattgaaaacgtgggacgattacctaccaaatttcacatcatggcccagatatcgggtggattttgaggctctgtgatcgacttatacctatgctaaagttaacggtctgagaaagtagataagtggttgcctagggctaaggagtgggtttgggggtggggaatagaaaatgactgctcatgggtataggctttctcgtagcaccataaacatagtttaaaattagattgtggtggcgattgcaccaccctatcaactgcatggtatgtcaattatatcttaataaagctgtttaaaaagtcaaa

SEQ ID NO: 88800 - DNA, 497 bp, Homo Sapiens
  misc_feature (23)..(23): n is a, c, g, or t
  misc_feature (31)..(31): n is a, c, g, or t
actatagggaatttggccctcgnggccaagnaattcggcacgaggcggcacgagggcgccttgtacgggaccacaagcaggcggaggagagcccccaggatttttgcgacgtgaccgtgagccacgtagctgcttatcttgcatgagttagaatctcttcagtctacacaccgcttgggccagcccatctactcgtctggttggaattataaatgactcccagatctttatttccgacccagaatctctcctgagcgggcgactcgctatccagccgccccctttgctgtcgatttggaagtcactcgttcaacagctgttcattgcgcctccctgtgccaggcattttgatcggtgctagtggtaaaggggatgggcaaggttcctgcctttagggcactcacagtctagcggggagactaactgtaatcaaataagcatactaagacatgtacaacctcaaacttaaataaaggaactgaagttataggaacttc

SEQ ID NO: 88801 - DNA, 490 bp, Homo Sapiens
gactatcagtagggattaagttatttagcactgccctctccccacagtaataaaaagcactgtacataatgccctgggaagaagttagacatgaactccaatacttcaggacaagtatggttctcaaagggtgatccagggaccaaccctttgaggaagtccacgaggtcaagctattttcataatactgctacacagatgttatttggcccctttcactctcattctctcacaagtatactgtaaagttttccagaggcttcatgaagtgtgtggggggacattattgctcccatggctaatgtactgtgtgcatgtgtatttattttaaaaatgtattcgctttaatttctagtatgggaagtatcaaaagaacaaaatataagcaaagctctttgagatcctcaatttctaagagtggggtctgagaccaaaaagtttgagaaccagtgctttagtagaaagaattttatccttactctggacaaag

SEQ ID NO: 88802 - DNA, 492 bp, Homo Sapiens
  misc_feature (122)..(151): n is a, c, g, or t
  misc_feature (443)..(443): n is a, c, g, or t
ttttgactatcagtagtgattaatttatttagcactgccctctccccacagtaataaaaagcactgtacataatgccctgggaagaagttagacatgaactccaatacttcaggacaagtannnnnnnnnnnnnnnnnnnnnnnnnnnnnncctctgaggaagtccacgaggtcaagctattttcataatactgctacacagatgttatttgtccctttcactctcattctctcacaagtatactgtagagttttccagaggcttcatgaagtgtgtgtggtgacattattgctcccatggctaatgtaatgtgtgcatgtgtatttattataaaaatgtattcgctttaatttctagtatggtaagtatcaaaagaacaaaatataagcaaagctctttgagatcctcaatttctaagagtggggtctgagaccaaaaagtntgagaaccagtgctttagtagaaagaattttatccttactctggacaaa

SEQ ID NO: 88803 - DNA, 560 bp, Homo Sapiens
caaagccaaaagccacatctagacaggctttagatcctgacagactatgggtctctacattggctggcgctgcccccattacctatgggactgtttccggattggggatgagtccagatgcttttgtggacacttgttgagagagcaccggatcatctcagacatatcggtgccctgcaaggtaagccagtgccgctgcttcatgttctgctttatcccatcacgcccagaggaggtgggtgagttctggctcaagagacgggccacctttgaccccaaggcctggagggcccaatgtcgctgcaaacacagccacgaagaacatgcagccactgggccccatccctgcaggcatcatggctgttgctgcggctgttttgagtctaatttcctctgtgcggcctgtgaccggcgctgggaggaacacgagactttctttgacacccagaagacccggcaacgaggaggaaggcctcgcgggacagacactgtcagcaactggcacaggcctttgtgagtctgccccagatcagcaataaaagaggagtcattggaaaaaa

SEQ ID NO: 88804 - DNA, 461 bp, Homo Sapiens
  misc_feature (32)..(32): n is a, c, g, or t
ttttggaaagaagacagggatgaaatatatcnagcaattaccaccccccatcatcaccaagaacaacagtatcaacaagaagaacagggacaacaaaacccacggatgaaacattcctttctcagctcagatcttatctggtgcgttctctctctgctctgtcttggtgtgtggtttagagaaacatggacaacgctgtttggaagaacagggcttcccaggaatcaacaatgcccaagaaggaagggattgtagaaatagcttaaccctttcatttaccaacgtggaaattgaagcccagggaagggaagggaccggtcgtggaagggagagccatcagcagaaagagaccctgagatcttcgcctgggattcccaggaagtccagcccgagctgattcacagaataaatgcatgcaaaccctgctatcaataaattacacatgcactaacgtaaaacac

SEQ ID NO: 88805 - DNA, 1031 bp, Homo Sapiens
  misc_feature (918)..(952): n is a, c, g, or t
acattaaggccccattaaaaacaaccccgccctattcccttagagaaccgggaacccccgttacccgaaacttccgaattacgctgggcgtgaacccccctggatatgaggccacccagacccacggctacgcctgtacgtggagaaccagatagatgagaattatggtactgacttggtggcctgcttttatgctggtcacttgccgattttgctgggcttgagtatactgaactcaccttgcctgtaaccacgctttgggggctgtctgatagtaagtttcagcacacagaagactgagcttgggccacgcaagctacacagcagcagttgcacgttgttgttggtagtattgcttactatcataagctacagcaggagctgtggaccttacatatgagtatgaatcctgtattttgtgtagtagctggggtgttgttgttgtgcttcttggtgcctctgagtataaccatagtcagttgctgggtgtgcaggggggtagcccccataagcagcagctgttgcagcagctgcaacagctactggagcaggcctggcaactgcaactggggcggctgctggggcataggcagcagtaactgtgtgagcagctactggagcctgatggacagggtagctagcaactgtagttggatgaaaataggctacacccgaagctggctgctggctatattgggccgcaaccgcccccgccgccgccccgctgtgggtgaatccaaagaagttgccggtcgccattttggcatcttcccccaaccggctgggcacataggtgaaagaaccacagggcatatgggaatcatggctcgggctgctgctcctgaactctgaactctcacccgctccccggaccgtaatggccgaattcccgggcatatgtccggtaccgtcgactgnnnnnnnnnnnnnnnnnnnnnnnnnnnnnnnnnnncgccgcttcctcgctcactcaactcgctgcgctcgtcgttcgctatctaagctaggcccctatatgaggtcagtagctt

SEQ ID NO: 88806 - DNA, 713 bp, Homo Sapiens
gaaaaagacctcatagattggacagatggaattgcaagagaagtcaaagacatcgttgagaaatacccactggaaattaagcctccgaatcaaccgttagcagctattgactctgaaaacgttgaaaatgataaacttcctccaccactgcaacctcaagtttatgcaggatgatcacaatttagtggagagtatttatttgagcctaaattgtaggtagcccttactacactcaactgattgggatctagaatgtaactaaattgcttataaatgtcagagcattttttaaaggtacagtatatggggattgtttcgtttttcctagcaggggaaccttagttaataataaaatactacttatttgagttactgatacagattcatttaaggcttgtgtgcaaattttgtctcaatcttttttccctccatgattttcctatgtgcttcctctggcattcactgtggttttggtaaataattgccttttaaaggattaaacaaatgaatgctacaaagtgtatgttcaagaaaattaaatggtaccactcttccacagtttggaataattttataattgtaaagatagaaattatattgataagtaaatatgtaaaattgtaaatatgtaaaaaaaagaatggtgtctgctgtgcatggcattttatatgttaattttttagtttaaaatgaagtatattgaatgtttaaaa

SEQ ID NO: 88807 - DNA, 568 bp, Homo Sapiens
aggaaagaaaaaaggaaaggcaactgaagattgctaaacataacctaggggatcctgccggaagccgctgaatcctgaaatcctgtgattcccacactcggaagctggtgtcgtatattggccacaaagtagttcagatttgattcagaaataggaaatgaatagaaaagacataacaaaagttagtctcgccttatggtaaagtttgttttactgtctgggtcaagttcaaatgagaagctgggctgattggccagcctctgcgacttgatcctgaagatctgctttcttttctaccagaaggctcctaattcttttatctggaataaaaagggaactccgtcttaaagatgctcacgtgaggcggcatattgccagagggtgggcgcaaagactgggggctggagattccattccaaatctgttactgattgatcagaacactttttcaaatccatgcctcagttttagaaaatcctcattagaaacgctaacagtaaaactggtgaatactaaacacttttaacacccatgaaagcttttgtaaataaagaataaagtgaggagt

SEQ ID NO: 88808 - DNA, 1166 bp, Homo Sapiens
ctcggtctctcagagccgcacactccgcggagctcctgccacagccgtcgccttcgcggcggctctccagccccgcgcctcagcctcggcgccgcatcaccgcgtcccatggcctccttccctccctctgccactccccctccctttcccgctcttcttgcccacccggccggcagagagagcctggatacgaagcaggcgggcttcagagtgggttggaaaaatggaggtgcctgcgcctggatcatgccctcaacagccccaccagcccctgtgaggaggtgatcaaaaacctcagcctggaggccattcagctgtgcgaccgggacgggaacaaatcacaagacagtggcatagcagagatggaagaacttcctgtaccacataacatcaaaataagcaatataacgtgtgactcattcaagatttcatgggaaatggattcaaaatcaaaggatcgcattacacactattttattgacctcaacaagaaagagaacaagaactccaataaatttaaacacaaggatgttcccacaaaattggtggcaaaagctgttcccttgcctatgactgtccgtggacactggtttttaagcccaagaactgaatatacagtagcagtgcagactgcctcaaaacaagttgatggtgattatgttgtgtctgaatggagtgaaattatagaattctgcaccgcagactattcaaaagttcatctaacacaattgttggagaaggctgaagtgattgcaggacgcatgcttaagttttctgttttttatcgtaatcagcacaaagaatattttgactatgttcgagaacatcatgggaatgctatgcagccatctgtcaaggataacagtggtagccatggctctcctatcagtggaaaattagaaggcatcttcttcagctgcagcactgaattcaatactggaaagccaccccaggattcaccttatggaagatacaggtttgagattgccgcagaaaaactttttaaccccaatactaacttatactttggggacttctactgtatgtacactgcttatcattatgtgattcttgttattgctcctgtgggatcaccaggagatgaattttgtaagcagcgccttcctcacccaaattctaaggataataaatttttgacctgtaaa

SEQ ID NO: 88809 - DNA, 573 bp, Homo Sapiens
agtctccatttataagcttgtctctctgcatcaggaagaaaagaaggactaaatcaccagacactcttaaccaatggagaaggagtttaagtaacaaaccttacctttgtttaaggtgctttttctggctctctgccattaagatctacattttccaccctgtctcctctaggacctgagggttatctctttgatatgcaaatgccagggagattactcaccagaagaagaagaagaaatagagctaattggaaattgagcaaataaaaaaatcttgttttttctcccagaaacagtgaaaagctttagccatcctttagataatcttaacttgttcccatctgccagaaacacaatttgggattcagaaattctttatgaacctgttttttgtattatttgtacctgggcacatggctacagttttcaaatgaaaactgtgaaatctgcttctgtctgtattttatgtatgtctgtgtatgcatgtatgtgtaatatttttctacctctagagactatcctaaaattaacttataaagagctgtatttaattgccttaaagaaaaagcaaaa

SEQ ID NO: 88810 - DNA, 895 bp, Homo Sapiens
  misc_feature (862)..(862): n is a, c, g, or t
  misc_feature (866)..(866): n is a, c, g, or t
ttcaacatgttcagaaatctattacatgagttcctcaaagatactcttaatattctggtgaataagattctaaatatgcaaaataaaatctaactaaccccccatttatttgaatatgtgtatcctccaaaaattcctataaacccccggagaattacaaaactttaataggggctggttacgaaacagggcaaggtggcccttggaaaattgatatgcaccagaattccatgttgatccgtgaggaacagtccttattcaggccgtgttggagatggtgtgaccgagaagccggtttgatggcagggagatgcaggggacgggctggtgggcaccggggggactcgggcggcactggacaccggccggcagggcgaggacacgggggaggctatgctggggtccccccgcgcagcagcggcggcggccgcagcggccagcacatggcggtgttgcagtggagcgtgctgggccgcgagctgcagctgcacgaacatcatgtggtcgcccacacgcaaggccagtgtcagtggcgaacggcccgacaggaagtcactgacctgcgtctccgtgagactctcgagagcttgcatcacggactgttccggccttgaggcctgagacatgaggcccgcttccacggtgggtaccaaggtcagcttgctgccatcacccacgccgaactcctgcagcttccccgaactgagccgggtgtctttgtggagaagagccaggcgctccttgggcactttgaggcgctgggacaaccgcttgcgcagcccctccaccgtctcgtcgggcggcacggccaggtcgtagcgggtgcccgtggtgctgtggatagcgaggctcatggcgccgnctcngccgccgggcccagctcgcaggcgccgcc

SEQ ID NO: 88811 - DNA, 543 bp, Homo Sapiens
ggtcccgctgttcccacgtctgcctccctaccagactgagctccaagctgccaggggcctcgtctccatctgggtcccagttcccaccatagagctgggcatggaggacagctcagggaagcttcttgggaaatgaattctgggagttccctctgccaaggacccactgtgttaagagctttaagtcccccttcctcccaggtgaatgtccacttcgaggccggctcaaccaccgtcttcagagaactctcccacactggccacagcctatctgccagcgtcacccactgtctaggtctttgcccataatgtgtcaagggcaaaacagaggggtggatatgatgcacgtgcctcagcccggggcccgtacatggctggcgtccagctgggccaggggagcaggaagacccctggagcaccggaagcaagaaagaggcaggcaggggcggctagccaggtttgtgctcggactattcacacagagacatgtggcagcttacgtcgcacaaaacgagtaataaaaattggctttaaatatggaaa

SEQ ID NO: 88812 - DNA, 612 bp, Homo Sapiens
aatttagagtatgctttctgaaaaggtaaatttatttctattttgatacaatttaaaagggaaaatacatattaaaatttagatttaggaatctttattttggaattagcctatcaaagagtatgagaattaggattcctttgtgacggttctccatggaagtttagggacgagttcttaaatgagaacacatggatggactccaggggagtctgagaagcccttataggtgtgttgtgagagtgaattttagtggcaaatagagtacttgtgatgtgccaggcattcttcttatcaccttatttaaataaggcaagtaacttgtgcaaagttaaggaatttgtccaagaccacagggtagtagatggcagagattggaaccaacccaggaaatcaaataaattttcagaaaaagaaaattcatctgtggtaggtaaatgggaatgttcaatgagattcatttttgatcccatccaaatttttcaattgaaatgcactttctttatggtggtcttcaaaaaaaactccaaagtgtctgaagtttcatcttgaggaaatgtccagaagaaatccaggaaactaagagaagcagtgttcactttgagctatgtt

SEQ ID NO: 88813 - DNA, 739 bp, Homo Sapiens
ggcccttgccaaccccatctaccatggttaacgccggtttgcacggccattaacagtccccgcccattattgcgttcttctcctcagcgggaccgcactctgttgctatggttactgctgaggggtacagaagggcaacaggttgcaattgtagctcaagacttggcagcattccatactgcctcatcagaaatggggcaccagcagcatagccatcacttagtaaccacagaaaccagacctctgaccttagtagcaacatccaatggcacccagattgcagttcagcttggagaacagccatctctggaagaagccatcagaatagcgtctagaatccaacaaggagaaacgccagggttggatgattaatcctcagaacaatggagcaataaagcagaaggagtctttcatcttctggcagcagaaatccatgaagcccgggcccaggaaaattagaagttttccattcctgatacactgtacacatttttatgcgagagtggagaacattttattcttgacacttttgtgtatataacccttggaatagattctcagagtgattcattgtgtacaaggaagtatgaaattagggcaatacagtaaattttcatgttactcttttatcagatcacaaactcctagagtctacatgcaagactagtaaagtcttatggagtcttatgatggatttttaacttcccgtggaacaaaaaactaaaggctgtatctaaaa

SEQ ID NO: 88814 - DNA, 659 bp, Homo Sapiens
aacttaaagatgagccaaagggttatttgattgccttttaattctttactctacgttactcaacatttagatgtcagtacacaagttcagccaaatgcttgtgaaatttcttctgaacgcatcccaggagacttgaccctccccgcttcaggatgctgactctgttttgcctgaaaccagacaagctctgcttcagggtctgtgagtggaaggggggtgggtgggaacctctcgcaacctctcctgggacagacacaatgggcaatcgtgacctcctggggtagatactgaaactgtgacaagtgataacaaaactggcagaaatcagttggacccaatatggccaactggagtttctgcagaaagagcttgctgatatcacagcctgaatttccacgcatgtttcgtattaactgccccggaatttgatttgcacacagcacccatgaggaagcatgaagagataactgcgcatgtctgaggacttgccagacctcctctttccttccaccgatctcctgctaatcccggaacccaccctctaacccttttctaataaaattatttccttaaaggcagcacagcgagacagatttgagctggactcctgtctccgtgttggtcaatttgcaatgaaaagcttttcttttctctgaaaa

SEQ ID NO: 88815 - DNA, 411 bp, Homo Sapiens
gaatcctctaaaataagtcacatgggaaaaaattctgatcttattctagacgaagaatgaaaagccaggaagctacataacccaagggtccccagtttgaaatgtcttgttactgctgacaagacctgcatgactgaccatttgctccctaagagatgaaaactgacattgctttgaagttcaaaatgacattgccaaaacaagaagaaatggaaaataactgcagcacgtttatgacattcgtttctttctccacatgaaacatacaatgagaacactttatagatgaattgtgtcttcgattgaatagagaatggtggactagctttggttttatggaattggataatttgtcatagtttctgtccctggaaaaatgagaacccaaaggaaaacaagtggaaagccttt

SEQ ID NO: 88816 - DNA, 462 bp, Homo Sapiens
  misc_feature (423)..(423): n is a, c, g, or t
ctgaagtgatcctatcttgtgactcatgcatggcacgtctataagtcaagctggaatcctctaaaataagtcacatgggaaaaaattctgatcttattctagacgaagaatgaaaagccaggaagctacataacccaaggtaacaaattaaaaaattaaaatatcatatcccaaaatggaaataaaacagatagaatgccgagtatatattaaataaggcaagctatttatgatgagctaactcacttgcaagttaccagagagcatggagtaaatcctttatttctcatgtcctcattgtgcctaagactgcgtttctgtacacacattaaaaaaacaggaaatcaatggttcccaatggtgatgtgtgaactcttcaggatctggaggaacattattaaattgctccattaactctccctntgtttgggttgaaaataaaaaattgtgatgccaaaaaaa

SEQ ID NO: 88817 - DNA, 1185 bp, Homo Sapiens
ctctttctctctcagcctctttctttctccctgtctcccccactgtcagcacctcttctgtgtggtgagtggaccgcttaccccactaggtgaagatgtcagcccaggagagctgcctcagcctcatcaagtcctcggcagcctgatcttctgcttcggcatctggatcctcatcgacaagaccagcttcgtgtcctttgtgggcttggccttcgtgcctctgcagatctggtccaaagtcctggccatctcaggaatcttcaccatgggcatcgccctcctgggttgtgtgggggccctcaaggagctccgctgcctcctgggcctgtattttgggatgctgctgctcctgtttgccacacagatcaccctgggaatcctcatctccactcagcgggcccagctggagcgaagcttgcgggacgtcgtagagaaaaccatccaaaagtacggcaccaaccccgaggagaccgcggccgaggagagctgggactatgtgcagttccagctgcgctgctgcggctggcactacccgcaggactggttccaagtcctcatcctgagaggtaacgggtcggaggcgcaccgcgtgccctgctcctgctacaacttgtcggcgaccaacgactccacaatcctagataaggtgatcttgccccagctcagcaggcttggacacctggcgcggtccagacacagtgcagacatctgcgctgtccctgcagagagccacatctaccgcgagggctgcgcgcagggcctccagaagtggctgcacaacaaccttatttccatagtgggcatttgcctgggcgtcggcctactcgagctcgggttcatgacgctctcgatattcctgtgcagaaacctggaccacgtctacaaccggctcgctcgataccgttaggccccgccctccccaaagtcccgccccgcccccgtcacgtgcgctgggcacttccctgctgcctgtaaatatttgtttaatccccagttcgcctggagccctccgccttcacattcccctggggacccacgtggctgcgtgcccctgctgctgtcacctctcccacgggacctggggctttcgtccacagcttcctgtccccatctgtcggcctaccaccacccacaagattatttttcacccaaacctcaaataaatcccctgcgtttttggtaaaa

SEQ ID NO: 88818 - DNA, 1196 bp, Homo Sapiens
  misc_feature (561)..(561): n is a, c, g, or t
  misc_feature (630)..(630): n is a, c, g, or t
  misc_feature (853)..(853): n is a, c, g, or t
  misc_feature (904)..(904): n is a, c, g, or t
  misc_feature (1026)..(1121): n is a, c, g, or t
cagtcgacggtaccggacatatgcccgggaattcggccattacggccggggctttctctctcagcctctttctttctccctgtctcccccactgtcagcacctcttctgtgtggtgagtggaccgcttaccccactaggtgaagatgtcagcccaggagagctgcctcagcctcatcaagtacttcctcttcgttttcaacctcttcttcttcgtcctcggcagcctgatcttctgcttcggcatctggatcctcatcgacaagaccagcttcgtgtcctttgtgggcttggccttcgtgcctctgcagatctggtccaaagtcctggccatctcaggaatcttcaccatgggcatcgccctcctgggttgtgtgggggccctcaaggagctccgctgcctcctgggcctgtattttgggatgctgctgctcctgtttgccacacagatcaccctgggaatcctcatctccactcagcgggcccagctggagcgaagcttgcgggacgtcgtagagaaaaccatccaaaagtacggcaccaaccccgaggagaccgcggcncgaagagagctgcgactatgtgcagttccagctgcgctgctgcggctggcactacccgcaggactggtntccaagtcctcatcctgaaagggaacgggtcgcaggcgcaccgcgatgccctgctcctgctacaacttgtcggcggaccaacgactccacaaatgcctagataaaggggatctttgccccagctcagcaggcttgggacaccctgggcgcggtccagacacagtggcagacatctggcgctgtcccctgcagagagcccacatctaaccgcgaggggctggcncgcagggccttccagaaagtggctgccacaacaaactttattttccatagntggggcatttgccctggggcggtcgggcctactccaagctccgggttccatgaagcctcctccaaattccctggggcagaaaacctggggaccacgttttacaaccgggttccgcttcaaannnnnnnnnnnnnnnnnnnnnnnnnnnnnnnnnnnnnnnnnnnnnnnnnnnnnnnnnnnnnnnnnnnnnnnnnnnnnnnnnnnnnnnnnnnnnnnnaaaaatatttggttttaatccccacatttcccccctggggagacccctcccgcccttttacaattcccccccggg

SEQ ID NO: 88819 - DNA, 843 bp, Homo Sapiens
tccaagatcacctcgagtaagccaacgcccaggcaaatgccccacctatggaaataaaggttcttgtgcacccacttctgggaggcccttgcgcgcagcccctcgcggtagatgtggctctctgcagggacagcgcagatgtctgcactgtgtctggaccgcgccaggtggtccaagcctgctgagctggggcaagatcaccttatctaggattgtggagtcgttggtcgccgacaagttgtagcaggagcagggcacgcggtgcgcctccgacccgttacctctcaggatgaggacttggaaccagtcctgcgggtagtgccagccgcagcagcgcagctggaactgcacatagtcccagctctcctcggccgcggtctcctcggggttggtgccgtacttttggatggttttctctacgacgtcccgcaagcttcgctccagctgggcccgctgagtggagatgaggattcccagggtgatctgtgtggcaaacaggagcagcagcatcccaaaatacaggcccaggaggcagcggagctccttgagggcccccacacaacccaggagggcgatgcccatggtgaagattcctgagatggccaggactttggaccagatctgcagaggcacgaaggccaagcccacaaaggacacgaagctggtcttgtcgatgaggatccagatgccgaagcagaagatcaggctgccgaggacgaagaagaagaggttgaaaacgaagaggaagtacttgatgaggctgaggcagctctcctgggctgacatcttcacctagtggggtaagcggtccactcaccacacagaagaggtgctgacagtggg

SEQ ID NO: 88820 - DNA, 463 bp, Homo Sapiens
gtggaaggcacctgctatttggaaactgccaaaggtatatgttcagcagtgtgcccaggattgaaggtgtaaatgggacaaaataaattgtgaaaggaagtgtagttgactgaaaactacagttgtaataagtcttccactttttataggatttttgagcacacaattatgcaaatattttaatgtttattaatgtttacagtggaattgtgaataagttttcagtggactatcttatcccttgacaaaaatattttgtcttttttctatgtaatttcagagtttttattttgttacaaaaagacaaaaatgaaatatataacaacaatgaagttatttaacaagatttctaaagctgaaatttttgtgtaaaataaggtattatcttgcaacttgttaaatatatttattcagacattggacgctctatttttatgtattttttaaaatattaataaaattt

SEQ ID NO: 88821 - DNA, 841 bp, Homo Sapiens
gttcccatccatggcctgctctaggcctgaaggaacacagatggcatttgcaggaagatgacatctcaccatccccatctgagcaaagcctgcccatcaaacaaccaaaggatagccagtcccctgcacagtgtaaagtgacttgcagtgatcctcttccccaaggccagccccagctctcagacctccagtcccaacaagtctttttttgcaaaggaggctcaccctggaacatggctctcccaaggggagacaggaacggatgttgacttcatcccagcagcttctgacacaatgccactatctttcaactttctccaccaacagggtcaggctgttgattggcctcgactgcagttagcctgacacggctagcagcctcaaaacaaattaaacgaggcagggatgccgtgcagtgatcgttccattatgtcccctctgcttccacacgtgactcacactatcacttttagaaggtgaagcatcttattgaatcaacacctaatctgcacacagtgtcacggaggaggggcgaggggacagcgggagcattttctctgatccttttctttcctgaagacttcgctggagacaggctgggtgggggcgaagatgaattgtgaggaaccctgaccctatttcagtactgctgctactgtcagctccgacagatttatagcccattcattcatgggaacaaaaaccctgccacggctggtcatgggacacgcaatagcagttagttcaaaagataacagctgcaatacctcacctctccattcagcactacagagccagcactacttcggaggtaataaatgcttcttgttagtgtaaaaaa

SEQ ID NO: 88822 - DNA, 459 bp, Homo Sapiens
caggttgaacaatacggacagttttcacacatatctacctgtataaccctctgtacctctcataactggtcaacgactgtaacaggttacatcaggtgtttttctacatactttttacacagattctatgcgattaatgtaatttaattcaatgcatcattttattgtactagttcttaggcttgtccttatttttttctaagtgatggtggtttttctcgtggtttttattgtaaaaaatgaaaggctgttgatgcttattctctgtaactaagaatttttaccttttgggggaaaaaagcattgctatgaactaatgaattgaaacttcatttactcattgtaaatacactattgtgcaaaaaaagttttcactcaattgaattgctagtgttaactgaattttgtctagacaccatttctcttgatgaaataaagacatatcattatgcattgtaa

SEQ ID NO: 88823 - DNA, 574 bp, Homo Sapiens
ggtacctggggctctcggggaagaagggcagcagaaggagctgcagcgccgcggggaccccggtcagccccagcaggatcggccagcctgggaggaaggcagcgagctggcaccagcggcctccccaccaccccgaaggcgccctctgcagagccggccccagccccgtcatcctgagtggggtgcaggctccaggagggcacagctttcccagccctaagaacagcaactcccgacggtggacactcgggaaacacctgcagcagggatcagcagcgacgcacccctgcgcccatcagacagaccacaccgacgagaccggtaataccatgtgctggtgagaacgtccccgtgtccttcagaggacagtcttgcaggggctggaggagctgggcatacccggcctgacccaactgcccactcccagctctatgcccagagaagccaggccaccaggatgcctgaactggaatggtcacggcagctctgattacagaaaggacaccagaaacagtgggaatatcgttaacattccacatagaggggacacatgggctggctgcattggtactgc

SEQ ID NO: 88824 - DNA, 522 bp, Homo Sapiens
tctttaaagcagctatatcccaacccatgactttggagatatacctataaaaccaatataacagcagggttattgaagcagctttctcaaatgttgcttcagatgtgcaagttgcaaattttattgtatttgtagaatacaatttttgttttaaactgtatttcaatctatttctccaagatgcttttcatatagagtgaaatatcccaggataactgcttctgtgtcagtcgcatttgacgcataactgcacaaatgaacagtgtatactcttggttgtgcattaacttacatgtataatttttggcatctgtgttcacaaatgcatgtgttagcaaatcacctttatttataagtgacaataattgaagttaaggatataaagaaacctgcatttgtagtccagcgttttcatttggtccataacacaatgtatggaaatgtgaaagacaattttgtacatttgtttgttactaactcagatcattaaaatgaaaacaatttttttaaacaagaaaaaaa

SEQ ID NO: 88825 - DNA, 909 bp, Homo Sapiens
gggacacaggggggcggggaaggaagatggcggcgcccagcgtcccgtgaggagagaggacacagggatcccggggagcggccccagactcgtaaattatggccgcatctccgcacactctctcctcacgcctcctgacaggttgcgtaggaggctctgtctggtatcttgaaagaagaactatacaggactcccctcacaagttcttacatcttctcaggaatgtcaataagcagtggattacatttcagcactttagcttcctcaaacgcatgtatgtcacacagctgaacagaagccacaaccagcaagtaagacccaagccagaaccagtagcatctcctttacttgaaaaaacatcttcaggtcaagccaaagcagaaatatatgagatgagacctctctcacccgcccagcctatctttgtccagaaaagccaaatgaaaaggaattgatagaactagagccagactcagtaattgaagactcaatagatgtagggaaagagacaaaagaggaaaaccggtggaaaaaagatgaaagctgcaagtggtatgatttgcccaggaattttggggctcaacctatccaaaaatcaaactccccgggtacctttgggtttttccgaatataccttactttatttgaaaactctaatctttaatgaaaaccaaaaggctaatttttattttaccaccctgaaaaaagaataaatttgtgaaactggcaagaccctggtctttaaaaattttttccctcccctttcattttaaactgggggattttgaaaattaaaatttttcttgaaaattcttatttttacacccggaaattgggtaaaataggctattcgcgcctttggaaagagaaattgggaattttaaaagaataaagtccaccccccttttt

SEQ ID NO: 88826 - DNA, 469 bp, Homo Sapiens
cactgcagcgggatctgaacagtgtttcgcctccgtgtacaactggactcctgcgtgcctgcaggctcacactgcttctccctctccctcctaggcactgctcaggcctcacgggccgcaatcgccccatctcgcccatgccagtcttgctcctcccagtcactctgcactcactccccggccacctcacagagttaagtggcatctacatgctgagggctgtacatctaagtccctggccagacctgtctctccagacttgacactccgcttgtttgcatgatacccagccgaaacaaacatcatcttcccaaaactgcatctgcagacagtttcctatctaacctgcaacaacccatccttccaggaacttccagtcgccatcctcatttcctcacacaccccacagtcagtccaccaggaaatcataacgaaccagcttccaaataaactctatccgggtttgaaa

SEQ ID NO: 88827 - DNA, 284 bp, Homo Sapiens
agtgggtgagacatgaagctctagccagaaagggctaatgtgatggccacagtggcagaacctaggaagccaagaagaaaccagagaatggagacacatggcagcaatggcaagtcatcagacccaggatttcccaaagaacactggtccaggaagatgctctgtgaaaaagtgttccctggtcggagaaatttgtgaaacactttgcataatacttaaaagaatgtatggcacatcaaaggtaatatgcaataaaagaattcatttttttaaaaccaagaaaa

SEQ ID NO: 88828 - DNA, 429 bp, Homo Sapiens
cttgccgtaaactgaagcagagtgaactgaggaccacggaaggattaaaccaaaagtggaaagagctcgtgtctgggggccccactcccagggaggaagcgttgagcagtggctggaggaagcagcagacagttctggggcacacggagtcccccctcctgcccttctactcctcttacaccagagagagctaacaaggatgcagtggcttaaaaatcctatcaccaagccaaattcagcccttagcatgcctctgaaaccaccgaggaagacttagccacttaccaagaacaaggtaacctgtgttctcccgggtgtaaaccgcgtctctgtgaagggaaagggggaagagggccggcaaggacctccagtatcagcgaggactatcaggacgtcctgctaataaacgactttttcactgtccacaaa

SEQ ID NO: 88829 - DNA, 491 bp, Homo Sapiens
caggcatccaacgcactggaggagctttgctttatgattatgggaatgctaccaaagcctcaggaacaagatgaaaaagataatactaaaaggttcttatttcattattcgaagacacagaagttgggcaagtcaaatgttgtgtcgtcagttgtgcatccgttgctgcagctcgttcctcacctgcatgagagaagaatgaagagattcagagtggacgaagaattccaaagtccctttgcaagtcaaagtcgaggatattttttattcaggccacggaatggaagaaggtcagcagggttcatttaaaatggatgccagctaattttccacagagcaatgctatggaatacaaaatgtactgacattttgttttcttctgaaaaaaatccttgctaaatgtactctgttgaaaatccctgtgttgtcaatgttctcagttgtaacaatgttgtaaatgttcaatttgttgaaaattaaaaaatctaaaa

SEQ ID NO: 88830 - DNA, 560 bp, Homo Sapiens
  misc_feature (226)..(256): n is a, c, g, or t
  misc_feature (258)..(258): n is a, c, g, or t
tagagtcatttaaatatgggtacttagctgactctacaaagaaaaaacaaagaaaagtttattttaacatggtaaattatttgaaaatgagaaaacaaaacatgtgtttgcattatcctattcctccccattggctggctcaaggggatgaatgagtttcaggaattagacaagtctgccacactaacaaacgcttcatgagaattgctgatttttgtgtgtcccnnnnnnnnnnnnnnnnnnnnnnnnnnnnnnnangggcatttgcccagtaaaaatagtaaggaaggtagaatcacacatcggttttagagttatttgatattgcaaatactgggaattgacttttctggaaattagaataaaacaggccaaccacaggtcagtgataaaacaacaaaatcttaggatgttgaggatactgaattggcccaagaaataaagtcaaggagaacatttggaaggaaggtctttgcagtaccttactgtgctaaaatcacagagtaaaaaagtgagagatgaggataccacaggcattactttgttgaccttgtacagta

SEQ ID NO: 88831 - DNA, 906 bp, Homo Sapiens
  misc_feature (586)..(596): n is a, c, g, or t
  misc_feature (896)..(896): n is a, c, g, or t
gcggccgcccaggaggggtggggattggggcgaggagacccaagtgcagcgaagggacacttgatgggctgaggttcccaccccttcacagtgttgattgctattagcatgataatgaactcttaatggtatccattagctgggacttaaatgactcacttagaacaaagtacctggcattgaagcctcccagacccagccccttttcctccattgatgtgcggggagctcctcccgccacgcgttaatttctgttggctgaggagggtggactctgcggcgtttccagaacccgagatttggagccctccctggctgcacttggctgggtttgcagtcagatacacagatttcacctgggagaacctctttttctccctcgactcttcctacgtaaactcccacccctgacttaccctggaggaggggtgaccgccacctgatgggattgcacggtttgggtattcttaatgaccaggcaaatgccttaagtaaacaaacaagaaatgtcttaattatacaccccacgtaaatacgggtttcttacattagaggatgtatttatataattatttgttaaattgtnnnnnnnnnnngtgtaaaatatgtatatatccaaagatatagtgtgtacatttttttgtaaaaagtttagaggcttacccctgtaagaacagatataagtattctattttgtcaataaaatgacttttgataaatgatttaaccattgccctctcccccgcctcttttgagctgtcacctttaaagtgcttgctaaggacgcatggggaaaatggacattttctggcttgtcattctgtacactgaccttaggcatggagaaaattacttgttaaactatagttccaaagttgttagccaagtaaatatcntagttgaact

SEQ ID NO: 88832 - DNA, 792 bp, Homo Sapiens
  misc_feature (297)..(297): n is a, c, g, or t
atctccctccacagaagggtgccgccagctccatctccatcctggagcaggagaaggtcgtcgcgcagcagatccgcagctcttccccaagttcgcggacacccccatttacaacgacgaggcggacccgctggtggcctggtccctgccacagccgtggagggcgacgtgacctacgcggccatggtgtgaaggtcatcgcgcagcatcagaacctgctactggccaacaccacctccgccttcccctacgcgctcctgagcaacgacaatgccttcctgagctaccacccgcacncccttcgcccagcgcacgctcaccgcgcgcttacaggtcaacaacaccggcccgccgcacgtgcagctgttgcgcaagccggtgctcacggccatggggctgctggcgctgctggatgaggagcagctctgggccgaagtgtcgcaggccgggaccgtcctggacagcaaccacacggtgggcgtcctggccagcgcccaccgcccccagggcccggccgacgcctggcgcgccgcggtgctgatctacgcgagcgacgacacccgcgcccaccccaaccgcagcgtcgcggtgaccctgcggctgcgcggggtgccccccggcccgggcctggtctacgtcacgcgctacctggacaacgggctctgcagccccgacggcgagtggcggcgcctgggccggcccgtcttccccacggcagagcagttccggcgcatgcgcgcggctgaggacccggtggccgcggcgccccgccccttacccgccggcggccgc

SEQ ID NO: 88833 - DNA, 509 bp, Homo Sapiens
tccaaagccgagagcctcgggacctccggccaaggccacggaggcaggaaagaggaagtcctcctctcagccgagccccagtgacccgaagaagaagactaccaaggtggccaagaagggaaaagcagttcgtagagggagacgcgggaagaaaggggctgcgacaaagatggcggccgtgacggcacctgaggcggagagcgcgccagcggcacccggccccagcgaccagcccagccaggagctccctcagcacgagctgccgccggaggagccagtgagcgaggggacccagcacgaccccctgagtcaggagagcgaggtggaagaaccactgagtcaggagagcgaggtggaagaaccactgactgtgtggatggccagcttttcccctgtctccgagagcaccgactaagttcaggcccagccgccagacctcagagatctcaccagcggggtgcttgccattctgaagataataaaatgaatgtgttgcaaattgaaaaaaa

SEQ ID NO: 88834 - DNA, 551 bp, Homo Sapiens
ggggatacacagggaggccaggcagcctggagttagtcgaccgttgcgagacgttgagctgcggcagatgagtccaaagccgagagcctcgggacctccggccaaggccaaggagacaggaaagaggaagtcctcctctcagccgagccccagtggcccgaagaagaagactaccaaggtggccgagaagggagaagcagttcgtggagggagacgcgggaagaaaggggctgcgacaaagatggcggccgtgacggcacctgaggcggagagcgggccagcggcacccggccccagcgaccagcccagccaggagctccctcagcacgagctgccgccggaggagccagtgagcgaggggacccagcacgaccccctgagtcaggagagcgagctggaggaaccactgagtaaggggcgcccatctactcccctatctccctgagcagcaactaagtttaggcccagctgccagacctcagagatctcaccagcagggtgcttcccatgttgatgacaataaaatgaatgtgttgcaaaccgaaaaaaaa

SEQ ID NO: 88835 - DNA, 556 bp, Homo Sapiens
  misc_feature (22)..(22): n is a, c, g, or t
caattaatggcacttatgctcntaacagcccagccccaggagttggtgatgttcgaggaggtgtcagtatgcttcacttcagaggaatgggcatgtctgggcccaatccagagggccttgtactgggatgtgatgctggagaattatggaaatgtgacctccctagaatgggagaccatgaccgagaatgaggaggtgacatcaaagccaagtagttctcaaagagcagactctcataaaggaacatcaaaaagacttcaaggaagtgttccccaggtccttgattttgaagaagagtgtgaatggcaagttttggcaagtcagtggggaaatgaaacagatgaaagggcagatacagtgaagaaagtttccctttgtgaacgagacaagaagaaaaggactccaccagagaaacaaggccaaaagtggaaggaattaggagacagcttgactttcggttcagctatttctgaaagtttaataggtactgaaggaaagaagttttataaatgtgatatgtgttgtaaacattttaataaaatctcccatcttataa

SEQ ID NO: 88836 - DNA, 813 bp, Homo Sapiens
gtcttcatagatttgtttattctggacattcaattcatttgccttttccccatcttggcctttttgccagacatactcttaggggaggactttataattaccaccctattgcccccttccatctcttccccacttgggtagcagcccttacgtaaggttgggtgttactgaccttacctccagttcaggagaaagccttaattagggatttcatcacatccaccaccttacctcaacaatttgttcagacgtaagcatatgacctaacttcttggtgcaatcagagtggcggtcaggatatctttagaggagtggaggttgacttacctgcagttaatgcccaaattttaagtgtacattttgttgaatttttacatctgtatatactggtgtaaccaccatgcagatcaagatatggaacatatctatagcactccagatgcttcatgcttcctccccatcagtatcttcactccaagaataaccattattgtgacccaaagctcaaaaattttgttcattgactgagaaaggagtcactggctctcttcccctgcatatggggaaataggtatgcaagcctaggcgcttcagaaaattgtctggctacccaagtgaagccagtctgagaataacaagaacacgtggaggagagcgcagacaggaaaattccagagaaacaaaaccacagatctaacaacagtgaatttttacattaaatcaatcctgaagctatactacctttgaattttccagtctccagtaagctattttattgtttaaatggcttcaactgatttttttctcaactca

SEQ ID NO: 88837 - DNA, 189 bp, Homo Sapiens
ccatttgatggttcttactttgtaaaaatttaaataaatgaatgtctatactttttataaagaaaagtgaaaataccatgacactgaaaagatgatgctatcagatgctgtttagaaagcatttatcttgcatttctttattctttctaattatctaaaattcaataaaattttattcatataaaaaaa

SEQ ID NO: 88838 - DNA, 167 bp, Homo Sapiens
ctcagacatttcatcctgtggacactaaaggcaaacctctcaacctcctaaacatcaacgtgtagcagtgacctccaaatgcactgaaagaacccaaactcttagcggtcattcctcaccatgagtagccacaactgtttggttaaaacactgaaaatacagtacat

SEQ ID NO: 88839 - DNA, 386 bp, Homo Sapiens
tgaggaccacgaattcggattctccgggagttcttttgccatggcaccgcccccgccacttccgctaggaacccggaagttcctacccgacgccggaagtcccacggccttgcctcctcagattcctctctcacccccacgcagaggagagaacttgcttctggacccgggtgggtgccggctcggctctccttgtcttccagagcggtggcccggaagcacagtcctcccagacgccagcgccagaagctcggatcgcggctgcaccgggagagcgccgatctgggtgcgaggcaggtgcggggccatgaatcccaccgcaaacccgctgctggaccgcgaggaacattgcctgaggctcggggagagcttcgagaagcggccgc

SEQ ID NO: 88840 - DNA, 532 bp, Homo Sapiens
gcctggctggcacatggtttatttggggggagatccaaaaagcccccatagggatttgggatgagcgacaaggaaggaaggagccctgcagggggctttaatgagcaagtggcactgtggacaaccagggatcggttctaccagggattctgggagactcagaagaactcacatctcagaattgtcccatcagaggggtttgtccaggagtgaaattcacccagaggaagagctgagagctggagagagactaggtgcagatgacatggctcacatctagctgtgcctagatcaagccagacctaaaggttatatatctctaacttcctgagccaacaaatcaccttttcttccctaacccaccttgacctgcagtttctgccacttgccacccacacaggagctgtcacagacatagaaagccagggtcccagatcagccactcattccaggggaggaaggggctcacctttgggtctggggatacagcaggaagtgagggtcactgccaccccatctacgtgcagccccc

SEQ ID NO: 88841 - DNA, 501 bp, Homo Sapiens
ttttacctttcccctcctccctcctgcagtctagccaccctatgaaaattatctaataggcagagtggtaccttaatccaagaaagatttggagccacttgcagtaactttttcttttcccagataaagttctaatactcaaaaaagaagagttgatttaagtcccatatccttcaggaatgaggtataggatataaataaattcaaagtaccacattctaagatatttcactaaacattggaatgaatttttcccctttatgtactttaaaatatagaaaatatgcagttatgactagaaatagctgtaatattgtacctgcagagttgagtatctcactagtataatttataattataacctattctgatttcttttcaaatattaggtgtcctagttgcctatgaaggtttgccacttcatcttgcactgttccccaaactttggactgagctatgccagactcagtctgctatgtcaaaaaactgcatcaagctttt

SEQ ID NO: 88842 - DNA, 652 bp, Homo Sapiens
gcggccgctccaacatcagaaaacacttgactttgaacctttagaaggaaatgtgtcatgaacgtgtagacaatgttgttgtttaaaaaagttctttcatccattaggatacatttaatatattctgcgaaaacaggatcttcacacaaaagcttgatgcagttttttgacatagcagactgagtctggcatagctcagtccaaagtttggggaacagtgcaagatgaagtggcaaaccttcataggcaactaggacactcagcttaactaatgtttcagtaaatttttcacagttgattgcaactcggcataatagatggatgaactgatgataagaaaagaagtagtctagcagcatacgatcataaacgtcatctttgcccttactggtttccaccattgtgggcaagaggcacatattgagttcagggcgcggaggccgaatattgcttttccctcctattagcttgatattttctcgacaagggaaataaggtccaagagacattggtatattactgtgatggtaagtacaatggttgtgttgtagaaagggaaccagagtatgaagaaaatcatggggactcaaaagtacaagttccttgaggacatctatacaggcatttctaagttctggaggactataggaat

SEQ ID NO: 88843 - DNA, 453 bp, Homo Sapiens
gaccagtacaggtacgccgcaggagaaaacgaatacagcagggatgacttccaccagctccactttgcagctctgaggtgtattaaaaatgacctggaagaagtcatgccacgggccagaccttaacattcctttcggcttaccccaggatttcagacgaagcttcactttcctaaccagtcacaaatcagagaatttttgattccacctatgacctgtgagctcctgcttcaagatattccaccttttttaggccaaaccaatgtataacctccaagtgtcgatttacactttcgactgtaacttctgctttcctgagatttacccctgcctttaaaaacccttgcttgtaatccctcagggaggccgtgtatttattaatcatgagctgcccaattctccttgcttggtgccctgcaaataaacacactcttttctcccaaagcaaaaaaa

SEQ ID NO: 88844 - DNA, 559 bp, Homo Sapiens
  misc_feature (525)..(525): n is a, c, g, or t
ctttagagcaatttggcagtaactggccattttaagcacatgggtgtcgacccagcaatcctacctcgaagaatttatccctagtacacaagtaaaagtatgaacgcgtctgctgccaacactgatgcaataaaggagcaccgctatgtgtcaagcacttttctaaatttagctggaaaatatggtgtgaacaaagtccttgttctcatcgacaaagcaaaagccaaaaaacagaaacaaccaaaaggcgctggaaataatccagttcattgccatgacctgattaaataaataacacagccatatggaatgttacctaacttccaaagtaatttgctatgtttgtacatgttaatatgagaaaaagtcttcaaagatttcacagcatgatcccatttgtgcaatcgtaaaacaagttacttcgtacttactccaggattttttgcagtttttaaaaacactgcattaacacttccaaattcgaactccacccaccccccatcccggttctaacaatcacaccanacatccaccagtgatcagcgaagatgctcttctg

SEQ ID NO: 88845 - DNA, 537 bp, Homo Sapiens
  misc_feature (262)..(332): n is a, c, g, or t
gactggagttagcaactcaacaggtacattcaccataatctccatgtaataaataagagcctatgaaaagattaaataaatctttcctaatgctttttgactggcttaatcaataattaatcatctttagatgaggctgtaacttgtggagtagatataattggattagctgaaaagcggcagttgcggagctttgaagagattaaaatggctgtcaatcccataattaaactgccacaaacaaaagcaatggtgttttttnnnnnnnnnnnnnnnnnnnnnnnnnnnnnnnnnnnnnnnnnnnnnnnnnnnnnnnnnnnnnnnnnnnnnnntggggaaggccaactaatttgaaatgaatcaacatgtacttacatatcactagagactgaggcaaaatcaaaaccgacagatttattccattgaatgaagtgtatgcatatcaaatcagccatttaattgtatgctccaaccactggggcaggtgaaattttggcagcttcaacttgtctaaaacaaaaccaatccaccaaaaaa

SEQ ID NO: 88846 - DNA, 451 bp, Homo Sapiens
aagcttctagacactccttgaaatgtgtgtgtgatggagggaaggggacagatttgaggactgaagctggggcttggggattgccactaagtacagctgacggtttctccccggacactcgcctactaagtacccttggggtggtgctgggtcattacttctgagccccagccccaatccagagaagcgctgttgcccgccctccacccactaggtgaacagcaggatgccctgttgggggcttcaggtctctgtgggtgggaatgcaagtgaacttgggagggggcacgggcctgtagatcagggatagcgctgttgatcccctctctgtggctccaacccgttgggtcccttgctgcaaacccacagccctgaaacgagaagtgcccttaaggatcaccccagcccccacagccctggaataaatttcgcaattagtttccaaaaaaaa

SEQ ID NO: 88847 - DNA, 489 bp, Homo Sapiens
  misc_feature (168)..(168): n is a, c, g, or t
tgttgggggcttcaggtctctgtgggtgggaatgcaagtgaacttggaggggggcacgggcctgtagatcagggatagcgctgttgatcccctctctgtggctccaacccgttgggtcccttgctgcaaacccatgaagctggccctcagctccctgaccccctgtcntaggtcatgaaggacactctgggtgaagcaccagggagaggcctcggctgtctcctgtccccggcggggtgcctgctgtccgtcccgctttcatgttactgttgcagcttgtgctgagcctgcccagttggaggagactgggcacccctgcctcctgcctcccgcctcccgccaccctgtctcagtacctcccctccccgccccctgaaacatgtgcccctgccaaggccggagacccacagccctgaaacgagaagtgcccttaaggatcaccccagcccccacagccctggaataaatttcgcaattagtttccaaaaa

SEQ ID NO: 88848 - DNA, 854 bp, Homo Sapiens
  misc_feature (295)..(312): n is a, c, g, or t
gcggccgcctgcggactggagacccgggaggacggacgcggacgcgggctgctcgtcttttacgggccgtgcaacgcccaccacgacccactcctcttggagaccccgggcgacggtggggctcttgggcattctgagactgcgcttggtggagaccccgggcgacggtggagctcttgggcattctgagactgcgcttggtggagccccctactggccagactggatttctcagcctgcgactcagccccaggctacacgaaagaagccagacctgggtaattcttctagttcnnnnnnnnnnnnnnnnnnaattgcactgggaaacttccccaatctcggccccagttctttctccaaactaaggagtcatggcctttcgcccgctagtccagtatgcacccgtaggcgcttcattttctctcctcttgtcagcttttactgcctcctgaggccttcgtcttgttcacactgagtgtccagtccctccaaatccggctacactctactggcaaggagcacctgggccatgttttagagatcatccgaggactaaccccaaaagtttatgaagagaaagcagaggccgagctgaagagatggacccgggtcacacccaggtaaaggcaggatctaaactgaaactggtgtcagatctggttgccttgcacccctgatatcaggtgaagcaacactgggcaggatagagcagagtgaggtcagagtgtgaagatccagcctgatgcccaaactgacgcctcttcattctcccctgctccatctgtaaacgtcacggttaatccatctactttattgcattatatagagaaataaatgaaatgtaaaagctgaaa

SEQ ID NO: 88849 - DNA, 451 bp, Homo Sapiens
  misc_feature (145)..(153): n is a, c, g, or t
ctcctaggagccgaagggacgggaggccgcgtagaggaggggaccgtccccgagcctcgccgagcctgcggtgtagacacctctggtgtctagtggttgaggatctgttgaccgggcatggtgggtagaaggaacgctccgagcnnnnnnnnngtggctgtcttcccactgccccaaggagaggggacctggccggggcccattcccctatagtaacctcaggggccggccacgccccgctcccgtagccccgcccccgccacggccccgtgtcttgcactctcatggcccctccaggccaaaaactgctcttgggaagtcgcatatctcccctctgaggctggatccctcatcttctgaccctgggttctgggctgtgaaagggacggtgtccccgcacgtttgtattgtgtataaatacattcattaataaatgcatattgtgaccgtt

SEQ ID NO: 88850 - DNA, 455 bp, Homo Sapiens
ctggtgacctataaatatccacaaggtgccggaacacatgaacaaagagatagggacaagtattacagatgtttgagagtctggatctccagtcgaagaaagaataaaaagagccctggtacaacactggtagacagagaactggtaggcgaggctgggaaaccagataacaaagcccacggcgattcagaacccagagtaaacaggctggaagcgaggctgagcagctctcctgcctaaggcatggactttgccaggtacatttcaactgctcggagacctggagccaggtcctggttctcaaccccacttgggatagctgcaatgaacatgatggctacaaaatgaacctgtagaagaaagggacttgctgcgatcatagaattccctgtttcacccatttccccagcacatgaagtagataaaaagaaatatttattgaaaatgcaaaaaaa

SEQ ID NO: 88851 - DNA, 490 bp, Homo Sapiens
tggaggtgcaaaggcggtggactctcgcctgtcttctccgtgggatccacaggatagtccgaggatcctaggagagggcagatgtgagcgagcctgaagaaacgtcaggcagagccccaggagtaaaccgcgaaatccctagggatccaaaaggatctgaaggatgcctcaggcctgtctagtcgttgtagggatatggacactattgatgggagcggctggccatctggagtggcagttgccatcatgccagtagcgcttgggccgcatgggcagtgttgtcaggaacagctgcagacccaggcacctctgcactcttggggcctgggaaggcccccgtgaccacacaggctcggaagtgcctgcccccactgtctgggttctcctcgctgtcagcacctgctccaatcttcgagcaaagttgaggtcgagcacactatattgtgaccaatataaaatagatataaaaatacctcttacacttaaaaaa

SEQ ID NO: 88852 - DNA, 533 bp, Homo Sapiens
  misc_feature (100)..(100): n is a, c, g, or t
tacatgacacattgcacttgactgctgttgctcggcacagtgctcctgacgacagtgcgggccgaatgcagccaggattgcgcgacgtgcagctaccgcntagtgcgcccggccgacatcaacttcctgaagcacccccgcatagatcaattcattcattcaacaaatgaatatttgatggaagaggctccagatggagggaagagccagtgcaatgcctcaaaatggagacatggtgtattaatggagaagcagcaggacttgtgaaagcctgggacgagggcttggggttttattctcaatatgatagaaaatgattcaaggctgagagcaggagagtggcaggatatactgacttatttaaatctcactgtctcccacaaagaacaagttttatctctcctcatgctcctgagagaagaatgtactgcttatctaccatcatttctgcatccatcgaaacatctgggtttacctgaaaagaaattatataaaactttcagtgttttctaataaaaatgcaatgaatacaa

SEQ ID NO: 88853 - DNA, 427 bp, Homo Sapiens
ctaaagatttggacccagaccgtgccactgccaactgccctcccgcccttgctcccttcccgggctggggccagtgggccctgcctaggggagatgtggacagcgccggcagctcgtgttcgcagtcaccctgaacgcccccctctgaactcccacgtgtctccattctcctaagctcaggtcgtcaaaggcaaacggagaagcccctttaggtcggagagtggtcagtattgcccacccaaagctgggagaaaaacgggaaccccaagagaacctcttcccaccaaagcgcagccaccacgccacagatggcgcccttcaacagtgtgtaataccacaacatgctgtaatcgtttactctttacaaatttaaatttcacgtactcacaaaatagtacaaattaaaaaaagttacaaaaacgttaaa

SEQ ID NO: 88854 - DNA, 388 bp, Homo Sapiens
attcactccatcactagagaacactggcttagagctgatgtgcctcagacacaggtgcactcatggagcacagaagcgagttggacaaagtccgggcctttgtagtgtgacgtggccattagggcccacagatccttccctgcagttgctgtctccctttcttcaggttccgaggaagccttccctggccgccttcataactctgacctcctccctccctccaacctaccagcatcaaatgcaccagctatgctcctcttttcccttgccgtctgttgccctgcactttggcccatctcaaactttctaataactatcatctgagcctaaaatgccaattctgtcttttttgtctaaaataaatggaaggcccattacagtcactcag

SEQ ID NO: 88855 - DNA, 717 bp, Homo Sapiens
gggactgctgtggcggcagctggagcggcggccgcggtggcagaaccgggggcggccgctgcagtctggagccccatagtgcggggccgcggccaggccacaggaagagctcgaggcccgggccgcaccggctgagtgtgcgggcccgcgcggctcggagccgccgccgcccatcgagcccctccgggcgtgggtcggcccgccatggggtccctgttccggagcgagaccatgtgcctggcgcagctcttcctgcagtcgggcacggcctacgagtgcctcagcgccctgggcgagaaaggcctggtccagttccgagacctcaaccagaacgtaagttctttccaaagaaaatttgttggtgaggtgaagaggtgtgaagagctagagcgaatattggtgtatttggtacaggaaattaatagagctgatattccccttcctgaaggagaggccagccctcctgcgccacccctgaaacaggttctagaaatgcaggagcagttgcagaagctcgaggttgaactgagagaagtcactaagaacaaggagaaactgaggaaaaacttgctggaactgatagagtacactcacatgctgagagtgacaaagacctttgtgaaacgcaacgttgagtttgaacccacttatgaagaatggccttgcttagagagcgattctatgttggattacagctagatgcaaaggcgtggagca

SEQ ID NO: 88856 - DNA, 482 bp, Homo Sapiens
  misc_feature (442)..(442): n is a, c, g, or t
gcggccgctgcagtctggagccccatagtgcggggccgcgtccaggccacaggaagagctcgaggcccgggccgcaccggctgagtgtgcgggcccgcgcggctcggagccgccgccgcccatcgagcccctccgggcgcgggtcggcccgccatggggtccctgttccggagcgagaccatgtgcctggcgcagctcttcctgcagtcgggcacggcctacgagtgcctcagcgccctgggcgagaaaggcctggtccagttccgagacgtgagtgtcgcccgggagacgcgggccgcacctgctctcctggcgcccccaatcccgcgcatcgctggggccctcccgcggggagcaccgaggaagggcgcgccccgtccccattgtccagacggtgaagatgacaccccagctcagcggccaaagcttcccggagcgcggngctgactccagggtcgccggccgtctgtgtggtcggcggc

SEQ ID NO: 88857 - DNA, 401 bp, Homo Sapiens
cagaacctaaatattgatgaagaggggctgattctaggcacagcaggtggtggaagcctaatagttgtgcaggtgattttataatgttaaaagcacggagtggccacagttggatctgaccgagggaactgaatcttttcctccatgtgagagctgttgtcagcccaacaggggtatacatgtacctgggacagggcagcttcccattctgcaatagtggcatgatacccttttcctgagatgcattcagggttaaagaagatagttcacctacacgttagatttcccgtgaagataaaaagtcccaagttttgaaaagcagaaggaattctaaaaagaactgaaaaacaaaagcccatggggagagtgatgaaatgagtttctgagaaagactgtgaaga

SEQ ID NO: 88858 - DNA, 504 bp, Homo Sapiens
  misc_feature (41)..(41): n is a, c, g, or t
  misc_feature (44)..(44): n is a, c, g, or t
gccaagcgcgccattgagccgtgcctgccccggacgagcgncgncggcgcgggcggccccggcgcgggcggggtcatgggctgcaccgaggcccggcggcgctgcgaccgcgacagccgctgcaacctggcgctgagccgctacctgacctactgcggcaaagtcttcaacgggctgcgctgcacggacgaatgccgcaccgtcattgaggacatgctggctatgcccaaggcggcgctgctcaacgactgcgtgtgcgacggcctcgagcggcccatctgcgagtcggtcaaggagaacatggcccgcctgtgcttcggcgccgagctgggcaacggccccggcagcagcggctcggacgggggcctggacgactactacgatgaggactacgatgacgagcagcgcaccgggggcgcgggtggagaccagccgctggacgacgacgacggcgtcccgcacccaccgcgcccggacagcggcgctgctgcatcgggcggccgc

SEQ ID NO: 88859 - DNA, 1058 bp, Homo Sapiens
cacgtataggtgagatggtaattgcagggaacatcgttggcctggccattctcatgccaaatgattacaacacagtcttctccagcagaaaagaagctgtctggctggttgggtctccaattctcgtattgcagtgtgctgccatcagtccaacggaagtcatgctcaaacatcttgtcattgaggcctatccactgataatcatggcccacacgattaacaaacatttgttcttcgtgagacaggatgcttgtgagatgggcaccctgcagacggcattcccgttcagctgcatcccatgtgcgtcgatgggcaaagtaatttgtagcactgcccttggaatttgtgccagcaatagtcacatgtctcggtatcttgctcacaaagtgcaccaacataacttggaaggcagaggcacctgaatgtgttaaaaccatcaacacaagtggctccattacgacagggattagagtgacattcatcaaaatcaagttcacactggtctccgctgtatcctggcacacaggtgcatacgtaggaagtttcagtaggataacaggtgcctccgttaaggcacgggttcattttgcagcgatcaggtccacttaatgctcagaaactgtttttcttcgaaagtgtgcactgaagtctcttctgcgtacattaacatgctttttccaaaaacacgttccaaatgtactcctttaaactggtaaatagattgccgtgccttccactgactcttcattaatgccaatcaggaaatctgtttcattagaagtctccagaagggaaaatggtggtgttgcaacctcagtattaaattccacagggtttactgttgcctgatcattggaatcaagaattctcgctgccacttgctgttctgatgctgctatcgtggaatcctgcccttctgattcatagactcgtcgtatggaggattcaggttatattatctgatggagcagatgaaatgcatgggacctccgtgcagatcatcctgtggaccttgagtccaagactatcaccaccatgcgctcgaagcccatagctgg

SEQ ID NO: 88860 - DNA, 423 bp, Homo Sapiens
  misc_feature (70)..(70): n is a, c, g, or t
  misc_feature (76)..(76): n is a, c, g, or t
  misc_feature (111)..(111): n is a, c, g, or t
cacctgaaatgtgttaaaacccatcaacacaagtggctccattacgacagggattagagtgacattcatnaaaatncaagtttcacactggtctccgctgtatcctggcanacaggtgcatacgtaggaagtttcagtaggataacaggtgcctccgttaaggcacgggttcattttgcagcgatcaggtccctggtaaatagattgccgtgccttccactgactcttcattaatgccaatcaggaaatctgtttcattagaagtctccagaagggaaaatggtggtgttgcaacctcagtattaaattccacagggtttactgttgcctgatcattggaatcaagaattctcgctgccacttgctgttctgatgctgctatcgtggaatcctgccctctgattaaagctgcttgagtttcag

SEQ ID NO: 88861 - DNA, 682 bp, Homo Sapiens
  misc_feature (562)..(591): n is a, c, g, or t
gtgtctgagccccgcctcctacctcaatcccactcaaggtatttgaaaagaaaatgctgttcattaggatgctgaggcgagcggggcagagcccagcctgtggctgttggacgcctgtcctgccggtccgctttctgggcatctcccctcggcaaattccagcagatgctaacttccactctgcgtctttctctgacacagaccatccacgagtcttaattacaggggctcttggccagctgggagtggggcttgctaatcttttgaggaaacgatttggaaaggacagtgtgattttgtctgacagaaggaaaccccccgatcatgtctttcacagtggcctgcataacatcctggatgtcgctgcggaacacaatctgcaattgtttgtgcctagcacgattggggcttttggacccacctctccccggaacccaacccccgatctctgtattcagagacccaggaccatctatggggtgtccaaggtccacgcggagctcatgggagaaatttctgatgcctgagatatcctggaatcatttcagctgactcccagccnnnnnnnnnnnnnnnnnnnnnnnnnnnnnnccaggctaggctggattttcctttcttattctggcatagcgccatgttcttttttttcaaatcaaaaaaatgacatgatttataagttcgc

SEQ ID NO: 88862 - DNA, 333 bp, Homo Sapiens
ctcattttgacccaatgggtgtacgcacagatgcacctctgatgcagtttaaatctatccttttaaagtacagcacccccacctacactggaggacagtcagaaagccatgtccagtcagcatctgaagatacagtaactgaaagagttgaaatgtcagtgaatgacaaagcagaagcaagtggctgcagaagatggtaaacgtagagaagaattggttctcaggtgtctgtatagatggcctaatagttctctataccaactgtagttctttttctgttctttcaatccagtagagtaaaaataaaaaacagtgtcattttcattcaaaaaa

SEQ ID NO: 88863 - DNA, 650 bp, Homo Sapiens
  misc_feature (614)..(614): n is a, c, g, or t
ttcttcatccagcgttcgtaatttttatttctagagagctaccctgggaaggcctaagcagatgagccacaccgtccaagctgtgagttcagccagtgtccagtctggaaggcagagaacaatgcgtgtgtgatcctgagctgggctgcctggggtgctggtgcaggttagccctgcagccggccagcctctgggcccctgccaggctgccgaccagccaggggaagtgaatgtgctcagcgtgagagtgccagctggctaggctttctccccaggggggaggctgtaagcacagattaccagtgactttgttcagttctgctgccgtgctccccgaggagaggaacatcacagcccagcatcagtactaataggccctgatgcgccagacccaggctaagaaggccagcgtgggggttgggggtgcagcagagaggaggacaaaagccacgcctctgaagctgtcaactggctctgaggctgacaaggaagcactctctgcagcaagttccaatccctgccgcaggaaggaataatttcaccactttctcactatttactgtccacagcaaaaagaaacccccacacctccacttagcaccatcgtgagcatncctagagtccaataaattacagaagagaaactaaaa

SEQ ID NO: 88864 - DNA, 751 bp, Homo Sapiens
  misc_feature (530)..(569): n is a, c, g, or t
caaatccccctgcacataaagggaaggttcctacgacatctctagtaacaccatgtctgtgcatttactgtgtgccaggcactgtgccagcactttgcagtaattgtgaatcttcatggtgaccagaagataccagtaatatggtctccattttataaataagaaaactgaggctcagagaggtaaggtaaacccaccaaagtgacagagctaaaacacagaggagctgggtcttgaacgctgatctgtacaactccaaagcctgaatcacttccttatgccgtctcagccaggcggtcccaatgcccatggccggggaccacctctgcatcaagaatatgcttctcccgcccagggccctcgatttattttccattctcatctcagagatagggcctgagcctggaaagaggttaaggagacccagggcagtatcttggggtggaaagaggtgttaacaggtacaaactggagctctgtctctgagactggtggcggcctacagtatcatgctgaggatccagacccannnnnnnnnnnnnnnnnnnnnnnnnnnnnnnnnnnnnnnngagcccctgaaacaggctggtctgaatggaaatatcccgtaggcattaaaatgctatcagatctcatagacttagtacaaaaaaaggtgaaatgtcttgatatttttgtatattgattattgaaataaccttttatgttgggcccaatacaaatatgttattaaaattaatttaacaacaaa

SEQ ID NO: 88865 - DNA, 669 bp, Homo Sapiens
agatcttgggtgccacagttggaggatatgcagtattttaacactcactagcccaacggtcacttgctggggaaactgagacccagaagagacagatgccacatgtttgaacactcacaaggaaacacagagagccagaagacagtgaaatgaacgggctgtcatgtcccccagctaccacggattggctcagtgaagagaggctgtggtcacctctgcatggtttcctggtacaaacacaaatttcctttcctctggctgcattcctaaaattaattaaatcttggctcaagaaggcttcttcatgccagcaagatgagaagactgaatgcagagaagctcaaggtcaaaagcaaggatgtcagctccatgaggtcggggaccttgcctgttgtattcacttctatctcctagaacagcggctggcacagagtctttccaactcaaatggttgcaaggagaaggaagaggaggtggagaagaggaacgctgtttctagtgcttaatgtgtcccagaccctattgtagaggcttcagacatctataatggcatcttcaagagacctgtgtgcaccttgtctgagttgaagtacacaccctgaagaggagccagttatgaaggaccaaacccccatattaaaattaaacatcccccgattctccaaaaaa

SEQ ID NO: 88866 - DNA, 658 bp, Homo Sapiens
tgccctctacaaagccctggaaacaagtttctcttatggacgggccctgcaggccagtgcactggctgcctggggtggcaaggttgcaaacaaggaggcaaccaaggaggcttttatgaagcgggccatggctaactgccaggcggccaaaggacagtatgttcacacgggttcttctggggctgcttccacccagtcgctcttcacagcctgctatacctactagggtccaatgcccgccagcctagctccagtgcttctagtaggagggctgaaagggagcaacttttcctccaatcctggaaattcgacacaattagatttgaactgctggaaatacaacacatgttaaatcttaagtacaagggggaaaaaataaatcagttattgaaacataaaaatgaataccaaggacctgatcaaatttcacacagcagtttccttgcaacactttcagctccccatgctccagaatacccacccaagaaaataataggctttaaaacaatatcggctcctcatccaaagaacaactgctgattgaaacacctcattagctgagtgtagagaagtgcatcttatgaaacagtcttagcagtggtaggttgggaaggagatagctgcaaccaaaaaagaaataaatattctataaaccttc

SEQ ID NO: 88867 - DNA, 517 bp, Homo Sapiens
tatcagtcgtcactagaggactctggtcataaaaagagcaggccttcagcagcttcaaacagccatcttaactgacactgtcttgctgtcactcataagaactcagaatctgccactgaagcctctgccacatgaaagattcttccttgaaagtcctacgaaccacccaacccaaaccaggagattctttgcaacttcctagcactccctggagtagtttgttaaccagtcctagttcttttccagtcctagttctcctacttcttttctcttgattttaaaaaatactttgtggaatgtttaatctattcatttatatattgattaagtgtactattatgtacagtctgcaatgttgactgacttgtgaaatggcttgagcctgcgtgcccacagctctgactcacgactgaacaggaaatactaaggagactcacctctttgggaactccatgccgcttgtggcttttgtgatcgaaatagcatcaataaaagtcttacactgtgggaagacaaa

SEQ ID NO: 88868 - DNA, 503 bp, Homo Sapiens
cggtatccgcaaggtcagtgtccccactgaagaagtggccttctagagtaagaagtttcagcatcaacatgggtaatggaagccattataacagaacttaagaaggaacctttgtggtaagaaaatgtagacagtggttataggcatatatgtaagaaggctgtaagttaaaggcaagagagatgtagcaattaataggagatattttttctgccatcattaacaaatgtatttgtttactactccttactttttaactcatccaccttgtatccactgctacctctgccaaccctgtatctgttactgaattctgtctactcttgtagggcctcttgaaaatgaaaatatccatttgtttccatctcttttgtcaagcccttatcagttgtctaaactcttgactttccaactgatttgtcagttttccctgctctaaaccatcttatgcattttttacagattagctataaacagcattcccataatagcactctcatgtc

SEQ ID NO: 88869 - DNA, 776 bp, Homo Sapiens
  misc_feature (81)..(90): n is a, c, g, or t
ttcatggggagaaactcagaagtggagagaacgtctgaggctacatagccagtacaaaatcgcttcttgacctgcacaacnnnnnnnnnngatgagttcaacagaaaccaactcaagggagaagaataaagacattgttgaacttagactttgacaagatgcatattggatatctaaatagagatatcaagaaatgaagatatgcatttccagttccagagagaaattcacactggaaatataaatttaggaattttaaagttagtggtcacatttaaagctgcagaatacaaagagatcacctgtgtgagagaactgagtcctgaaacatacccgtgtttaaagatctgggaggtgcagaggaattatcaaaggaggctgagaaggagcagccagtgaggtgtgtagaaaaacaagataagcaaaaagaaaagcaagagatatggaactgaacttccctttggcaaaaaatttagaaaatgataatgagactccgctttctgtctctctgaagataacgttaagctgcagctccgtatctgtgaaaacccatttcacagcatctgcatccctggattgctaaatacccttgtctagttacccaaatattaatggatcccatggaataaggtggcatgatttaggcacaagcaattaccaaaggattttgaaaagcagtaactccaaattatcttgtaaagttgagaataatctgagaagagctattgtaagactgggaatcaagtaacaaaataaagatatgaaccgtcaaaaaa

SEQ ID NO: 88870 - DNA, 582 bp, Homo Sapiens
atctgaatagacatccttcacaacctctactcccccttctccctccttcctcctaacagactgataaaaacctgtgttccctaatgcctttgttttttgaagaagctataaagagcatctggtgttttctgcatgttctccctcttccctccaggtccctcactccatccccttcttttccctcccatatttgacctagatgcaaccactcaccccactgcagagacagagaaccttcccattctcagccagagaaagacatccgtggcctgaatggtgctgctggacccacagtgactctacataaaggctgtccctaggtaggggtagagctagtggctgaaggggaggaggaggactctgaaagaggcctcctgtggagcaggtaagcatcagagcaccctagggtgcagccaagggcaagtcatcccacctttctgagcctcagcttcctcacttgtacaatggggctactaaaaatagctactgcattcaattgctataaggatggcatagtgcctgaaaagggacctggcgttgagaaagcccctaataaataatagttattattatattgtaaaa

SEQ ID NO: 88871 - DNA, 1261 bp, Homo Sapiens
  misc_feature (79)..(113): n is a, c, g, or t
  misc_feature (1229)..(1229): n is a, c, g, or t
tgtatacgatcatatagggcgctcaacgtcttacagacgaacgacgagcgcagcgacgttttgagcgaggaagcggcgnnnnnnnnnnnnnnnnnnnnnnnnnnnnnnnnnnncagtcgacggtaccggacatatgcccgggaattcggccattacggccggggacactgctcagggaagagcctgctacggtggactgtgagactcagtgcactgtcctcctcccagcgaccccacgctggaccccctgccggaccctccacccttcggcccccaagcttcccaggggcttcctttggactggactgtccctgctcatccattctcctgccacccccagacctcctcagctccaggttgccacctcctctcgccagagtgatgaggtcccggcttctgctctccgtggcccatctgcccacaattcgggagaccacggaggagatgctgcttgggggtcctggacaggagcccccaccctctcctagcctggatgactacgtgaggtctatatctcgactggcacagcccacctctgtgctggacaaggccacggcccagggccaacccaggccaccccacaggccagcccaggcctgccggaagggccgccctgctgtgtccctgcgagacatcaccgcacgtttcagtggccagcagcccacactgcccatggctgatactgtggaccccctggactggctttttggggagtcccaggaaaagcagccaagccagagggacctgccaaggaggactggcccctctgctggcctctggggtccacatagacagatggacagcagcaagcccatgggggcccccagagggaggctctgtgaagccaggatgcctgggcattccctggcaagaccaccgcaggatgggcagcagagctctgacctaagaagctggacttttgggcagtctgcccaagccatggcctcccgccaccgcccccgccccagcagtgtcctcagaacactctactcgcacctcccggtgatccatgaactctgacccctccccagtaaaggcttctgtagagagcatgctgggtctgcatctcctctcgtctcctccatggtggtcactgcccctgggcaggtctctgaaagggaaatgcttttctgcagaggccccctgcttgggcagttcccagtggagacgaccccctctgaatattgataacgcctggttccccatggaggagatggttacaatcccgntcgctctgaacccttgctggttgatcacctgg

SEQ ID NO: 88872 - DNA, 668 bp, Homo Sapiens
  misc_feature (47)..(55): n is a, c, g, or t
tttccaaatcagtgtttgagatttattattgcatgcttatagctagnnnnnnnnntttactctgaaagctttcatatgaattgattttggacaagttgttccacatgactcttcaagacattcatatcagctgcacagacctggtactccatcttctcttgctgttttgttctctctaataaagcctcatgcagtggaggtaatgcattgtatgaacccagcaaatagagctgacttgatgaagtctcattgatttctttaatctttaaagcctgcatgatagcaggtgcaaactttgagtaatgggctgtagatgagataatcacagggcaagttttgtcttgcaccctatctgcaaccacttttgcaacagcagtgtgtggatccaaaatataccctgaagtattataggtggagttaatagctgctaggcactctccctcagagcaccagtcagctacaaaatcctgctgaagtttctcaactagagccttttctatctggaaatgatgctgactttctaatcgattaaataattctgtcattagctgtccatctttattagccatcaagtgtaaatgtcgttctaggtttgaagatttgagaatatctattgacggtgaaaaggtttgtgctaattttctttcccctagatcataatgtcctgt

SEQ ID NO: 88873 - DNA, 389 bp, Homo Sapiens
aatattctttagatctcttaattcatttcatgtgtgatcactaacattgtacaccaaaggaacttaaagatcgtggccttgaagttttagactataaaacagcttttaggctgtagtgctctgtagtataaataaggcagtgaggcagcaactccaaagaaaattccctttcaagacttacattgtaacctacttgagtttatagttgtggagttttaattcatttgcattctaggccatgaccaagtgaccagaggactaaaatagtataaaagcatcctgtattgagtttccatagccaagggggtgtaagatcatgaaatttggagctgtttctcgtttttaaaaaatgagttgtaaaatacatattaaataaaatttaccaactt

SEQ ID NO: 88874 - DNA, 366 bp, Homo Sapiens
gtattcagaaatcttaaaatggaaagatggcttagatagtagttttcaaagatggaatcctaatgtgatcacagatcattccggtgaggaagcaaagggaaactttcacagaaattctttgataagctctattttaaaaagatggaaagacaggcactttaacaaagttaaaaagttctggaagggttaatcttgggaggcaagatcaagttgtgttctagaatgtttgagaaatctgagtttgattaatctaaaaaatataggagttagggagggctatgatgattctcatatttgaagaggaaggagaaatttgtctttacattttatttctttgaaacagagtctctctctattgccttcaaa

SEQ ID NO: 88875 - DNA, 646 bp, Homo Sapiens
  misc_feature (542)..(542): n is a, c, g, or t
ttgcggccgccacagggacttgccgccatcacccctgctgccaccaccgcagcctcgggctcccagggcggacacggccaccgcctcagcgggagaggagtctccaccaggactgaccgctgccgcccagcacgtccaggtaaggtactcaactgtgtggggtactacataaatcctgaaagactacaataaagtggtgatgtctcgggaacccaccccacctctacctggagatatgtctactggtcccatagcagaaagctggtgttacacacaggttaaagtagtaaaattttcctatatgtggaccattaataacttcagtttttgtcgagaggaaatgggtgaagtgttaaaaagttcaacattttcatctggcccaagtgacaaaatgaaatggtgcctgagggtaaacccaaagggattagatgatgaaagtaaagactacttgtccttatatttgcttttagtcagctgccccaaaagtgaagttcgagcaaaattcaaattttcccttctgaatgctaaaagggaagaaacanaagcaatggaaagccaaagagcatatcgatttgtgcaagggaaggactggggttgtaaaaaattcattagaagggactttttgcttgatgaagctaatggtctc

SEQ ID NO: 88876 - DNA, 393 bp, Homo Sapiens
tttgcagaacattggctacagtaagaacatactctgcatcagagagggttcaacattaacaacgtctgtaaaaacagaatcacagctgtcaagaagagtgctttctccatgtactgtgaaacacatccatctggatccacctatttaagctacatgcctagcctccagagtcatccagacttttagcataagaactcaaatgagaaatcatgaagaatgcattaactgaatccaatatcacctacaggaccctgggcccattgcactttgtaattgtattacttttcttctggttatcttcataggatcttaggtatactctctctgaaaagtgttaaagacaacttctccctgggcctgagaataaattatctttttcctatcgctgtaaaa

SEQ ID NO: 88877 - DNA, 514 bp, Homo Sapiens
tctgatctccaggagcgccggctccagtactgcctggagcgctgaaagagttaatcaggaacgcctccccgctgtggttttgtggtcgaaaccatgattgccaggagcaaatttttgtcgtgcacgaggtgtgttattaaaagtcggagctacgctgctgctgaatgaaaagttaaaagccctctttgagttcgggctgtaaaactggcggactgggccgagacgcttgagccaaccctaacggcggcggcccgggcggcgcgggggtcctgcggctccgccagctgctgggagcgggcaggctgcgcagtcccagcagtgagtggccgcagccaggcggtcggcagagctcccactgacccaccggagaagtgaagagggaaaacggggctgaaacccagatgggatcatccagctttctcttacgttagaacaaaaatgacagccaacatttatggagcgctgactccgcatctgacattgtgtcgagtgcttgataaatacacgctcttct

SEQ ID NO: 88878 - DNA, 465 bp, Homo Sapiens
ggagagagccatcagtcattctcatctcttgaatttcatggcctcattgcttccttcccacctgtaatcacagctgtgcctgtgtgacaaacactagagtgctagtgatggtttatgggtttcaaggctacagtgttgcagactctgcctggctcccttggattacctagactgggggaagccttaagccctctcatgacgacatggaagtagccctgtggacagctacacatggaaaaactgaggttctcagtcaacaactggtatcaacttgccagccatgtgaatgagccactttgaaagtatagctcccagctcagccaggccttcagatgactgcagcccccacatctggcatcaatcacctaagccttcgagtgggaaatgtacagccaagcccttctagaaaccctgatctgcagaatctatgatcacaataaattactgctttatgacatgaaaaaa

SEQ ID NO: 88879 - DNA, 579 bp, Homo Sapiens
actggtgtttgtttcatagaatgccggatccagacttcactgtgaatgatgtcaaaatgtgtgtggggagtcgtcgcatggtggatgtcatggacgtgaacacacagaaaggcattgaaatgaccatggctcagtggacacgctactatgagaccccagaggaggagcgagagaaactctataatgtcatcagcctcgagtttagccacaccaggctggagaatatggtgcagaggccctccacggtggatttcattgactgggtagacaacatgtggccaaggcacttgaaggaaagccagactgaatcaacaaatgccatcttggagatgcagtaccctaaagtgcagaagtaagtgatgcgccctgcatcttcctccgtgtgctgtgggagaccaaagcaatagcaaggattggcttctcccttacgagctttgctctgtgtcttgaatgattaaaaagatgaattatttaaagatgagactttacagttccacaaggaagagtgtatgtgagcataccatagcacacaaccacacagttaaaggaaaaaaaacttacattttagtcaatacggta

SEQ ID NO: 88880 - DNA, 458 bp, Homo Sapiens
gctagctttgaaacccaactttgccacagaccagcatgttgatggagaggctctcacccacaagcatggagtgggagggtgatttcctgggagaaagaaagccactttctttttggaagccaacgaatgccaagtagatgccaccaaagccagtgatggcttgtgaaagcccagtgtcctgggacaggaaagacaaggggatcccagccaagtctgactgcaatgaggccaaacgttgccccagagcaagacttcatctcccttttcctgacaaaccattgatggctgcgtttcacattaacctagattaaaagtctccttgaaatgtataattgtaattaattattggttcatttgtttgtctcacccccacccccagaatgttacttaatggtatggagggattacctttatctttgtatcatcagagatcaataaatgcatgctgaataaaaaaa

SEQ ID NO: 88881 - DNA, 505 bp, Homo Sapiens
tctgtaatgttcatgtcataacttttagttaattgccattgagcacctgttctgaggaggtgagatgtggacttgtgcttataaactggagagtttagtcataatccctcctggctttgtgtgaatagcttgctcactttgctggcctttgaaatgtgttctccgtgataagctatccatgtgtttgtgataagagtgcttgtcaaccatgaccatctttgagccttcctagtcctccacctggcacagtatttgaaatggcaaaggatgtgcttcatcctctaacagtgtacactcccagagctgatattctggattttgactgtgcacatttcctctagttcatgtctgtagtccctatagaatgatctgtaataaaatagtatactggactgtgcatcaaagggatgtaaaattacagtattccaaaggttgaagttctgctgttttgttataatgcctgatacacatcttgaataaagtcttaacatttttcttttaaaaa

SEQ ID NO: 88882 - DNA, 578 bp, Homo Sapiens
gtggctattgtaaatgggattgcattcttgacttggctctcgggttgaatattattggtatatagaaaggctactgatcttgtacattgattttgcatcctgaatctttactaaagttgtctatcaggtccaggaggctttgaaagaatctttagggtttcttaagtgtagaataatatcatctacaaaaagagttaatttgatttcttcttttcctatttggatgccttttacttcaaaaggctgattgctctggctcatatttccagtactatgttgagtaggatggtgagagagggcactcttgttttgttccagttctgagattcttttaagtgaaatcaaagctactcaattgtttgatctttacctaatctgtggacatgttgagattcacctcacatatgattgtctccttctgaaggagcttatgcaattctcatttggttctcagctttagtcagaagatacaattaaggtcagatacacttgtagtgacatctgatgtgaaattatgtgatggtaataatttcaaattaaaataaaatttagtggcagttgtttttattttagataat

SEQ ID NO: 88883 - DNA, 526 bp, Homo Sapiens
tgtgggaagatggtgtggtgtgcagtagtggtcactgtggagagatgtttatgtcttgtacatgaagagctgctctccctctgatagctgcctgccaagcggctccatccatcattgagagcgggcaccacacggctcactgccccaagcatcttagactaaacaccagctagaatgtggagttaggcaatcaagtgtgaaacttaacttgtacttgtcttagaagcagcaaaggcagctgggccagctgatagacaaggaacgctgtcctcccagaaccagccacgggtgcagatgatgggcactgaggagcctgctgtcttacagaagctgatcctggagggtgcctttcaatcctcgatgtcaggaggttttcttttagaaaacaatctgattcagaataatgactgcaatttttcactggatggaaaacaagtctagaggaattgacccttattttaagttcaaagatagtatatccttgttactactgttacatgttttatagccaatcttcaagaccaaa

SEQ ID NO: 88884 - DNA, 593 bp, Homo Sapiens
  misc_feature (106)..(151): n is a, c, g, or t
  misc_feature (160)..(186): n is a, c, g, or t
  misc_feature (217)..(225): n is a, c, g, or t
  misc_feature (515)..(515): n is a, c, g, or t
tttgtcctcctcaaggtgggaggggggattgagagtgctctaaggagacttttcctccaggtgggaagagataaaaagacattaattagttgtttatcaagtgacnnnnnnnnnnnnnnnnnnnnnnnnnnnnnnnnnnnnnnnnnnnnnncctctgatnnnnnnnnnnnnnnnnnnnnnnnnnnnggttaactataaggagatggcctttcctccnnnnnnnnncttaaggtgctgttttgggggaaaaaaatgtaatgaaatgaccaaaagaattacacagcattaattaaaaatggaagttttccacttccttgataatttggctatctgaataaatttgtgaatttgctaggttaagacctagttcgtggtcacatttcaacaaaacagcttgagtataaagaaaataataaaaggctgttcttatttattttcctttggtggcttttggtttgctctttttgcataggtcatgactttgttctcctgggtccagatttataaaagcaganaattactaattaagtcaaaataagtgtctttggtgtttatgcatttgcaatttcagtaattaaatggtacatgtggtg

SEQ ID NO: 88885 - DNA, 467 bp, Homo Sapiens
ggcccagctgaccggttctgaagtatgggcctccggggttagcagatgccagcagtgcctgcccgtgtccccatgtcccggcatgaaggacactgctagagagttaccatgcacaccgatggtttcctgtatcacagcccaaagaggttctctggtggccacagctgtgtgctcagtcagtgcactgggcaagctagaagtgttggggggttaatgtccccaggagcagcaaccctgagtcaataaggagcaggacctcagcttcattgtccttgagcaggacaattctgaagtgtattctacataaactctcagaggatgcccagcaggatggagtcccagttgcccgcagcagtaacccactcattcatgtacttcctgcgggggctctcccttccctctcttccccactcccccgccttgggcttcctgggatggctcccaaataaacctcttgcacccagaaa

SEQ ID NO: 88886 - DNA, 342 bp, Homo Sapiens
cttaattcaaatgtaggaggagtatggatctccaggaaccagaagagctgcatacatatgcccaacaattcagcgacagcaccatcagcccagatgggggttgtgagcaaagtccgagatggtcagaaggaaacgagaacctgggaggtggcgagtgtccactgctctagtctcaggacagcctgctctgttaaagcacctggtccttcttcctgaagacttcagtcccaccttgcattatgttttgttctgtgtatgtgcgtgtctatctctcctgctaactgctgagcttgctaaggaaaggaaccttgttttatgaaataaatgatatttatgagcaaa

SEQ ID NO: 88887 - DNA, 914 bp, Homo Sapiens
cagtcgacggtaccggacatatgcccgggaattcggccattacggccggggcagctatctaacattttatgaaactgacgcatgtccttcattattgaggctaaaagctcttgttcagatgcttgaggtttgaaaaagaggtgtgctagctttgcttagtttatttcttatttttggtatacatatacacatatataacattagaatgtgtgtactgcaaatgctatgataggtatttcgtgttaatccaaatgcaatgatagtctcttgtatgaatgtgcaagaggcctgtgaccgaatgctacgtttttatggtagtttaagattataaaagtagaaatgcaacaattcccagtttttggataggttctaaatttctgagatttgattcatggcagatattctctgttgttgttgttttagatgggctcattacataacgagttaattgtcactagtaggagactgtgaaggaattttgttatactttcaaaaatgttactgtgatgaaaaatcatctattttcagaaaatatttatgaattaatttactatagaattatctctctaattatcataattgggttacaatttaagctccccttttaaatgttatattttaaaatgttattactctataaaagaaaattgcttgctatatttacaccttctttcctaggaaagctttcatccttaaattgttgtattcctaccctctgaagacatttaaaataagcttttgtgcctgcagcagagcctgcagaagctaatacaagggacactggtcttttgacaaaataaacttgtgtaaatttcgatactgtattaaaactatttttttaaagttctgcataaaattgagtattaagtatatgtgttcatcttagcaatggtaataaattatttaatctcaaa

SEQ ID NO: 88888 - DNA, 990 bp, Homo Sapiens
  misc_feature (706)..(706): n is a, c, g, or t
tcacaaatgctaccaggaggctggtggtttgatgcatgtggtccttccaacttgaacggaatgtactatccacagaggcagaacacaaataagttcaacggcattaaatggtactactggaaaggctcaggctattcgctcaaggccacaaccatgatgatccgaccagcagatttctaaacatcccagtccacatgaggaactgtctcgaactattttcaaagacttaagcccagtgcactgaaagtcacggctgcgcactgtgtcctcttccaccacagagggcgtgtgctcggtgctgacgggacccacatgctccagattagagcctgtaaactttatcacttaaacttgcatcacttaacggaccaaagcaagaccctaaacatccataattgtgattagacagaacacctatgcaaagatgaacccgaggctgagaatcagactgacagtttacagacgctgctgtcacaaccaagaatgttatgtgcaagtttatcagtaaataactggaaaacagaacacttatgttatacaatacagatcatcttggaactgcattcttctgagcactgtttatacactgtgtaaatacccatatgtcctgaattcaccatcactatcacaattaaaaggaagaaaaaaactctctaagccataaaaagacaatattcagggatattctgagaaggggttactaganagtttaatatttggaaaaacacgttagtgcatttttactcccatctcttaggtgctttaaatttttatttcaaaaacagcgtatttacatttatgttgacagcttagttataagttaatgctcaaatacgtatttcaaatttatatggtagaaacttccagaatctctgaaattatcaacagaaacgtgccattttagtttatatgcagaccgtactatttttttctgcctgattgttaaatatgaaggtatttttagtaattaaatataacttattagggaaa

SEQ ID NO: 88889 - DNA, 338 bp, Homo Sapiens
tcataagtagtcttacatactacattagatatcaatatttaagcctgtaggaaatgggaggcattgaagcacttaagtaaaaaagtaactatcaaatttttgttttagattactctggtcatcagagaaatagattaagtatttaagaggtagaatctctcagacttaggaaccaactgcatgaggcggggcttggggggataaatttgcaagataataaggatgtagaattgaaaaggcctgatattattgaagctggagttgcacattcattttgctttggcttttttgtatcagtggtcatgggcaccaaataaaatgcttccatgaacatttgg

SEQ ID NO: 88890 - DNA, 377 bp, Homo Sapiens
aacctgtggtatgctgagaaagcctggtgaaattgtactcagccttcacacctcaggttagatgtcatttcctatgagaagcccgcctcgttcaggacgtccatgatctctcacagccttctgtgttccctcctcaacacggtgttttatagctttttaaaaaattctgtgatcatattatgctcagcaaacagagagagactattcttgttccctgtgcctaggatgtgcttgatgtatggatctgtctccagcgggaccagaaaaccatatgtggcaatacttataaactgcctctagctatatagattaatacagaatcatctttctgtatgagttttccaccaataaacatgtgtagatataagcaaaaaaaa

SEQ ID NO: 88891 - DNA, 541 bp, Homo Sapiens
  misc_feature (69)..(69): n is a, c, g, or t
  misc_feature (77)..(77): n is a, c, g, or t
  misc_feature (81)..(81): n is a, c, g, or t
  misc_feature (101)..(101): n is a, c, g, or t
aaagtctgccactacttggagtggatcagggaaaccatgaagaggaactgactattctagcctatctcntgtgcccntgantgagcagaagcccccacagntggccagcagccccgcctgacatggaacagaacggagccatcccccaagaccctgtccaaggcccagatgttagccaaggacttgtcccacctgaggacaaagctggcgctcaaggtcacctgtttaatgccaagataacaaagcgctgatccaagttgctctgtaggaatttctgtgacttttttctggggtcaaagagaaaccccgagacaatgtacactgttccttttcacccaccaccccgatccctaggtgaggagaagcagcttgaagcagggctccattcattcaacacacatgaccaccagtgtgatcttgaacaagaggcccaatctcacttcgccttggtttccttatctgtaaaatgagaccatcttattgctgacttcaaaagcctgctgtgaggattaaatgagatgattcgtctgaactgataaaa

SEQ ID NO: 88892 - DNA, 530 bp, Homo Sapiens
cactgtgaggcctctcacggtgggacccaggctttgggtagctggctccatgctctagcaaagcctcacttagcagtggggaggtcccaagaagagaagcgagatacccatataaagcaagcctgcttagccttccagggtccttcaaatcttaccaaatgaaagccagcttgctccacctactgtcaagccagcatctcattctccccattcttgtctcttaaacaactactcaaaaaaggagagccatgaaagtcaccagcctagaaaattacagtcgacttcatgagcttcatttggatttctcatcatgcaatagcaaagtcacagttattcctactgagatcacaatgatgctgccagagcctcccctgagcttgagagccctcctcttctaagcagcatttggagcatcctccattgtatagtgggaaagtggatatctggctttccttccttcctgaggaaattatgaacaagaagaacaaactccaagctaaatacaagtcacgacttttccagaatccaaa

SEQ ID NO: 88893 - DNA, 469 bp, Homo Sapiens
ctaagaattttactttgggccctatctcctatactcagagcaagcataaaccttcccagggccctacacaaacatattcccatcgaggcatcacataaaataaaatcaaccatttaaaaaggtataatttagtgacaattacttcccatttataagcaagggatgcatgagtgctacccatagaccggatatgggccatgtcgttagcgtttcttgatctcgttagataaattatctgaaattttgaggagacttcagcagaaagaagcaggggatatgctgtcaaatgcctgtggatttatactaagaaagaaagaaggggcataaggaaaattttctttatctcgattttggaggtggttacatgggtatgtatttgtcaaaattcattgacctgtatacttaagatttatacattttattttatgtaaaccacatctcaataaagttgagttttttaatgtcaaaa

SEQ ID NO: 88894 - DNA, 736 bp, Homo Sapiens
  misc_feature (667)..(676): n is a, c, g, or t
ctggaagaaacttcttaaatgaccgcgtctggctggccgtggagcctttctgggttggggagaggaaaggaaagtggaaaaaacctgagaacttcctgatctctctcgctgtgagacatgtctgagactccggctcagtgtagcattaagcaatgctccaaggatgctttggaagactcattattcagagctgcagctggactgccttagacatctgcatttctctatctctgaaataagggactcaaacaagagcatcactcttttcctttccagctctaaaattatgtgatttttctttcacatgcaggaacgaatttcatatacacctccagagagcccagtgccgagttacgcttcctcgacgccacttcatgttccagtgcctcgagcgctcaggatggaggaagactcgatccgcctgcctgcgcacctgcgtgagtgttcgtgacccgagagggacagaggattgatggcgtggggcgggggtggcaggcagtgggctccaggccagagaggggcaagctctgaggtggttttcacaggacttcgccacgctgctttggaatctttcacacccccctacccccaaatacctttgaaaaatttgaggttcctgttccttgtttctcagtgtattcatttcttccctgactatgacatgttnnnnnnnnnngaaacctggaaacatgcagtatatggcagagccaactaaatctcctagtagacaagaaaa

SEQ ID NO: 88895 - DNA, 452 bp, Homo Sapiens
gtgtgtgcctcagtgtccttgctgccagggtgtcagccctgcttcaacactgcccgtttgtatctgtcccctccactggcctcttgaagcacagagaccctccgagtactttccttcctctgggcttccactcatgctattccctgctccctttttctacctggagacccccattcctcctcctcctctgctgccctcacctccacctgggccctcccagctcccgggagatggctgaaccccactccccacccgctagtcatcctcttcagcggtcctcccagagctgtcctcagcatggcagcctccacagcccctgggtgtcacccccggtttcgtgtctgcctcggactccagacctgcccctcccaggctggcccagatggatcctctacagtgactaacccaaaccagcaccaggcagggacccaataaacctttgtgaatggaaa

SEQ ID NO: 88896 - DNA, 611 bp, Homo Sapiens
gcggccgctggcatggcgaggtggccattcgcctgctggagatggacggccacaaccaggaccacctgaagctcttcaagaaagaggtgatgaactaccggcagacgcggcatgagaacgtggtgctcttcatgggggcctgcatgaacccgccccacctggccattatcaccagcttctgcaaggggcggacgttgcactcgtttgtgagggaccccaagacgtctctggacatcaacaagacgaggcaaatcgctcaggagatcatcaagggcatgggatatcttcatgccaagggcatcgtacacaaagatctcaaatctaagaacgtcttctatgacaacggcaagggtggtcatcacagacttcgggctgtttgggatctcaggcgtggtccgagagggacggcgtgagaaccagctaaagctgtcccacgactggctgtgctatctggcccctgagattgtacgcgagatgacccccgggaaggacgaggatcagctgccattctccaaagctgctgatgtctatgcatttgggactgtttggtatgagctgcaagcaagagactgccctgagaccagctgcagagcatccatctgcaattggac

SEQ ID NO: 88897 - DNA, 860 bp, Homo Sapiens
taggctaggtgcgaggctgggtgttgaattcggcacgaggtggaggtccatggcaagcccaaggctagcccgagttgttcgtcgcccacccgggattcctcaggagtcccagtgtccaaggagctgctgacggcgggaagcgacggccgcggaggtatatgggacaggttgctcatcaactcccaacctaagtccagaaagacctccactcttcaaacagttcggatagagaggagtcccttattggaccaggtacagacatttctcccacagatggcacgggcaaatgaaaagctaagaaaagaaatggcagctgcaccacctggtcgtttcaatattgaaaacattgatgggcctcatagtaaagttatacaaatggatgtggctttgtttgagatgaatcagtcggattcaaaagaagtggacagttcagaagagagttcacaagacagttcagagaacagttcagaatcagaagacgaagatgacagcatcccatctgaagtcaccatagataacattaagcttcccaattctgaaggtggaaaaggcaagattgaagttttggacagtccagcaagtacgaacaaaccaacacatggggcggccgacctccaagaagtattccctctgcaggggggcccaagctttatgcgtacccccagatatcttggctaacaacgggggtcccataatagtcgcggcgcgaattataagagtagggcatggggcgtcgtttatacaaagtacgtgagctgggcacaactgtacgctgggatactggtgaaggaccttacatactggggggtgacatatgggaaactactccaagattaagccaggcgaatacaattacatga

SEQ ID NO: 88898 - DNA, 413 bp, Homo Sapiens
tcctcagtccctcgggactggagggactcgtgagccggagcccagaaatccgggggtggataagacaccgcgtcccctccaattcccgaacgtgtgacgacggctggaggccaacagagtccctacaggtggtgctcacggtaatgcaccgacaatgagtggctgttttccagtttctggcctccgctgcctatctagggacggcaggatggccgcgcagggcgcgccgcgcttcctcctgaccttcgacttcgacgagactatcgtggacgaaaacagcgacgattcgatcgtgcgcgccgcgccgggccagcggctcccggagagcctgcgagccacctaccgcgagggcttctacaacgagtacatgcagcgcgtcttcaagtacctgggcgagcagggcgtgcggccgc

SEQ ID NO: 88899 - DNA, 473 bp, Homo Sapiens
gagagagaaactgatagtcccaatttagttcaggtgtgtgtacctgatctaaacatttttggtgaaaggatcagattatagggcagaaacatggatatggggaggggctccaggggttggggtatgcaattcttgtagaagagcggggctaaataatccaagagtggtgttcccttgagagccttgggttcttcatcatattatgagaataattctacttacctttcaggatgttattagagtcaaagtagataaggaaagtgaaaacattttttaaaatgtcaaaacatgcaaatgaagagtgttgtatacattcaagttccaccagccagacagtccctgatccaagcagtcagattccccttctaactcttcttccatgtcatatgggctgaaaattcagaaagtcctgggaacaaaaagattcaaggtctcttacagtggtgttctggttaacaagctctacaagattt

SEQ ID NO: 88900 - DNA, 506 bp, Homo Sapiens
tctctattacgtgtcttgcaacttggagtcacatgatctcagcatctgatccaccctgggctcagaacctcccagaacctcccagaatcgaggctcacggcagaggttctgcactcaccaaggacgcggggggaccatgtctgtgctcatgtggatcccagctgctgggcagagcacaccacacatccagactcaacaaaatacatggagtcaaaggtcaggtgactgaatcaatgagtatgttacacaccaagaaagacccctcctctctgcaccccggggagcagccccagaggcctggtctcctccaggatgaaaatgcaaacgcaggtgcctgggggctcccacgacctttggcttcacggttccctcccggccctgcctggagcttcatgtgcctccccttttgcttaatgagagccgctgtctaagagttaagggttttctgggtgacgtttaacaataataaaggtgactgcttatctaaggaatccgaaaacaaaaaa

SEQ ID NO: 88901 - DNA, 440 bp, Homo Sapiens
  misc_feature (15)..(15): n is a, c, g, or t
cctattgtcacaggnaaaagaaaaggctggaaaacatctaagcagggaatgctgtggccgatgaataggcatggtgggggtcccctcacgaggattccggtgaatatgaggtactagtaattacagacttctctacttccttctatgatttaggagataaataaaattcaagatacctcaggctctcagcaagtcacaagaaaacaagaaaacatgatgctgtctgagcaactggtacaggaagcctggacgcattgctgaggaaatcagaacttctttgcaaaagatggtgacaatctgtggccaagatgctgccgggagatgattacaggcacaggagaggagtttcaggcaggtcagtgagttcatgtgtatttcagatgaaggggttgtcatccacgtcaatatttaaataaattcttcctggtgcctaagtgaaa

SEQ ID NO: 88902 - DNA, 469 bp, Homo Sapiens
cttatgaccaaggagcctcaacatgtcacagcttttgtgggctgtgggcagtaggagagagggcactgccactggagacctgcgctgtggcctctttggccagtgccttgctgtgccatgtgggacaaatcctttcccctccttattgggccctaatttccccatctgtgaacagtttcatagcaacttggggctgctgggaggagggcaagcaagcctggaacccagagcgtggccagaaatgatgtcgacgatgcccatgaccacctcctctgttctccaagacctttgcctctcctcaggcccctggtcacctttccctgggtcttcgttctttgatgtgagaagagggcagctttaatcccccacctgatagagaagaaaactaagctgtggagtagggtggagtgagggagtggaaggaaggttgtggtttcctggtgaggtgtgatgcttagacctggtctct

SEQ ID NO: 88903 - DNA, 470 bp, Homo Sapiens
gcggccgccagggacccggtggtccccgggaaggagaagcgcggcgacaccggcggcggggtgtaagcggctccgtcggctcccgcctggctccatcccgggctgccctgctgggtcccgggccccgcaccagacgcggccccaccggagctgccgcccgaggcgcctccggacgcagagcccgcgcctccgccctggaggtaggacaggcccagcacggaggagggcacccgcggtgtgggcacgtagactggcgaggacgcggcgcccgcgccgtgcatgaaggcgccggggccgcccgcctcgtaggcaccggggggcggcccgtggtatggcggccatggcaaagctctgatacatggtccctgcgagctcccggcttcggtgtcctctctctccctcgcaggtcaaggagccacgcggggagagaaaacgacggcaacaacgataatatgcgtgggaggaactgt

SEQ ID NO: 88904 - DNA, 497 bp, Homo Sapiens
atttccaaacctgagaaaactgagaaatacccacataagtacttcctaccaccaaactgccgggatgccagcaaaaggctccatatcgtccccatcggggtccacagcctgcgcgtcagccgtgagattggaagaagctggggttgataagcagccctgtgggaaccagctataaacgcacacatggagacagaggagcacacaggaaaatggaagaacttcacggccagtttatttgtaaccagagccaaagccttgagccagccacgccggtcaccggtcagctgcagtcggcctcactgcccggcaggagctgtggccaccacgtcatggaggagtgggagggcaagggatgaagagggggaagatgagaatcagagccaaatccccgtggctcccccaggctgtgaggacgcatccctgtgggtcagttccaggcccgagcattcccatgtgtgggaatcacatgtttattaaaacgtcaagtcacccagaaa

SEQ ID NO: 88905 - DNA, 679 bp, Homo Sapiens
tttgtacagttcttgcagtgagctttccggaccactgtcttgtatgtttcctaagaaaagcaaaaaggaagagattgaagagaaagtagattttcaactacaaactttcatccatttgctttcagcttaagcaaatgtgcgcaaagttgtcatggatttttgcagtcaataaaaaccaagcaagaagactgaatcccaagtcatctggtataaatggaagcagtttctgtgatagttccacgcggtcagaagggtcatcctggcttaggagaggggcagaagaggaaatgcacgcgtggaaacaggagtgggcagggaggatgtgacactgtcctcctcaccaggccacgttcctggcaccaaccatagtgtttgggcagataagaaaagaaacaatttgctgaaactccctctgcttataacaaaactgactgaaatcagccggaatcaatatggccaaatgcagtttgcgcacagcaagcttgctgatgtcacagcctgaatttttactgcatgtttcatacgaactccctccaaatttgcacatgagaccccccaggaagcatgaaaagagagccatgcatgcctgaagacttcccagatgttccctttgcttccaccaatcacctgctaaccccaggatccaaccctaaaccttttgtaataaaattactgccct

SEQ ID NO: 88906 - DNA, 569 bp, Homo Sapiens
gatgttctcctggtaggattccctctcatggtcttctgcatttgtagacattttgattggttccatttctaagggccaattatctgtgctttaacctgaaataaggaacctgccttctgatcttcaaggatatgtacatggacacacatctttcagattcaactcttgagatttttggttttaaacaaacaattgtgttcatcacaaatgaagattccctcaagcagcagccgcctggaatcaactgctgagtccaaatcttgtagcccttaaaaatatttagtatttttactaagtaataagtatttagggtgttatgaaaaatgcaatttgaaaaagtacattggtttttaagaacaagaggaactatttagaaattatacaatatattaacaaaagtaaatatttaatatatctcaaacacaaaaatgcaaaaactggttaccaagcatcaagaaaaacttaaaacttgtaaaatacaaaggttaaatgtattttatcttcattctattattagcagataaccttaataaaaatgagctgttatttacagcaaaatatcatgtaaa

SEQ ID NO: 88907 - DNA, 521 bp, Homo Sapiens
gcctcttccctgaactgcagacccctatattcagtttgctactgacatctccacttaggtctctaatggacatctcagatttcacaggcccaaagccaggctcccaattactcctgaccccaggcttgctcctgatagtgacatgaggcagccaaatgcctaggcagagaggggagggtcccaaatgaaaccccacgttcaagcaaagatcagcctgaaggctaaaagaccagattgctggtcctggatgaaacccaccacgcagagtgggaacttctgttcctgtttgcccaccctttcccaattgttctttctgaataacgccttaaccaatcgaatgttgccttttccagtaatacctacagcctgcccctccccccattctgagcccataaaaagacccagactcccccatattaaggggactttcctgcctttgggtagggggaccacccccacgtctcctctctgttgaaaactgtttcatcactcaataaaactcccagctttgctcactcaaa

SEQ ID NO: 88908 - DNA, 574 bp, Homo Sapiens
tttttttgtattggggtaagaatacttagcatatgatctatccacttaacaagtttttaagtgtacaataccatattgttaactataggcgctacattgtacagcagatctctagaatttattcatcttagcagatcttccaggtctcatccattttgttacaaatggtagtatttccttctttttaaaggctgactaatattatgttgtgtcttatcccacattttctctatccattcccctgatgatggacatttgggttatttccaaatattggccattgtgaataatgctgtagtaaatgctgcagtttacatagctctttcagatcctgctttcatttcttttggatatatactcaacagtgggattactgaatcatttggtagttgttctattcttagtttttggaaaaacttccattctgttttctacagtggctataccatttgacatttctgcccacagtgtataagggttccacattctctacatactcccccagcatttggtatctttgttttgttttgtcttctataataaccatcttgactggtaaaatttgatattggat

SEQ ID NO: 88909 - DNA, 451 bp, Homo Sapiens
caccctctccagaaagaagagccaaaattaggaataaaaatacctcaaatagaagagaacactagagtccaagggtgaattcacagcaaacaccagaggcatagaaagagaagaaaggaagcagccagcttaaccaagatcaaccaagagccccgagggactccctattacaggaaaacggtcctgaattccagcagaatggctgaagccaaccagtctcaagacctcaaccaaggaaccaaccaactctgcacaggaatgcggtttcttcatctccctgtcccaggaattcccccttgcttcttgaccaatcagcaatccccacattttagccctacctgttcagaccctttacaagctccatccccaaaccctggagggaggaggatttgaaggttcctctgtctcatttgactgccctacaattattaaactctttctctactgcaaa

SEQ ID NO: 88910 - DNA, 689 bp, Homo Sapiens
caaaaccagatgtccctgcagcagatgatgtctgtcctcatgaccccattggtctttgaagactgtcggaaccagtggtcagtatccaggcctctcctggggctcatcctgctcaatgagaagtatttcagtgaactgagagcaagtttgataaacagccagcccctccccaagcaggaggtccttgcccagtgcttcagaaacctaatggaaggagtggagcagaacctgtccgtcaagaacagagacaggttcacccaaaatctgtctgtattcagaagagatgtggcagaggcgttgcgcagtgatggcaacactgaaccatgcagtctcgacatgatgagctgacccgacttttctgaccatgtgcggagcagcctttatcaagagactcctgaaggtctgggtctcaggacagtgatgttggctagcccaggggaatgtatttttcaaaacatacaagcaacagcaaaagccctaacttcttatacgtctagcctaattataagaatttctaacagtaccagtgtaaattcagtcttttctctgaaaagcaaaggatgtgttttcagtctttctatcaaatattatctttgttctcctaatgctctgaaaggatgtagaaacaatatttaaccaaagaacgtaataaaccaggtttgcacctaagtgtgtactagtttaaaaaa

SEQ ID NO: 88911 - DNA, 496 bp, Homo Sapiens
cttggatttttgcattcctgaagtaaaaaaataaatatcaatattagaaaaacaacaaacatgaaactcgtcccctgatacttatcaggagagtttgcctcaatattattcctctccatgatctagtgttcaaaaaagaagtactggttgtttttatatttgtttactttgcaacgcaatgcatttgttcaaatccaagcagaatctacattttctcttttgtttcagtggctaaccagccaggtaaactaattgttctctgctattaaatcaaaattagagttaggaataaaagccaaagtagcatagttaacaaaaacccaccgacgtttacagtcattacatggcacagaagaacctatggtttattaggaaatgtcacctgccagaagctaacatttagaccaagtcttatatcactgtcctggccaaactataacaaagcgaagaaattgcttaagcaaaaacgaggacaataaaacaaaggttttctaaa

SEQ ID NO: 88912 - DNA, 505 bp, Homo Sapiens
gctttgggatcggtgtgaaagtctagcactacatctgacagcgagctgcaaaactttgggctgcatattaagcgaggaaagtggattgaagcgagagtcaaggcaattcattatgttaccggctcccatacgggagctgtaaaatacgaactggatgcacacacggagaaaaatggaatgaactcggaatggcattcaacagctcttcgcggtaaaactgtgactgccaaggatctagaatcccaaaggagcaaaccaggaggcctcaaacttggttggcacacaataaatgcttttctagatcttttccccactcatctcaaactcttaagcaatttggggtcatttatatttcagaataaggaacacattttgagaaatgttaatttctgaatgagactttttttccccaaagtagctgtgaaaaaaagagcctcaggcataagtcagccagcttattttgtctcaatataaattaaaaattaccctcaccaccacctccacc

SEQ ID NO: 88913 - DNA, 515 bp, Homo Sapiens
tgcatagaaatacaacttattcctcaagtctcagactccctagcctagaagagaccttcaagaggtcttttaggaatctctgtgactcaagaactgatgtgcctaagggaaattctaacagagaagacactttgccatttgggaaattctcaccttcctatatagttgtgacatggacatattctgctctctttctctgggtttaattgaggggcaaggcaatgtcgatgaagagagctatggttcagatgtatcccctccaaaatttagatgttgaaacttaatggccaatgtgatggtattaagaggtggggtcttcaagaagtgactaaattatgagggcttctcccctcatcatgactgagattaggccctcacaaaagaggacacagtattcaaggtgccatcttggaagcagagactgaatccttacaacaaacctgccacctccttgatcttggacttctcagcctccagaactatgagcaatatatttctgttctaaataaattaaa

SEQ ID NO: 88914 - DNA, 511 bp, Homo Sapiens
ctgtatgacatttgtgactacaacgtctccagggaccgatgccaggagctcgggtgctgcttctacgaaggcgtctgctacaagaaagcggttcccatttacatccacgtgttctctgccttgattgtgatcatcgctggggccttcgtcatcaccatcatctacagagtcattcaggagagcaggaaagaaaaggccatccctgtggatgtcgcgctgccacagaagtccagcgaaaaggcggagttggcctcatccagcagcaagttagggctgaagcctgcgagtcctgggcctccaagtgctgggccctcgatgaagagtgacgaggataaggatgatgtaacagggacaataacagaagccgaagaaactgaggactgactgagacgcatgaagaagtggagattgtcagaattatccaaatgaaatggtacagcaggtgcactgttaacagtgtgatggaatgaccacccaaagagaaaaaaataaaggtattttgaaaattaaa

SEQ ID NO: 88915 - DNA, 712 bp, Homo Sapiens
agacggaggaagcacctttcagagggaggagggaagtgctctgaagacctcttgggcagaggctcctgttcacctgggccagcgtcagttcctgaagttcactcagagggaaggagatagagagtcctggtcctcaggggaggactaggaaaagaccatctgcccggcactggggacttaggggtgcggggagaggaaggacgcctccaagcccgctccctgctcaggagcagcactcttaacttacgatctcttgacatacggtttctggctgagaggcctggcccgctaaggtgaaaaggggtgtggcaaaggagcctactccaagaatggaggctgtaggaatataacctcccaccctgcaaagggaatctcttgcctgctccatctcataggctaagtcagctgaatcccgatagtactaggtccccttccctccgcatcccgtcagctggaaaaggcctgtggcccagaggcttctccaaagggagggtgacatgctggcttttgtgcccaagctcaccagccctgcgccacctcactgcagtagtgcaccatctcactgcagtagcacgccctcctgggccgtctggcctgtggctaatggaggtgacggcactcccatgtgctgactccccccatccctgccacgctgtggccctgcctggctagtccctgcctgaataaagtaatgcctccgcttcaaaaaaaa

SEQ ID NO: 88916 - DNA, 287 bp, Homo Sapiens
  misc_feature (257)..(257): n is a, c, g, or t
aactttgtaacttgcttctgatgtgggtccctaacctaataatctccagcttccctaccctggaataaaaggtctgaccccatccccccaacaccctccatccgggggccctcgcacaaatctggggtgggaggggctaggctgaccccatcctcctctccctccaggagcccccagcatgtcctgacctgtgcacggggatggggggacaactcctacccttggctacaacatccccctatgccagcagggcggcnttgatgaatgaaaaggtgattgtgtgcgaa

SEQ ID NO: 88917 - DNA, 408 bp, Homo Sapiens
ttacaggagagaaacctgaaagcaacttaaccaagtgatcacagaatcactggtaataactcttgttgatatcatgtgcccccaatacagtatgatgaaaagacccatcatctcggtgatatttatcctcaaaatctataatcttacaacaattatgagaaaatatagacaaacccaatttgaaaggaagcaagtctacaagatacttaaccagtactttacaaaagtgacaaggtcacaaaagacagcacaagactgagaaactcacagattggaggaagccaaagagacatcatggctgagatcatggtggtggaaccctggtttggatcctggaacagaaaaaaagaacactaagtggaaaaactgatgaaatataaataacataataaaaatctataatttaaa

SEQ ID NO: 88918 - DNA, 425 bp, Homo Sapiens
gatgccacagaacccatgcagcagcctcaaggtagggcccactggggtcctggatttcagtttctcctctgtaaagtgaggtatgttgtgcccggagaggagacccccagctccagctggctcaaccacatccaccatgctgtgtgactccagatgcatcacaggctgtctctggcccagccccagacagcgggagaagaaagctcaggagtccgtggaaactgcagggacaccgcccctcgtgccctggaagaggctccacagtccacccccagccctccagcttgagttccaccttcgactccactcatgatcacacagggctgggctctctccacgtcccctgcatcgcccaggatggcccagtctccgaggacatccatgtatgcaaaataaaatccctctgctaggcgtgccctgcaaaa

SEQ ID NO: 88919 - DNA, 545 bp, Homo Sapiens
gctccctctggcccgcgcctctgtgtgtggtcagctggcctggctgtgacctcaccagtggcccagagcagaggggcaaggtgggctggggggagggctgagcgcacagagggggcctgccgtgggcccgggtccctcctccgcagcgtgaacctgacaggtctcaccagcgccggtactgacgaccccctcagcaccaagagcctccctgctcctcctgcaggcgcgactggtaactcccatgagcccggggccagggcccacagacagacagacctccccaggacagacgtccccggcacgctccttgtcctcaggagggctgcgtccccctggagtccaacgcggggcgaccccataacctgttgtctgattacagttgtgataagtccccgggaaggagcatgacaagaggctgagacatgtggcagcccagtccttacctcatggtgaatattgaagacactaacccaggctaggccaggctcgccccgcagctacggcggtggcatgcgtctgcggcaacatctcagctccctgttgct

SEQ ID NO: 88920 - DNA, 605 bp, Homo Sapiens
cccattgaactcctagttggcaattttgcacattcatacaaaaaaatttttaatgaaatgatttcattgattcatgatggatggcagaaactgctgagacctatttccctttcttggggagagaataagtgacagctgattattctctgatagactgagctccttccaccagaaggcactgcctgcaggaagaagatgatctgatggccgtgggtgtctgggaagctcttcgtggcctcaatgccctcctttatcctcatctttcttctatgcagaacaaaaagctgcatctaataatgttcaatacttaatattctctatttattacttactgcttactcgtaatgatctagtggggaaacatgattcattcacttaaaatactgattaagccatggcaggtactgactgaagatgcaatccaaccaaagccattacattttttgagttagatgggactctctggatagttgaacctcttcactttataaaaaaggaaagagagaaaatcactgctgtatactaaatacctcacagattagatgaaaagatggttgtaagctttcggaattaaaaacaaccaaatacattttagtaaatataaa

SEQ ID NO: 88921 - DNA, 500 bp, Homo Sapiens
tgaagatcagatggttgctggtgtgcagtcttatttctgagttctctattttgttccgttgatctatgtgtctgttcttgtaccagtatcatgcatgtgttctttaattctgcaataatttgatggtttttcagatatcctccaattaattgatttctggtttaattctgttttcatgtaaaaacacactctgtatggtttctactgattttaaatagttgaggtttattttgtagctcagaatatggtatgtactggtgaatgttccacatacccttatataaaaagtatgttctgctgttgagtggaacatttctataaatgtctattaagtcttgatagtgttttgcgggtcttttatgttcttcctgattttctatttatgtgtcccattaattactgagagtggattattgaagtcttcaactctgattatggatgtatttttttcagtttccgctcctttatttcgaagctctattgcgtacacacttaggatt

SEQ ID NO: 88922 - DNA, 806 bp, Homo Sapiens
cttaatgcagccactataacttgataagtcattgcactatttaaaaagttttagtaatatcatgaatttaatttgcttaagatttagtacatttcagaacttttgaacttttgacaaattgcattgggaaaagaagtctgttaatagtgatttagtctccccgcctcattcccacccccaacaaagcactatcattttcatttggaatgggtattttctgtttcatgatgtattttcaaatagagttcaggatctgcaattcagttcaacacaagtttgttgagctttaaaatgtatttgaagtaatatttaaataggcatttaaaatttcaaattagatgttaaatttatgcatagtaattttgcactgtaaaataattcccttctcccattccttgtctgccattctgaatatgcttattaaaatatttttttaaacatatttgcctacataatactgtgtgaatattttcattagattaattcactaagattttattagagattgtttgaatgatgcatgttattgacaaggcaaatatatatatatacacagtctgtttcttctattcctagacatattgcactactttttcagtggttcttggtcccctttaccacatcttgggtgatgtatttttgtcttcttcccctttgccacaagagatcctttcagtccctagacctccattcactctgtttctcttctgctggattatataatttaaaaataatgtgttcccgtattttgtagtggagttcatatcacattatgttttgcaaaataaaacttgttttgtcacaag

SEQ ID NO: 88923 - DNA, 744 bp, Homo Sapiens
gtataaagaatattgacacattggacacagaggacctccaccaggtttagggaatagaatctgaagagacataactttggatgctccctggaggccctgcctgagtcccagtctcttctcttctcctacagagggaaccacttcctgctttagtctttattattcccacacttttcttcatagtacgtttctttcaccgcgtatgtgtacatccctaaacaataagccatttagtttttgaactttgttttctttttgaggcagggtcttgctctgttgccttggctgtagttttgaactttgatgtgaggaaattctcctgcgtggctgctcctgcactgcatggctctgagcatctgctctatgtctatttctgtcctccattctctccttgagacccacccacactgacatggttcattttcattgctgcgtgatctcctgtctccattctctccctgagacccacccacactgacatggtccattttcattgctgcatggtctctcgttgtctgaggggagcatgggaaatgtcttcatcttcccgtggatgagtgtttggccaggttggggccctgaggactgcgttttgctgggaacattcttaggcatttcttttgtccacaagtgcaggttgcttctggtcagtagctttcaagttttaaaatttcatcccaggtaaaaaatgtaattttcctcataacccacaacacacatcctttcatatacaagcataacaaa

SEQ ID NO: 88924 - DNA, 669 bp, Homo Sapiens
  misc_feature (621)..(621): n is a, c, g, or t
gcggccgctcccgcggccccctcggctttgccagcgccgcctgcgaggcggaggcaggatgaagatgactgtggatttcgaggagtgtctgaaggactcgccccgcttcagggcagctttggaagaagtagaaggtgatgtggcagaattggaactaaaacttgataagcttgtgaaactttgtattgcaatgattgatactggaaaagccttttgtgttgcaaataaacagttcatgaatgggattcgagacctggctcagtattctagtaatgatgctgtcgttgagacaagtttgaccaagttttctgacagtcttcaagaaatgataaattttcacacaatcctgtttgaccaaactcagagatcaattaaggcacagcttcagaactttgttaaagaagatcttagaaaattcaaagatgccaagaagcaattcgaaaaagtcagtgaagaaaaagaaaatggcgttagtaaaaaatgcccaagtgacaaagaaacaaacaacatgaagttgaagaagccaccaacattctgacagcaacaagaagatgtttccgacacatagccctcgattatgtgcttcagattaatgctcttcaatcataaaggagatcaganatcctacaatcaatgttgtcatttatgtatgcccatctggccttcttc

SEQ ID NO: 88925 - DNA, 471 bp, Homo Sapiens
caggcccgcaaggagaggccggctgacatggacaaggcctggtggaaatcgttcctcaaccacctcactcggaagaagccggctaccaggatcgtgctgattctccccctggacaagcggcagccgctggccaacgctgggcaacggattgactacgcgtccggcgctgggctgggctccccggcggcacccagattgcgcggagcgggcgaaggtagcgagcgcgagccgaggatgccggtactgctgctgctgcggcggcaagaggcgcggcggccggaagagggcggggccagggcagctctgagctggccgcggctgctctcgcgcttccggtccccggggaaggctccccgcgaagccggccccgccgaggagcagccgcgcaaacggtgccgctgccctcgcccgcagctttaaacgcttggcccggaccccgcccaataaagagtgcgtggcaaccctgaaaaa

SEQ ID NO: 88926 - DNA, 1150 bp, Homo Sapiens
gcggccgcactcggggatcatggcccaagttgcaatgtccaccctccccgttgaagatgaggagtcctcggagagcaggatggtggtgacattcctcatgtcagctctcgagtccatgtgtaaagaactggccaagtccaaagccgaagtggcctgcattgcagtgtatgaaacagacgtgtttgtcgtcggaactgaaagaggacgtgcttttgtcaataccagaaaggattttcaaaaagattttgtaaaatattgtgttgaagaagaagaaaaagctgcagagatgcataaaatgaaatctacaacccaggcaaatcggatgagtgtagatgctgtagaaattgaaacactcagaaaaacagttgaggactatttctgcttttgctatgggaaagctttaggcaaatccacagtggtacctgtaccatatgagaagatgctgcgagaccagtcggctgtggtagtgcaggggcttccggaaggtgttgcctttaaacaccccgagaactatgatcttgcaaccctgaaatggattttggagaacaaagcagggatttcattcatcattactagaccttttttagagccaaagaagcatgtaggtggtcgtgtgatggtaacagatgctgacaggtcaatactatctccacgtggaagttgtggccccatctaagtggaaaactgaacccacagaagattctggcatttccctggaaatggcagctgtgacagtaaaggaagaatcagaagatcctgattattatccatataacattcaaggaagccaccattcttcagagggctatgaaggcacacaaatgggaagtaccacccgaagattctactccgcatgtcccttcgcaaaacagggaggacccctgaagttgaggcggccattcgcagatggaggattattctcccccggcctaggagaaccaaagggccagtgagctacccgcggccaccagtccccggaaaccgcccaagggcttggaaccgggaaatgagggggagtcccacttccagaaaatggaatggcttggactcccggagtctacaggagaacgaggtgggacaaatgggttcgaacgcgaaatatgccttccaggccaatagaaggcacaagggcccggggaaaggaaacccc

SEQ ID NO: 88927 - DNA, 786 bp, Homo Sapiens
  misc_feature (59)..(59): n is a, c, g, or t
  misc_feature (64)..(65): n is a, c, g, or t
  misc_feature (116)..(116): n is a, c, g, or t
  misc_feature (134)..(134): n is a, c, g, or t
  misc_feature (144)..(144): n is a, c, g, or t
  misc_feature (196)..(196): n is a, c, g, or t
  misc_feature (212)..(212): n is a, c, g, or t
gatggaaggcagcagagagcacagactatggtccaggtgaaaggccgtgctgggccacntctgnncaatgtccagaagcagcagcctctcagcccaggactgcagccggtagcagnacagggacagaccagacntcagagctcntgcaaacagctgatcagcaccttctcctcactttcctgctctgggctcctgnaggccacacgatcgcntgggatgtcatcaccctgatggctcacactgctgagataactcacgagatcattggctttcttgacaagaccttgtacagatggaatcgtcttggcattgaaagccctagatcagaaaaactggcccgagagctccttaaagagctgcgaactcaagtctagaaggcacgcaggccgtgtgggtgcccggcgtgagggatcaggctcgccagggccacaggacaggtgatgacctgtggccacgcatttgtggagtaagtgccctcgctgggctgtgagaatgagctgtacacatcttgggacaatctgctagtatctattttacaaaatgcagagccaggtccctcagcccagactcagtcagacatgttcactaatgactcaagtgagccttcggtactcctggtgcccgcccggccagaccgtcagcttgataattactaaagcaaaggcctgggtgggagaacaggtttctagtttttacccaagtcaagctgcacatctattatttaaaaattcaaagtcttagaaccaagaatttggtcatgaaccattaaagaatttagagagaaaa

SEQ ID NO: 88928 - DNA, 586 bp, Homo Sapiens
agaaatgctccagatattattctcagcggatggtctacctggaaagggctgggctttcagggttccaggggtcatccctaatcaagcttgctcaaagatcatcccactggctgttaccatggagcacatctcagagaaggtgtctccgtcaggaaacatctccagtgcacccaaggaattttctgtctatggcatcacaaaaaaatgtgaaggagaagaaattttcctaggtcagtttatatataacaaaacaggaaccaccgttcaaacatttgaactccagcatgcagtttctgaatatttattatgtgtgaaacttaatatctttagcaactggggacacccgaagtatacttgtttatatcgattcagggtccatggcacaccaggcaagcacatctagaagagttggtacagaaggccatgccacatgtccagaatattcaagaatgcttattctcttagatgataccgcacccataggaattgagaattgggagtgggaagaaaacctcaaagtggttcatacttgcctgtaaaaagtaaatgcattttactaataaaaaaatatggaagtaaattaaaa

SEQ ID NO: 88929 - DNA, 402 bp, Homo Sapiens
tttccgagttacacattgcatttaattgtcacatctttgcagtctgccccagtttggagcatttcctcagtctttccctgactttcatcgtcccaacagtttggaagaatgcagccctacattctgcagtgtgatgctcaacgtggtccatctgatgtttcctcgggaccagtttcaggtcatacgttctgaactctctcatcctcacccaccagcaagatgaaggtagggtggccactgacaggtgacgttcgtgaggtgcatggcttttctgaagataagcagtaattgaaggaggagaatcagatttaaagcctggggctgctgggagacgctagtcttgccccagatgttcaatgcctgcactggtctatttgcaggtgcaggggaggcttctgctgt

SEQ ID NO: 88930 - DNA, 609 bp, Homo Sapiens
ggtcatcgggctgagcaatctgacccacgtgctgtatcctgtccccctggagagttatgaggacatccatggtaccctccacctggagaggcttgcctatctgcatgccaggctcagggagttgctgtgtgagttggggcggcccagcatggtctggcttagtgccaacccctgtcctcactgtggggacagaaccttctatgacccggagcccatcctgtgcccctgtttcatgcctaactagctgggtgcacatatcaaatgcttcattctgcatacttggacactaaagccaggatgtgcatgcatcttgaagcaacaaagcagccacagtttcagacaaatgttcagtgtgagtgaggaaaacatgttcagtgaggaaaaaacattcagacaaatgttcagtgaggaaaaaaaggggaagttggggataggcagatgttgacttgaggagttaatgtgatctttggggagatacatcttatagagttagaaatagaatctgaatttctaaagggagattctggcttgggaagtacatgtaggagttaatccctgtgtagactgttgtaaagaaactgttgaaaataaagagaagcaatgtgaaaa

SEQ ID NO: 88931 - DNA, 589 bp, Homo Sapiens
gctttctgactccactcttcctactctggcttgctaatcaactttacctggtttgaaatgcccacccttatatacaggcaattatgtggattagaaattaaggatgaaacatcttcccaaaaggtcactgttaagatttacccatcatcttggtgctcctagctctctacgaccaacacagagtggctgacacttcaaccaggcagcttggattgcaatgaggacaatgcaatgcatttgggctggaaacactgcacagaatttaactgtatgaatgcactctagttcatctatgcggtggttaagagcgtaggctctgaagactgctagggttcaaatcccaggtctttcaacatcaactggctgtgaaacatgggcaagtgagtaaacgtttctgtgctttggtttcctcaccggtaaaatgtggataaaagcaattccttcacagggttgtttggaggagcaaatgactttatgtatgtgaggcacttagaataatctctcagtgttattatttaaccaacatttttgttgaatatttagttcatttccaggttttcactcttacaaatatactgtaattaacaaa

SEQ ID NO: 88932 - DNA, 773 bp, Homo Sapiens
  misc_feature (21)..(21): n is a, c, g, or t
  misc_feature (82)..(82): n is a, c, g, or t
gcacttcaaaaccccagttgnataccgcattacacacaatcaatgtctagacacagaggcaaaggatgcttggaaactgagnccagcagagtgggagaagtgtctgaatttgcctctgaatgtgcaagagggtgactttcaaacagaagtttaaaaaaatcaagatggactaaggtagagacaaaactttattgcactgacacttaagacttgggaagcctgacatttctatctggacagtgtgactatcttatgtcaggaccttcatgtgccaaacgtcagtggtgttttcatatggtaacttctcactagtcaggctagtggagagatgaccaggtgtacagttctgaccatcctgtgttgtaagtacccgtggaatggatttgtaaggtaatctttatagataaacctcaagcaacgattcatgttgtaaccgcttcatatggtttagttttcaaaaaacttcaccatgaagcacaatgtatatatttatgcagtttttaaagtttataacagtctgtttggccattactacactttttactttataatataaaagcaaagtttttgtcattaaatgaatgtttgttgagctacattcttcattgctttaaatgcaataaagtaataatctcacttttatatgaataatatatttcacatctttattattgcagttttctctagaaagctctgagaagctttctctgctgcagctgtgtataaaatatttaaaatgttgtatggtgtaaataaacttttgtctacatatc

SEQ ID NO: 88933 - DNA, 640 bp, Homo Sapiens
ctcgccctcaagcgcctcaaagcttcctaagcgcttacattggtcttgggacagccgactttggcttctttgtttgtttgagggaccgcggaagtggcggggaatgtgcccccgcttgagaccgcttattgtgagccctcaacggaagtcctgcacggaaggcaaccgcctccccgctcgcgttagaaggcttcatttgctctgagttatcattgagaactaaatggagaagaaaagaactgaaggcctgaagatatgtcatctgtagaaaagatggacatctgaaatcatcaaacccttgagagaaacagccctcattcttttatgagacaacctggaagaaaacaggactctgaagatttgtctccatattctctggaaagatgtactctgtttgcaataagagggagccacatggtttattagatggttattaattgagcattctgtgcaaagaagtttgtgccttagatttagaattccaccctcagttggaatacagatgatccctaacaagtcacatgaaaaaatgaattgtggagccagaagagtgagttcttggagaactaagggccagagacctgtgagcaagatttgataattttataaaaattaaaagacgatttgaaatgttaaagaa

SEQ ID NO: 88934 - DNA, 892 bp, Homo Sapiens
gcgccgcgcggaggcagggcgggcgtattcaatggaagtgtgttaccagctgccggtactgcccctggacaggccggtcccccagcacgtcctcagccgccgaggagccatcagcttcagctccagctccgctctcttcggctgccccaatccccggcagctctctcagaggcgtggagctatttcctatgacagttctgatcagactgcattatacattcgtatgctaggagatgtacgtgtaaggagccgagcaggatttgaatcagaaagaagaggttctcacccatatattgattttcgtattttccactctcaatctgaaattgaagtgtctgtctctgcaaggaatatcagaaggctactaagtttccagcgatatcttagatcttcacgcttttttcgtggtactgcggtttcaaattccctaaacattttagatgatgattataatggacaagccaagtgtatgctggaaaaagttggaaattggaattttgatatctttctatttgatagactaacaaatggaaatagtctagtaagcttaacctttcatttatctagtcttcatggattaattgagtacttccatttagatatgatgaaacttcgtagattttcagttatgattcaagaagattaccacagtcaaaatccctaccataacgcagtccacgctgcgggatgtactcagggcatgcactgttaccgtaaggaacctaaagcttgcaattctgtaactccctgggatatcttgctgagcctaattgcagctgccactcatgaatctgatcatccaggtgttaaatcaacctttccttattaaaacctacaaatcacgaagattcatcataatcaaaatggaagtactcaattaatccctcgtgcc

SEQ ID NO: 88935 - DNA, 426 bp, Homo Sapiens
ttttgactttaatgatgttcatttatttaaacgatctgtatgaattcggtgattttgtggatacgcccctgacagacaaggattcacagccgacggaagtcagggaggctccctgcaaattcttcatctccgcggggcctgcccgagccctgatcctgcagagccgtggggctgaggtagccgccggttgtggtccaggagtgcgtctttctggatgcggggcaccttcatttcaccgtagcaaccgggtaccaaaagtagaagcggatttttggaaaatgagtcattaggtcccaaagagaacctattgcaacatggactccataacgttcttgaggatcatcctgagaaactgatgtctctcgttagacaaaaatgcacgatttgcttgggaaaggggagtaaaaatggtgctggcatccattg

SEQ ID NO: 88936 - DNA, 672 bp, Homo Sapiens
gggacgctggcggtggacgcaggcagcatggaccacggttgctgggcggatggggagcgtctatggtcagttgccttagaagtggtgagatgggaagctgcagttggaagaccctggaggatgcctgacaaggggatgtctgacacatgattggagctctttttgaaatgtttcttgcccttcctggagcagaggagccattatttatgcagtgattatgcctgtcatcgctggtggtatcctggcggccttgctcctgctgatagttgtcgtgctctgtctttacttcaaaatacacaacgcgctaaaagctgcaaaggaacctgaagctgtggctgtaaaaaatcacaacccagacaaggtgtggtgggccaagaacagccaggccaaaaccattgccacggagtcttgtcctgccctgcagtgctgtgaaggatatagaatgtgtgccagttttgattccctgccaccttgctgttgcgacataaatgagggcctctgagttaggaaaggtgggcacaaaaatcttcatgagcaatacttcttagtagattgttttgttattcaaatcaagttctagtgtttttatgtgagattatataatttacagtgttgttttatatacttttgaataaatgtacactattaaaaataatcctctttgctgccaaa

SEQ ID NO: 88937 - DNA, 367 bp, Homo Sapiens
tttgaggtttcactgacactttccctggagaggggccattttattcctttatatggcacatattttacataatttttatctaaagggctctcatttgcctaagactgacaatacaaagaaaggcttattgaaagacacttccctttgaaaataacccccactcagggtagaaataaaggtggacaaaaatgccagtcaactacttaaatgtcagtatttgtaaaattccttaaaattcacagtattttgacttttggaagcgctctaacattgaggtacctgcaggtcttggcaattcagcattttagatatttattttagtttatatgtgttttgctttactccgtttgttttcagttttttctca

SEQ ID NO: 88938 - DNA, 1022 bp, Homo Sapiens
gattgcccccaatttcggaaaataaagggggagggccttttttaaggaataccttggaaggttagcgcaggggaggggaggggatttaaagtatggattgtgtggagccaacctctttggtaatgggcttttcattcttaaaataaacatgggtacgtgcccaccagtttccacgaggcaagtacagtgcaaacggcgaactttctgcagacaatccaattaacagatactctaattttagctgccttaggggtcttgattaaatcataaatattagatggatcgcaagtggtaaggctgctaaagatgattagtacttctcgacttgtatgtccaggcatgtgttttagagtctgcatagccatgcttagggaattataaagagatggctctccatggcaggtcatatccacagcttccttcaaagacgttatatgttttcttgggtttcctgaaagttcagtcaatttttcagctcttttactcttagttacaattattccaatctgactaataggattttgatcaaaatattcctctacaaagtattccaacaactttaaagtacacgtcagtctattaggctttaaatcttggtcttccattgttcttgatccatctactaccacataaaggtggcgcatcattccaagtcgaacttgtccatggtgctcaaatactctttttctctttgccttgaatagaatgtcttctattgtagctttaagtgatccagattcatcttctttaagaatctcccatgttctttcatagcctccttcccatcgcttagttctttcaggttcttcatccatttttttcaaaactgtattttattattcaataatcttcctctgccttcacaagctccttcacatcctccttccctatgagcccaggcagggcaattcaacctccgttccccgccacgaaaacgctcccagccgcctagctagccagacggcctgccccacctctgcgcctcacagacttccacacgcgcgccacccaggcctcgctac

SEQ ID NO: 88939 - DNA, 548 bp, Homo Sapiens
tgagctgcaaggctccattagaagagaaatgtggcatgaccctgtgggacaattgctggtccctgccctacattttcttagaggactggagcccactgtgggccatggtcaacttatgagttgaggtaaaggcctcatcctaggagtgcatgtgcttattacacatatgccaccgtgcaaagtacccagagaaaatacatgtaaattgcccatctcgagcgagttgtgctcacttccttttacaaatttgctaaaacactccttcgttttgtactggatattgctaaaacaacatttgggcctgagactcttctccaggtcattcaggtggcagtggcccagccaggctgtgaacccgggctgtgtgattccacagctcacgctctggcctgtgtgcctccttatcgtggagacatggtgttttctcattctttcctgtagccggatggaggttcattgccttgcttctgtccctcgcgcggagatgggcaatttacttcacacgtttcttctctggtctgcctgcaggctctcgggccagcggccgc

SEQ ID NO: 88940 - DNA, 836 bp, Homo Sapiens
caagataaaaccacaacaggacgtggcatctcatccagcagcggtaggcaggcccagaagctggcaagccgggcagcgcaggctgctggcgaggtaggtggagaacaggcatcctcctacggcactgacagagcaaaccgcaaacgtaccccccttctcagaaatctcccttctccaaagcgatcccaaagctgtcctcgcagaaatatagctgatgtactcacaaggcatctgcagcactatttataaaagcagaagattggagcccagctgtccatgatgtggggcggccaggggagggggaggttgagtccacaggggaacatcacgcagctgtgcagacacatgcacgccatccacataacacgcaggtacaaagggacggagggacagagagaaaaaagtctgggccggggtaactgtaagccaccgtatatgtcattgggaacactgactcatttaccctgggcctgatgtcactgacttctacctcctgccccaagacttagagtgaaagatgaaaagatgacctgttaactcacctgtgggcaggatgtgtagaccatgtagcatatgtgattgaatacacagccagtccctccattaactccaaaggacacggctccttcggtagctgctggaggccaggcggaagccactcccaggtgggtgcatcctggctgactttcctggaaagtcccgatgctacactgacaactacattctctttagcaattgtaggatggccagcaaggacactgtggttatcggcggtggaaagtaaattcttggcatcctactgctattccaggctattaaactacattacggtaaaa

SEQ ID NO: 88941 - DNA, 626 bp, Homo Sapiens
gacatttggactctagctatatgacatactgggaaaggcagagggtggagggaagatttcacttcattgtctagcccagaatcttgagcaagctaaagaaaccatcataatctaaaattgcttcatttaacactaacaatttagactttttaaaccaagcattgaataatggctggataactgccgaagtaagcgccgctccatgaagtctgcttacttatttaaaaattgtgtatcagttttaaatactgttcattgtgtgcagatataaggggaatagggcattctgtagaattatacatgtctagtttgtaaagtgtgtcctgtgtactgcagatgtgtgttctctgggctttatgtatctgtacagtagctttcacattaaaaaaattgtggacaaacttgtccggggggtttgaggggagaatggtggtttatatcaataacgatgctgtactatagtccatgtaacaaaagatctggaagtcaccctcctctggcccacggaaaattttggtaatcttctaggttctaaaatgaagatgtatgggtactctggcagactgcatgttgtataatttgaaaaatactaaaagtggaaaataaaattgaattaaactttgaaa

SEQ ID NO: 88942 - DNA, 207 bp, Homo Sapiens
agtagaattcacactaattgctggaattacattttgctacagttttattaagaatgtgtcacagacataatgttttgccaaaaaaaattcaacgttttcttataactataaacaaatcacattctttgtaccaacatcattttatcctacctcagtaggatacttcatagcagataataacaatacactcagtcttttaggttgaaa

SEQ ID NO: 88943 - DNA, 491 bp, Homo Sapiens
gggggcagtcaacagagacccctgctcagggaggagaccgtttcctgccgttgcccgagcccaccaagtcacaccaggcccgctgcctcctttattggtgctgccggttgggggagcgtgagttggagcctgggctggagggtagtgagctgccactaggcgcccgcagcgcatgggagtcgagctgctgaccggccaggctggtgtcccctgtccccgattcctcactattttcctccttctggctgctctgctgctctggacactcaaagtggacacagtggaacacctcatttgctgtgttgtgtgtcccaacgatacggatgaaggaggcaggctgcctttcaaaagttactgactgccaggacttgcaggagactttagttctgtcagcaaccatggtccactgttgctggttggtaaaaacctcaacgtagtagctatagcttcgatcatcacaatcccaaagtgagtaaccgtattgacccaat

SEQ ID NO: 88944 - DNA, 754 bp, Homo Sapiens
tcactcctaacttctcccgagcctctagaagagaaacgcactcttctgggtcctaacggagtctggaagaaggctttggacagaacagggactaggttttgtggacagaaacaaagtgtttgggagagattatggccagtggtcaagcgcgccccccgtttgaggaggagagcccccagcctagcacaacggtacggtcccccgaggtggtggtggatgatgaagtgccaggaccatcagccccttggatagatcccagcccccagcctcaatcccttggcctgaaaaggaagagcgaatggtcagacgaatccgaggaggagctggaggaggagctggagttggagcgcgcccctgagcccgaggacacctgggtggtggagacgctgtgtgggctcaagatgaagctgaagcgaaagcgagcatcctccgtgctccctgagcaccacgaggccttcaacaggctccttggggatcctgtcgttcaaaaattcctggcctgggacaaagacctgagggtgtcagacaagtatctcctggctatggtcatagcgtattttagccgtgccggcctcttctcgtggcaataccaacgcattcatttcttcctggctctgtgagtagtttgcttcttcccatctgtcaatatccaacaccctgggacagtggacgaagtgggattccaaccttccatctatttttttaccctacttctcctctttactctgtatataaaaacgataagattataaaa

SEQ ID NO: 88945 - DNA, 474 bp, Homo Sapiens
ttgttggaatatccagagaaaaatggaaacagttcatgaagcctcaaaagatggaatctatccagctactttggttttgtttacttcttagagactcacgttgcgacatgttaacagtaaccaatgtctccatgaaccttctgaagaagacaaaatggtgcctacaatgcaggactgtagtggaagcagatcccaacagtggctgctaaggaacatgaccttgggcacatgaagatcatgtcctccaagccatgaaagtgtctacgcttttgtttttccattatttcaattgggggaaaatattaactttgctgaattgaaagttttaaaaatccttttagtattctaaaacacaattgtttctaattcgtttctagaaatgtttgcttatttccctactaaaatttgtatctgatcaaagcacataagaatataaataatagcaaactactattaaacaacagaacaacttgt

SEQ ID NO: 88946 - DNA, 515 bp, Homo Sapiens
ccaagcgccgactcggggggcgggggaacggaaaccgacgtctccccttcgacctcccgggaaacccttctccgtttactctccattccgcgaccgccaataaagaacagcatacatgttgaccagatggagagggagaagtctgttcccgctgactgacagcagatccggccagtccgcaggaggtgggcgtgctcacggggccggacaggcacaccttcctgcaggcgggcctgagcgtggggggccgccgctgctgcgtcatccgcgaccacctgctggccgagggtgacaccgtgctggacgcacgcaccaaggggctggacgcgcgccccgtgtgcgtgggcacgtgccccgcgcgcgctcctggtgctaatgggccgacccggcgtacatgggggcatcctcaacaaaacggtgcacgaactcatacgcgggctgcgcatgcagggcgcctaaccggccagccaggccgcccactggtagcgcgggccaaataaactgtgacctgggcg

SEQ ID NO: 88947 - DNA, 971 bp, Homo Sapiens
ctgtggaacagctctgtccatttcataagcctgcttcacattgcccaagagtatactgtcctcgtaactgtatgcaagcaaatccacattatgctcgtgtaattggaactcgagtttattctgatctgtccagtatctgcagagcagcagtacatgctggagtggttcgaaatcacggtggttatgttgatgtaatgcctgtggacaaaagaaagacctacattgcttcttttcagaatggaatcttctcagaaagtttacagaatcctccaggaggaaaggcattcagagtgtttgctgttgtgtgaaactgaatacttggaagaggaccataaagactattccaaatgcaatatttctgaattttgtataaaactgtaacattactgtacagagtacatcaactattttcagcccaaaaaggtgccaaatgcatataaatcttgataaacaaagtctataaaataaaacatgggacattagctttgggaaaagtaatgaaaatataatggttttagaaatcctgtgttaaatattgctatattttcttagcagttatttctacagttaattacatagtcatgattgttctacgtttcatatattatatggtgctttgtatatgccactaataaaatgaatctaaacattgaatgtgaatggccctcagaaaatcatctagtgcatttaaaaataatcgactctaaaactgaaagaaaccttatcacattttccccagttcaatgctatgccattaccaactccaaataatctcaaataattttccacttaataactgtaaagtttttttctgttaatttaggcatatagaatattaaattctgatattgcacttcttattttatataaaataatcctttaatatccaaatgaatctgttaaaatgtttgattccttgggaatggccttaaaaataaatgtaataaagtcagagtggtggtatgaaaaca

SEQ ID NO: 88948 - DNA, 773 bp, Homo Sapiens
ccatttgggagcctttagaaataaaactgctatagatattcatgtgcaggatttatgtggacatgttttcatttatccaagataaatgctcaaggggctaattgctgattcttaaggaccctggaagtcccacagcttgcaaattctaaactgctagttgaaagcacgtcacttccagtaggtgaccccttaagtccatgaagatgcaaacaaacagccaagagatctgaaagtaaatggatttcatcaggctaaacaagagctggaggccgaggagtggtgcaagcacctctgcatggagtgtctggggaccaggctcaatgatatcagccttgggaagcccgaccttctggccgcagaagtgcagcgggaacagaatgagagattcaacgtgtatcttatgcctacaccaaacctggatatttatggtgaatgcacaatgcagatcactcatgaaaatatctatctctgggatatccacaatgccaaggtcaaactggtgatgtggcctctcagctcactgagaagatacggtcgggactcaacgtggttcacgtttgagtcaggaagaatgtgtgacacaggagaaggactattcacttttcaaacaagggaaggagaaatgatctatcagaaggttcattctgcgacactggccatagctgagcaacatgaaagattaatgctagaaatggaacagaaggcccgggtaaggccccttccttggtaacctatcagcttggaaatgaatgtcactgggatctgaaaaaaaa

SEQ ID NO: 88949 - DNA, 840 bp, Homo Sapiens
  misc_feature (276)..(311): n is a, c, g, or t
ttgtatatatgtgtatatatgtgtgccctggactgtttcaaggtccatggagtacggctggtgtgtcatactgtgcaggcctgtccctgggagtgttcccgtgcctgggagagtggacctgtgctgtgagtgtgtggatgcgtgtgaacgcatgtggtaaggtgtgtactcagggcattctgttggcctaagtgcctcttctttttcttcttgtttctcatgaaaagtttgattaaaattcaggaagcagcaaaaccttcaaaacaagacatgtannnnnnnnnnnnnnnnnnnnnnnnnnnnnnnnnnnncacatctacatgccatgcctatgggccagagttgtctttattgtccaccatgctatctcacctgctcccagtcctgcctgaacagccctctctctcactcccctctcctccccttcctgtttctcgttgtcacacccatggcctcagccctgctccctgcctcctgcctatgtctcctctatggaaggaggcctccactccttccatctcttccttcagaagtttcgtctaatgggggcagtctccccttcctggcacattgcccctctgccttgccctcctgggccctgggctggcacagcccctggagcctcagaaatctgtttgattggatattctcctcggactgtgtgcaggttgcagaggaagagtagatgagccgggtccggcctctccctgcctgtggcccctcccctgcagacggatgcccattcctgcctggtccagtggggaacaggtcccacgccaggccagcaggcgggctcctttgtacagttcttacaataaaccctccttggtgcctgtggac

SEQ ID NO: 88950 - DNA, 582 bp, Homo Sapiens
gagccctagggcactgggtcctcagtggcatgggggtgaagcggagcctccagagtgggggcattctgctcagcctcgtggccaacgtcctcatggtgctctccacggccaccaactactggacccgccaacaagagggccacagtggcctgtggcaggaatgcaaccacggcatctgctccagcatcccctgccagaccacgctggcggtgactgtggcgtgcatggtgctggcggtgggtgtcggcgtggtgggcatggtgatgggactgcggattcggtgcgacgagggcgagtcgctgcggggccagaccacgagcgccttcctcttcctcggcggactgctgctgctgaccgccttgataggctacaccgtgaagaatgcgtggaagaacaacgtcttcttctcttggtcctatttttctgggtggctggccttacccttctcaattctcgcgggcttctgctttctgctggcagacatgatcatgcagagcaccgacgccatcagtggattccccgtgtgtctgtgactgcagcctgcctggggcagaataaaggaacggcttttattaaaaaaaa

SEQ ID NO: 88951 - DNA, 493 bp, Homo Sapiens
tgcatgctctaatataaatgttgttaaggggaggatagagataaatggaacaatctggaatacgttttttaaaattaaaggtaaagaaagaaaataatggcagatcatgggaacttattatgaaaaataaatacccgacttttgacatccttgagtttgggcagaatttctaagctatatccatcggcttgtccccgagtcctatttcctccattcatataatttccaaaagccaagatgagagctaaaatatccttcacgctcttcacgtgcagcaagtcctgtgatggcaaacaccagttattacggagctgaactccaaatgcacccatgttcattcagtaacaaatatcgactgtgtactcaataggctgtcgggaggcttggtaccaacagaattaacagttgctgaaatgaaaaacacactttactaagccatgagtgtctttacaaacacattaacagccattattttctacccactcaacattat

SEQ ID NO: 88952 - DNA, 439 bp, Homo Sapiens
tggaaagacgagaactctggcacacatcaaagagcagacaaaggctaagctctttgcaaagcatcaagctcgagcccatctcttccagacctctaaagagacccggttgcctcctccgctcagctcaaaggaagggcctccaaacttagaagtctcttctacccctgaaacaaaaatggaaggttcgactggtgtcattattgtcaatccaaactgtagatctcctagcaacaagtctgcccacctccgggagaccaccactgtactacagcagtctcttaacccaagtaaacttccagaaactgccactgacttatctgtgcatagttctgatgaaaacatacctgtgtcacatttatctgagaaaattgtttcatctacctcttctgaaaatagcagtgtgcccatgctttttaataaaaattctgtccctgtaaaa

SEQ ID NO: 88953 - DNA, 490 bp, Homo Sapiens
aggatctcaacttccggatgttcgatgtgggcgggcagcgctcggagcgcaagaagtggatccactgcttcgagggcgtgacctgcatcatcttcatcgcggcgctgagcgcctacgacatggtgctagtagaggacgacgaagtgaaccgcatgcacgagagcctgcacctgtcaaacagcatctgcaaccaccgctacttcgccacgacgtccatcgtgctctcccttaacaagaaggacgtcttcttcgagaagatcaagaaggcgcacctcagcatctgtttcccggactacgatggacccaacacctacgaggacgccggaaactacatcaaggtgcagttcctcgagctcaacatgcggcgcgacgtgaaggagatctattcccacatgacgtgccccaccgacacgcagaacgtcaaatttttcttcgacgctgtcaccgacatcatcataaaggagaacctaaaagactgtggcctcttctg

SEQ ID NO: 88954 - DNA, 691 bp, Homo Sapiens
ttaaaaggaaaacatagctataaataaaatactacatcgaaatccagcactggagttcatttgaaatttgatattttgtgtaaaataacaaacctattaacacagatttttaaaataactcagaatcgtataaagcactttggtacttatttgttctcttttcccttacattctgtgtggtaggtggtattatctctgatttacacatgaagacatccttgttaatgcaatttatttattcattcgggcatttactgtgtgccaacttgcaaaaggaatagaaatgtctgtgatctagatagttctagattgaacatagattttctgccaacaaatcctctctgctgttcacattatcctttgtttaacgtatgaaccaggttactaaaataggataaatcatgtgtcttaaaatatgaaaatagtaaagtctttgaggtcacttgatcttctctaagtagactttataatattgtgttttatctcatttctcaatattagaatacgggtagattttaattttgctataatataggaaatggttcatctttgtaccaaaatattgcattcttctgatatttagacagttggaaactttctaaaattgaggattttgtagtgtatactaaataattgcatattcaaaaaaatgtattctgagtatggtgatattaaacatttttccccaagg

SEQ ID NO: 88955 - DNA, 469 bp, Homo Sapiens
agaacttaaatactgaggaagaagtggaaaatgtagcagacattggttttgattgtagcatgtgcagaccctatatgcctgcgtctaatgtgccttcctcagactgctgtgaatcttcacttgtagcacaaattgtcacaaaagtaaaagagctagacccacccaagacttatacccaggatggtgtgtgtttgactgaatcagggatgactcagttacagagcctcacagttacagttccaagaagaaaacggtcaaaaccaaaattgaaattgaagattataaatcagaatagcgtggccgtccttcagacccctccagacatccaatcagagcattcaagggatggtgaaatggatgatagtcgagaaggagaacttatggattgtgatggaaaatcagaatctagtcctgagcgggaagctgtggatgatgaaactaagggagtggaaggaacagatggtgtcaa

SEQ ID NO: 88956 - DNA, 616 bp, Homo Sapiens
ggaaaatctgcctggtgatggagctcgctgagggaggggatgtctttgactgcgtgctgaatggggggccactgcctgaaagccgggccaaggccctcttccgtcagatggttgaggccatccgctactgccatggctgtggtgtggcccaccggaacctcaaatgtgagaacgcccttgtggcagggctttcaacctgaagctgactgactttggctttgccaaggtgttgcccaagtcacaccgggagctgagccagaccttctgcggcagtacagcctatgctgcccccgaggtgctgcagggcattccccacgatagcaaaaaaggtgatgtctggagcatgggtgtggtcctgtatgtcatgctctgtgccagcctaccttttgacgacacagacatccccaagatgctgtggcagcagcagaagggggtgtccttccccactcatctgagcatctcggccgattgccaggacctgctcaagaggctcctggaacccgatatgatcctccggccttcaattgaagaagttagttggcatccatggctagcaagcacttgataaaagcaatggcaagtgctctccaataaagtagggggagaaagcaaaccc

SEQ ID NO: 88957 - DNA, 436 bp, Homo Sapiens
gccaagcccctcttccgtcagatggttgaggccatccgctactgccatggctgtggtgtggcccaccgggacctcaaatgtgagaacgccttgttgcagggcttcaacctgaagctgactgacttgggctttgccaaggtgttgcccaagtcacaccgggagctgagccagaccttctgcggcagtacagcctatgctgcccccgaggtgctgcagggcattccccaagatgctgtggcagcagcagaagggggtgtccttccccactcatctgagcatctcggccgattgccaggacctgctcaagaggctcctggaacccgatatgatcctccggccttcaattgaagaagttagttggcatccatggctagcaagcacttgataaaagcaatggcaagtgctctccaataaagtagggggagaaagcaaaccc

SEQ ID NO: 88958 - DNA, 1051 bp, Homo Sapiens
ttatatccaatgtgtcttttattgacgcctcctgtgtgagtgggcggacagaagagtgacggatgagtaagacacatgggcttccaatctagtggagagactgacaagcagtcagctcagcggtcacaatactgtgtgacaggagctgagatccaagaagtactgggtcctgtgggagcacccctgacttgaaggacaagtcagtgcaactgaatggccagcccttagtgatggtggacgacgggaccctcccagaattgaagccccgcccccttcgggccggccggacattggtcatccctccagtcaccatgggcttttttgtggtcaagaatgtcaatgctttggcctgccgctaccgataagctatcctcacactcatggctaccagtgggcctgctgggctgcttccactcctccactccagtagtatcctctgttttcagacatcctagcaaccagcccctgctgccccatcctgctggaatcaacacagacttgctctccaaagagactaaatgtcatagcgtgatcttagcctaggtaggccacatccatcccaaaggaaaatgtagacatcacctgtacctatataaggataaaggcatgtgtatagagcagaatgtttcccttcatgtgcactatgaaaaccagctgacagcacactcccaggagaaatgtttccagacaactccccatgatcctgtcacacagcattataaccacaaatccaaaccttagcctgctgctgctgctgccctcagaggaagatgaggaaggaaaaaaactgggtggacctaaaaaaacccatcctctcccaactccttcttctctgcctctttcttgctgctgccctgagttttttgacacatctctttccataggggagtaatgggtgtgtcagccctggcctgctgggagagctgtttgtatgatttcccggctgatgtatgagcgtgcgcatctgggttcctgacagtggcatccatcactggcagttcttctgggaagcgggtgcttcaaaagtaaaattacaatcacactccagaaa

SEQ ID NO: 88959 - DNA, 639 bp, Homo Sapiens
actgcgagagggtcgtaaccatgaggggttcctgtgagaggtctggggaggatgaagagcagaaagaagaggctatggtggcctgtgggcgtctttcaggggtccccgaggccgagcagggtcccgaggccaattgggactccgacctggagacggaaggtgctcgggggagggggcaggcccgactcctcccctttgggggtcttctcccgcaggggttggggaaggcgggctggggctaaggccagcagggaacgtacccgcctgcggggcgcctccagccccctgccttcccttcattgctcctggaagcatcaggataaaatgcaaaatcccgccagacagtgcaccaagggctgtcccaccctgaaatgaaatcagagccgggttttcccaatccacaggaaaaactaagctaatggatgtatggaatttagaactatctcggttttttctcccgtaaaatgtttacaaaacatttgtggcctgcaatccaggttaaaagacacagcatgcaatttggcatcagacaggcagaggcctgactctggcaggattagctaccaccactagctgtgggatgctcagcgcaggccagccatgacttctactacaaacaacattgggttgcttgggctc

SEQ ID NO: 88960 - DNA, 808 bp, Homo Sapiens
ggaacctcttggcttcttccagctctgcctttaccttctgcaacagcaggttttgttgctgggccacatcctctgtctctaagcacgtcccctgctgtaagctctggaagcgactctccaagatgaagggcctgctggcatgaggcagggttgaccgggcccgtcttccccacctggctcggggggctctgaaagcagggccttctcactgggtggctcgcagttggctgggtcgctttctgccatcagcagtaagccctcgggcctgcagccttcctccagctcctggagctgctggtgacactggtggagcctgtgctcgatctgggcgatggtggcagaggcgcgctggttcaccttctcaaaggcctgctggatgtgcggcacctggtgccggtctgctttggataccagcttgaggtagctcacagtgttgccatcccgactggccttctccactctcagctgctctgagaggtagaggatgcggtgcctgacactatcctgtaagttgtgggctaggcctccatctgcgaggctggaagggccactggggccgtcttcgctggatgacagggaccggcatgaaggcacattggaggggagggttgcgctggggctcctggtgtgttccgcctttaaaaccatgacttttagactgcaggctgccttctcaatagcatcaatgcaatccagaagatagttgactgatatcttcgatacactgagagaataactcagaggtggggagaaggttctctgagaccgacatgggggctagtgctggcaccaccggacatggggcatt

SEQ ID NO: 88961 - DNA, 709 bp, Homo Sapiens
tgactcctgccgtagctgcggcaggcctggaggccgtactgggacctggccaaagacccagaagtccagctttgaagaaaacctggagaaagagagagtcacaaatcatctccatactgcaggagatgcagaaatggcagaagaaccctctgcacctggcctgggttcgggtaatcagctgggccagcttgtcatctcgcatctcctctaggagccccagaagaccagctttgaaaaagacctgtgaatggaaagagttgcaaatcacaagctttaataaagttcaaagggacaggaatagcatcagaatacaccataatcaggagaaactgacctctgtttgaagtctgcataaaggattctgcttggaaatcctttcctacagatgcggatgccttccagcacaccgttacacctcagctggtgggaggacaagctcatgctccatggcacctaaaaatgcatatttatttcactgcagagctgttgaaaaggagaaatgcaaaaccaaccttctcgatgagctcgatgcaggcagccaggtccatcccgaagtcgatgaacgtccactcgatgccttccttcttgtactcctcctgctccagcacgaacatgtggtggttgaaaaactgttgcagtttctcattggtgaagttgatgcacagctgctccaggctgttgaactaaataaatagatatgtttaaaaaa

SEQ ID NO: 88962 - DNA, 391 bp, Homo Sapiens
cagcctgaggccgtactgggacctggccaaagacccagaagtccagctttgaagaaaacctggagaaagagagagtcacaaatcatctccatactgcaggagatgcagaaatggcagaagggtagaatacacaataattacagagggaaatgaccaaagatgtcacattttgtgcctgtcttcagtcattccatggcatcaggacatgatcactcttcacttatgacttttgtgtgaacctcccggctcttcacccgcagtttgttcacctgggactcagcaatgtcagcccgttcctcggcctcctccagctcatgctggagcttgcggaatttagctagattggtgttggattgttcctcctgagaataaaaatggaattgtaaggaaa

SEQ ID NO: 88963 - DNA, 539 bp, Homo Sapiens
tcagcggtaaggtaagcaggacccagaggagctgatattcacagttcttacatgtacaactctttcaggaattatccataaagtactttattttacaacctgctttacttgtaaaactaaaggtgcacttttttacataaaagttttatacagtgttaaaaccagaactgtgtgtaaaatactgcatgtaaatgtttctaaatagtcttgttccagtggttcatcggtgacttctgtggcttcgtcatcattatccatggatgattctgaaagaatctctccagttttactggaattggatcctactaattcttctgtttcacggcagtcagaagaaccactactttcagggccttcgttttcactaccttcagaatgtagtaaatctttctcagcttgagacacatcagattcctccatttcattattttcctcagaagtctcttcattcacagttgaggcatcatcagattctttttcttggttttttctttctgggaccatttctcttgatgtcataaaagcctctaaaaataaaa

SEQ ID NO: 88964 - DNA, 491 bp, Homo Sapiens
cgccaatttatatgtaccttcagcgcagttgcaatgtaagagatacggcacttctggccaggctactttatcacacttatcctctgagaatgaccaataaccaaggaattctacctgcaggaatcatgctaccagaattccgcctcttaagggacaccctaataaagcaatcgcaaaaacctttatccctacagggtatctgcaaaagaaacatcaggaatatttatggtgagaaatacaaacagcacttgaagcaattcctcccagtgacaatatggaattctgtctactgctgttatgacttggcatatacctcttgaaataagacctcccagtttcacagcagagggactttcggccactcaaactgcattttctggctagacatgtcccagaaaatgcttcacctatcacctgtgacatcccaaatgtacaaactactgattcttgaacatgttccaaaatacaaagtgatttgtctattaaaaaag

SEQ ID NO: 88965 - DNA, 564 bp, Homo Sapiens
tgacactgggcattccctgcagacagggcagcccctacctctctgcatatcctccatgcctgccaggtgcttgggacatgcaggaatgtttgtgaggctctccatacagtgcctggctcctggcaccctccaggcagctccagctattgctaccattgtgatggacaaaacgaacgacgacaagacatactttttcaccacctcctcgagatccagcttggaacgctccatctcattgaggttgtcgatggtcatcttcaggtcactctcagctttccgacgagccttttccacctccgcccggattttcttttcctgctcccagttatcctccagctacagagacaagaacagcaagagaaggtagacgaggagagtttgaggtcagaaggcaagaaggaaccaaactgggtccgatcctttagctgtggcatcagaagggccctcacgccccgggggatgtgttggtccagttttcaaaactaattttcggaccccgtgcccccaaagggatttggccttggagttgtaaaggtggccacagcaatgggtattacctcatgg

SEQ ID NO: 88966 - DNA, 457 bp, Homo Sapiens
gcccccaggaggagcaggctggtggcactctcctgacctcacgctgccaaggtgcgccctcgactcccgatttcatttgctggccaggaaaatcgaaagggaaacaccctcaattaggaaacattccaaggggagaaaagctgcaaattgctcaactggcattgctgtaacccgttccatttaattggtttttatttcttttgattttcaagctctgctaagctttggggtaccaacgtcatcttcaggtgacctgaatctttcccttaaccgtacagtttctcgatggaattgtgtgatcagaaggtggaattctagtgataggcgacctcagacccgcattcatgttctgtgtgcctcttctattgcacatacactgatttttagcattgtctattcctatttttcctttgcccattgtacttccatatatcttttcattaacttacttgctgcc

SEQ ID NO: 88967 - DNA, 471 bp, Homo Sapiens
ggggaccccccctggcctgcaggtcccaaaggagaaagaggtgaaaaaggagctatgggagagcctggaccaaagagggccctatgggctgcctgggaaagatggagagcctggtcttgatggcttccctggtccacggggtgagaagggtgatctaggagaaaagggagaaaaggtgacctctccatcccagcatgtaccttgtttgattcttctcctgctgtctgctttgctgttcagcttgtgtgattccatttgacacttaatctttctccatcctgtgctccaaaaacatactgatgcctgatttaaggaatcaggtcttcagagaggaatgaagaaggctgtactgccagatataagggcactgcctggcatagaagaaaaaattattatcaccagatattctagctacagtttttcaaccacctgacaccaatttatggaaaaataaaggatttttgaaaaaaa

SEQ ID NO: 88968 - DNA, 496 bp, Homo Sapiens
agatgctccaacctaaatactgagagtcttaaaagccaggcggaaggctggagggtgctgggaaagttcaggctgtccccagaagtcaacttatacgaccttcatgctggactacacatgtcatctcccggagcagcaggcggtggctgggacggcagcacagagaaagcccggcacaggctccgctcagagcctcaggatgtggggaggcttctacagatgaccagcttggtggcgtcatcatccccacctggaggaaggagaccttatctggaaccaggaggcatgtctgtaagaaactcttatgaagttgtcggggttcaagttggccttcctgttgttcaacctggtggagaatgttcctgtgggccttggcagcaagtcagcattcttcgttggcatggagtcctaggaaaaagaggctctccaccctgaagccagtcgcatatcaccccaataaacagttacaacgcctctgccaacacaggatcccaaa

SEQ ID NO: 88969 - DNA, 1004 bp, Homo Sapiens
gaacagactaatacacagggttaaactacggagaattggcttgcattatagactggctgtctatcacattgagcatcctcagagggaaagatgtgtagacaatgctatgcaaacttctaagtttttcttagaaacatttctaatggaactatttcatactggaatcacagattaatcagtgaattttttgtgtgtgaaaaggaacctcagagactaccttgaacccactgtcatgcttctgaatacttcagtgtagaaatacaaagcgtgcttccgttttggtcactcataccatgcaagtaaatgaatagctgaatacctttgattttaaatgtaaatatgacctttagaaataacagctggtttaaaaatgagccaaagtgtaagtaaaatgggcaacggatatacttcagttcccaaagaacatttataaggaaaagttgtgtttcctttgcagctttccgtcttagagaaaagacttcatcatcttatatgtgatgtggctttctgggctcctgacatctttatagagtttgactggaatttccttctcttgaaaatgaatgggcattttcttgctctccacactcataagcttcactcccaggaggcccaagtttacataatccttgaaatccttctcatcctcatatagtaagtacttcatatcagtgtccccaaactctgtgcctgagttttcctctttatctatcttcacatactggagatcttcgatgctattttcatgactaagatgtaagatagtgctctcatctgatgaggacatcaagtctctactttctacttctgtgggttgcaattctgacttctctatatgtgtttctggcaattccaaagacatttcttcaggtggcacttctagtccagcagcttgggtaagatatagtcgcctgggtatcttgagatccacaagtctacagttggatagttgatcaataagcaccaaattttctgcttccagttcattagcattttttaattct

SEQ ID NO: 88970 - DNA, 705 bp, Homo Sapiens
agcagagcaggctcttccaaccagcccacagccccctcaaagactttttttgtttgtttgagcagccagctaaatgtgaacgtggggtgagggatcactgccaaaatggtacagcttctggagcaaaactttccaagggatccagggacacttttttttaaagctcataaactgccaagagctccatatattgggtgtgagttcaggttgcctctcacaatgaaggaagttggtctttgtctgcaggtgggctgctgagggtctgggatctgttttctggaagtgtgcaggtataaacacaccctctgtgcttgtgacaaactggcaggtaccgtgctcattgctaaccactgtctgtccctgaactcccagaaccactacatctggctttgggcaggtctgagataaaacgatctaaaggtaggcagaccctggacccagcctcagatccaggcaggagcacgaggtctggccaaggtggacggggttgtcgagatctcaggagccccttgctgttttttggagggtgaaagaagaaaccttaaacatagtcagctctgatcacatcccctgtctactcatccagaccccatgcctgtaggcttatcagggagttacagttacaattgttacagtactgttcccaactcagctgccacgggtgagagagcaggaggtatgaattaaaagtctacagcacaaaaa

SEQ ID NO: 88971 - DNA, 457 bp, Homo Sapiens
cgatggagtaggagacttggccattcagccctaggtccaggtcagaggcgctgacttgtgggatggaggctccgggaaggttgttttcggccacgtggaccacgtaggagacttggtggaaaaccggagcattgtcgttgacttcaccaatgcgtagggtgaggcttgtgctggatgagagcggaggcttgcccttgtcagtggcagtgatggtgacgttgtactccgggatccgctcccaatccagggtcccatctgttacaagcttatagtcattattggcggaagattcgattctaaaaggaactctttcgtttatgaggcatgtaacctccccattttctctcgaatctttatcatgtgttttgaacagagtgatcaccgtccagggttctgcgtcctcagttacagaactggacactgaagtaaaaaccacgtctggggcattgtcattctc

SEQ ID NO: 88972 - DNA, 489 bp, Homo Sapiens
ctcctctttgctccaaccttcttgtagcagggtttgagggagaaggctgcaaggagtcctgtgggaggccctggggtcttattagttgaaggaaacaaatcatcatacctttaatactggctccaatttgcccctttcatgagtagtcttggagagataattgctaatctggaatggacatacttcttgatcttggttggcatttttcaaactgtgatgaagacactttttatagccctgttcagaatacagaaggagacctactcttctttgatcacaatctaaagacagacagaggacatgtggaaagatctgtcatggattaaatataaacaaaaatgaagcaagaaacaaaactagtctttcaatgaaaagctgaagatgctgaagaagaaatgcaaaatcatttcacaagaaaaacaaaatcagaccaggatcacttggcgtaccatcctagcaaaatatatcttcttggagttgccctgaaaa

SEQ ID NO: 88973 - DNA, 520 bp, Homo Sapiens
ggagaagcgaaggaggagccacctgcgcgccgagcccgttcgcccggccgcccgcagccaggcgcggtggccaactccgccccgggccgcgggcgcagccgacgggaacacgccccctcaacttttttatttttaaacaatctcaaaccctcagaaaaattgcaaatttgaagcctctttcctgaaatctgcaaatttagagagagacattacacaatgaggaatggcatcctgatcttaccctgtttgaaaggaaaccaatggatagattgaatacttcttttcccactaacatttatcattgataaccattcccttcttctcaaaagttgttccctggctcccaaaatatccattctctcctcactctttgcttactacttgggctccttcatggttatcttccaccaactccttaaatgtggcagtttctaatgtcacagatgcttcctttctccctaaggggagaagttaatccccagccggtctattcaataaaatccttaattattaaaaaaaa

SEQ ID NO: 88974 - DNA, 615 bp, Homo Sapiens
ctaattatttgtggatttttattcccctttgagaaaaagataactgtttccagtaaggcttctagaaaattccatggaaatctatatcgtgttgaagggataattccagaatcaccagctaaactatctgatttcctctaccaaactggagacagaattacatgggataaatcattgcaagtgtataatatggtacacaggattgattcggacacattcatatgtcataccattacacaaagttttgccgtgggctccatttcccctcgagactttatcgacttagtgtacatcaagcgctacgaaggaaatatgaacattatcagttaaacccagcatattccaaactagtgatgtttgtccagacagaaatgagaggaaaattgtccccatcaataattgaaaaaaccatgccttccaacttagtaaacttcatcctcaatgcaaaagatggaataaaggcacacagaactccatcaagacgtggatttcatcataatagtcattcatgataccaaaagaagaaatgaggccgttctgctataaaatcatgtgtagtagttattgctgtttccttctaagtccacgcacataaataatactgttaaacataat

SEQ ID NO: 88975 - DNA, 471 bp, Homo Sapiens
aaatggagccaggcttccaacttccgctgccttcggacatagggacccagttcccaggagcggggaggtagggttggggctggggcatttggattgtaattgggagctctgccgtacgccagggcggttccaaactctaaaccgttcccaccgtcagggagacctacagtttcgggggaccaccctgggctggccttgtatataggaaatgctgctgaactgaatagaaaggaacttgggagatttgaaacagtgctcgggttttcgctaggaccggtttgggctttgtacaggttatttaatagctttgttaaagataattataataattataacattaataaaaatgttgcttttgtcttcagctccatgcagagctacagcatgatatgtctctgtaaagtgatcagcagttgcagcgtgaaaataaatactttaactcaggggtcactacaggaagaccccgttgaa

SEQ ID NO: 88976 - DNA, 703 bp, Homo Sapiens
cttctcctaggagccctccttatggacctggagaccccagaggagatgcaggctcggagcctgggcaggcccatcaaatcctcaaagcagtacctgcggcaggtcattgcagagtacgaggcactggaccgagaactcccgtgcatccggaagttccccacaccaccagctgcccagcccctctgcctctgcatggagaccttgcccgaggaggattttacccacctggaggtgctgcaagccctggaggcccagttaccaggggccatggagagcgggcgcgtgagcagcatccgctttgagaacatgaacgtcatctgtgggactgctgggcgccggaaccggtggctcatcgcggtcacggacttccagacgcgctcgcgcttgctgcgctccgggctcagtccccgcgggcttgcgcaccagatcgtgcgccacgacgacctcctgctgggcgactaccgcctgcacctgcgccgctccctggtccggcggcgcatgctagaggccctgggggcggagccgaacgaggaggcctgacgcccgggcgggccccggcagcgcttgcgcaccgccccgcgggctggggccacccacccggagccccggaggacagggggcgttgccttcccaggaaggaggcggggccggctcgagggggtggatactgccagtttaattataaagaatgacctggtacaaa

SEQ ID NO: 88977 - DNA, 425 bp, Homo Sapiens
caagaagaatttcgagaactttttttatatgctgtggagctggagaaggaattacactacatcaatttgaagctaaatcaagtggtgagaaaggtttcagctctatagtattgagacaagtggagtggcaccacaaccaagtacaaaatgagattctctgagtgcctgacaaaacgaatttaagtaccagccaagtacacacgatgatagcttcaaggaatacaactgactttatgatatgaattttcaaggaacgtatcttatatggattttgaagaatcttgtttgcttataagaacttcaagaagcctaagcttggctttaattttcttgtactctctgtactcctcaagcactggaacacgatcctctttctgggcattcctaggggagaaaataaaatttgtaatgttctagagaaaaaa

SEQ ID NO: 88978 - DNA, 258 bp, Homo Sapiens
gcgaccttacaaagaatgtagcaccgacctcagtatctgagacgctgagtcacattccaacctttaccgtgtcaaaggttctaaaaggaaagtcacaaacctgaaattatttagtttcttacctaatgaagcatctgacacctgatgatcctatgaataacaacaaacattttatgcatttgaaatcttataagaaaaaatatatatgaaaagtattgtgcctgatgtatcatattaaagaaagtatttttaaatgcc

SEQ ID NO: 88979 - DNA, 1382 bp, Homo Sapiens
gtggaccggtccggaattcctgggatggcgcgcgggaggcgcgcagagctttcgggctgcaggcgctcgctgcgcctggggaattgggctgtgggcgaggcggtccgggctggcctttatcgctcgctgggcccatcgtttgaaactttatcagcgagtctcgccactcgtcgcagacgcgagcggggggcgggggcgcggcgaggcgccggcggccgtgacgaggcgctcccggagctgagcgcttctgctctgggcacgcatggcgcccgcacacggagtctgacctgatgcagacgcaagggggttaatatgaacgcccctctcggtggaatctggctctggctccctctgctcttgacctggctcacccccgaggtcaactcttcatggtggtacatgagagctacaggtggctcctccagggtgatgtgcgataatgtgccaggcctggtgagcagccagcggcagctgtgtcaccgacatccagatgtgatgcgtgccattagccaggcgtggccgagtggacagcagaatgccagcaccagttccgccagcaccgctggaattgcaacaccctggacagggatcacagcctttttggcagggtcctactccgaagtagtcgggaatctgcctttgtttatgccatctcctcagctggagttgtatttgccatcaccagggcctgtagccaaggcagaagtaaaatcctgttcctgtgatccaaagaagatgggaagcgccaaggacagcaaaggcatttttgattggggtggctgcagtgataacattgactatgggatcaaatttgcccgcgcattcgtggatgccaaaggaacaggaacaggaaaggatgccagagccctgatgaatcttcacaacaacagagctggcaggaaggctgtaaagcggttcttgaaacaagagtgcaagtgccacggggtgagcggctcatgtactctcaggacatgctggctggccatggccgacttcaggaaaacgggcgattatctctggaggaagtacaatggggccatccaggtggtccatgaaccaggatgccacacggttcactgtggataacgagaggtttaagaagccaacgaaaaatgacctcgtgtattttgagaattctccagactactgtatcagggaccgagaggcaggctccctgggtacagcaggccgtgtgtgcaacctgacttcccggggcatggacagctgtgaagtcatgtgctgtgggagaggctacgacacctcccatgtcacccggatgaccaagtgtgggtgtaagttccactggtgctgcgccgtgcgctgtcaggactgcctggaagctctggatgtgcacacatgcaaggcccccaagaacgctgact

SEQ ID NO: 88980 - DNA, 598 bp, Homo Sapiens
  misc_feature (542)..(557): n is a, c, g, or t
gtggtttgctgcacctattaacccatcctgttttgcctggcattctgcagaagcattgctgtatcttaccagacaggaatacagagtcgcagtgcacgctctgcggggagccggaaggcagaacatgacggagatgcgcaggaatggcaaagtacgaggggaaaacagacagtgggatatggtgaaaccgtgacggttcgtgaatgagactttgatccaatgacattaaagcagatgagccacccaaaactaatatacagtgtctactgcagaagacgtgtgctcttcaccagtctgtggaccaggaaacgagccgctggggatctcagtcgcaagggtgctcaggtggccttggtgcagacactcacagctctcagactgcggagtgtgccggtcctcggagaaggggtgtccttcagggcagtgcttctctggctgatgccacagactggctagtggatggccagactcatcacactgacacccctgttcacctaaaccagatacaaccccttcctgatgcatctgttggtgccaaatcnnnnnnnnnnnnnnnngtagctttttattattaaaacagtcactgcaattatcaaaa

SEQ ID NO: 88981 - DNA, 824 bp, Homo Sapiens
tgaatgttgatgtgagtagtacgatatataacaatgaggtgctccatcaaccactttctgaagctcaaaggaaatccaaaagcctaaaaattaatctcaattatgcaggagatgctctaagagaaaatacattggtttcagaacatgcacaaagagaccaacgtgaaacacagtgtcaaatgaaggaagctgaacacatgtatcaaaacgaacaagataatgtgaacaaacacactgaacagcaggagtctctagatcagaaattatttcaactacaaagcaaaaatatgtggcttcaacagcaattagttcatgcacataagaaagctgacaacaaaagcaagataacaattgatattcattttcttgagaggaaaatgcaacatcatctcctaaaagagaaaaatgaggagatatttaattacaataaccatttaaaaaaccgtatatatcaatatgaaaaagagaaagcagaaacagaaaactcatgagagacaagcagtaagaaacttcttttggagaaacaacagaccagatctttactcacaactcatgctaggaggccagtcctagcatcaccttatgttgaaaatcttaccaatagtctgtgtcaacagaatacttattttagaagaaaaattcatgatttcttcctgaagcctacagacataaaataacagtgtgaagaattacttgttcacgaattgcataaagctgcacaggattcccatctaccctgatgatgcagcagacatcattcaatccaaccagaatctcgctctgcactccagcctaggtgacagagtgagactccacctcggaaa

SEQ ID NO: 88982 - DNA, 715 bp, Homo Sapiens
cacccaggagcaccccgattccatgaggggatgaagtcttggagctgttgtggcatccagaccctggattttggggcattcttggcacaaccagggtgcagagtcggtagacatgactgggggaagcagctcccagcatcttgccgccatgattggcaccagacagattccttagtagtggtgactgtatatggccagattccacttcctgcgtttaactgggtgaaggccagtcaaactgagcttcatgtccacattgtctttgatggtaaccgtgtgttccaagcacagatgaagctctggggggtcataaacgtggagcagagctctgtcttcttgatgccatctcgggttgaaatctccctggtcaaggctgacccaggatcctgggcccagctggagcaccctgatgcactagctaagaaggctagggcaggggttgtgttagagatggatgaggaagaatctgacgattcagatgatgatctgagctggacagaggaggaggaagaggaggaagcaatgggggaatagtgacaccagacagttgatgtctagataggacctcaatgattcccttagaatcttagataccaggatattgttggccatgtggcatcattgagcagcaggaggctgaaggaggggagaacaaaattgtccaaaccatgctgtttttttcccttaaataaatcttgtattcttcagtttcaaa

SEQ ID NO: 88983 - DNA, 588 bp, Homo Sapiens
ccgattgagtccatgggctgccagatcaacgcacaggggaactcgaagtcttcctacagtagaagttaccgagaaggtcaacactataacaagtactttacaggataccagtcggaacctgcgacaagtggaccagatgcttggacgataccgagaatacagtaatggacaggcgggtgcgatagaacatttaaaagaaagcttggaacaatcaatcgaccaactccggagtcaacgtttattgagaaactcaggagggagaagtatttctgttacaagtttgagtgcaagtgaccttgatggtggcactgggtcagagctccatcattttccacctacctcacctctcaaggactatggggatccacagggtattaaacgaatgagatcaagaactggtgtccggtttgttcaagagactgatgatatgactcagcttcatggttttcatcagtctcttcgagacctcagcagtgaacaaattcgccttggagatgatttcaacagggagctttccagaaggagccggtcagatgccgaaacaaaaagggctttggaagaattgactgaaaaacttaatgaagccca

SEQ ID NO: 88984 - DNA, 615 bp, Homo Sapiens
ggggtctgagacatttaataagtaggtaccactccacccactgtcctctggggcagccggcagaagatcccctgccctgggtggcagggccctgatctgaggctggtttcacggaggacaggcagcgggcaccccactggtggggtcgtctctcggggcactgacttctcagcactggagctgtgtgccggcctcacctcctcacttcgtccaggacgtggaactggtctgcagcctcgcagaagccgtacttggggaagtagaagatctggtcctcagtcaagtgggcctcctggacccgctgctcaaacccactcaagaccgagtcgctcacagggagcgagcgggcgtagagcttcactgacagctgccccgcccgctccaggtacaggacagcgaaactctggtagtcggtctcagcgacaaccacgtgcacagcccctcgggcgtctcgggagctttcggaaggtactgacagccatggctgtgccctggggagccacatgcagtgtggtggcctcggcccggtggccctgctcctgcaggaaacggcaagcggagcccacagccacaaggagccaggtccctgcaaactgctgagcatcaaaattggcg

SEQ ID NO: 88985 - DNA, 460 bp, Homo Sapiens
gaacacagcaagcaaacacatgcacccaagtagtgcctagggaactcgaggctctccaagtgaaaaaggagagagggtcagaagagatgcccagcagactgccacatggtagacaagagttccctttctggtaaagtggccattactgtcaagttttctcaagcaagaaattcaggaatcttgccaggggcaaagctatccagatccaaaaattgggtgcaacctagttttgtgctcccggaagacatccagatggcaaggaaggcgtgtaaccaagcccctgaaataatcgattctatgaatagttgaaacatatcttctatgggaggacatgtttggaaaaaatatgagactcatcgatgctgaccactatttttaggctgctgggtcaaggtttctgatacatcatcctataaagtacactgcaagtgggccccaagaaagaataaatcccccaggc

SEQ ID NO: 88986 - DNA, 794 bp, Homo Sapiens
cccacctccagtcgtcctgccggacctccacctggagctgtcacccccggagtcgccacacagacgtcctgccatggaaccttcccctcccggtgcaccctggggaccgagcccttgacaccacgccctttgctttatcttgctcttgaaattttggccccaactccagggactggggatttgtgcctggcagctgcctgcatttcaggaaaagaggaggctcagaccatccagcccccgcccatatcctgaggtggatcaggcaggctctctccccggggacatgaggcacccatacctaggaccccctgcgccttttttagcttcagtcatggcagcacctgagggacacaaggacttgggtgcatcaggacgccttggagaagcgtggcttcctgccaccctgcaacccaccctcccagccaaggaggctgctgtggtggggatccccaggggggctttgacacagtcctctgctgtccctccactgggctaattctacacccctgtgcccctcctaggggcccatgagtcagagaggcttgccccaagtcacagccactcagatgttcgacgccccctaaggtccattccagcacccacctgagttccgaggagcacctgggaagctctgggtgcaggatagcagtccagagtccatggccccgcctaggccatctgggtgctgggcatggatttctcagcaaggaagactcattaccttccctccctgggcctccattcttttgggaaacacaaagcaataataaaaggaagtgttagacaatgtaaaa

SEQ ID NO: 88987 - DNA, 552 bp, Homo Sapiens
gctccctcccagtgccacagatgcccacagtgcacagatgcccgccgggcactgctgaagctgggagtaggcgaggtcaacgacgtacaggagcaggttgacgtaggtgaagatggccaccaccagctggctgtcccagggacagctgccccgagcacagttggggggccgtttgggctcaccgtacttgggatcgaaacagaagactggccagatcacggcggcgctgaggtacaggagcacagccaggaaggtgtacaccaccaccagccggtcaaaggggcagcccaggccccctgtgtggcccatcacactcagggccaccacggccactgtggccaggaagcacaggctgtagacggccacgcaccactgggtggccacgtagcgcccgtagcggctgtcatggaccagcgccccgaagatgatgcaggccacgaaggcctggacgatcttgaggagccccgacaccgtggccatatagctgctcacctggccgggccggcccgcgttaagggcacaaggctcaaggctgggcccttctgccgaaaa

SEQ ID NO: 88988 - DNA, 966 bp, Homo Sapiens
gcagagttaaccagcccatagcatctttcacctttccctgagcctcctctccagtcccaggggcatctttggaatactgcagaaactgtgccacataggtcatgatggacttttcatcaggatcaacaacatccacatcttctggttccagcaatctggggatttttaattcttgttctgcaattctgaaggcctctctcagattgtccttgttggatctatgcttcacactcttcatgtcaattaggtctggtcgcaaggcatgaatgaatggccaaaaaagccatcccatttctccaactggacttaaaatcggtaacattgacagactcataggtggcgcattgttcctgagcccacaaaagaagggcctttcttgcagacatttgccatcttgcttgcactttagagcatttcttagctggaggacttgaggcaggagatgagtcaaccacactcacatcatccagggaaggctgattgtaattgcaagaaagagtctgggcaagcttctcaatatgaaagtgcaggataattgtccaaattaggccaaggataatggatgggtttccatcaatgatatcagtaacatgaatatttattagcttaattgatcggtttcttaggaatgtcaaggcatgttctatattgattctacactggaaggtattagatcctttatcccgaggcaactgttgcccagaaagtacttctagcagatccaggaggacatgcccctttttaatgtctgtgaataggtcggatataactgagggagaagtgtgcctggccaactgtgagtttatccagcacgtgaaggctttcttctgggtgtcttcctgttcagcttgcaatgaaatatggagatcgtcgatgccccaggaaccctgttcatcttcggtgggaagctcaggactagatgccattctttgactcaatggagattatatcatgtccatctcagtt

SEQ ID NO: 88989 - DNA, 678 bp, Homo Sapiens
cgacgaaaggaaaaggaaaatggaaaaagactatccaaagaatactgaagaagaattttcaggagtaaatggccaaatcgatgctgctgtagaattaaatggctacatttacttcttttcaggaccaaaaacatacaagtatgacacagagaagcaagatgtggttagtgtggtgaaatctagttcctggattggttgctaaatagaaaagcctagtcttctcaagcaatgaggatgactacaagcagcctctaactggatcttaaggactaaagcagaatgtaggagagggattcttccaaaggccttcaaatcaaattagaattcactgagaataataatacttccaatttttttcatagttgtataatcagaatttcaatccacattagaaaagtttttatatgggcaactttatgcgaaatccaaatcaacacaatgcactctgcagttagacaccattattttttcttacctaatatactgaagcagattgatccgtttgatttttatttccaggaggaagactagtggtggattccatgacatatattgtaattcttttcataggaaatgtcattacagtatgaattataattatttacaagcaatggcttttgtggccatcatttggccatcatttgttataataaatataaatttcccaatttttactta

SEQ ID NO: 88990 - DNA, 895 bp, Homo Sapiens
ggggtgcaaggccggtgcctgttggatgtgggtgtggggaacaggcgctgtgggagcctgcggctggttaggggcctgggaggccgtgggggagccctgtgggggaactgcagtggcagagggcgtgggccctggcgtgggcagctgaggggtccctggaggagctgaggagggagctggggtgaccccagtgggagcctgcaaggctgggggctgggcctgcagcatctgctgctgggctgacgagtccgagtcactctcattgtcctgggggctggggatgctcggggacgtgctgcgattgtcctggtcgatgtctttggggtcactgctaccctcatcgttgacgctgcgactgtctgaactctctccctcaccttcagatggcgagttgggcctgctgatctcctgcgtttttgtcttcttggagctggtcctgtcagcctcctccgtatcagaggccaccttctcccgctggcgtttgttactcttaagaggggaagaggcttcctccttcaccttcttggccgacttcttcactgtctctgctttactgtcattgctggaggtactggcagcgctgggggagttccggccgctggagcggatgtcttcattgatgggtgaggtgcgaccatcagggctggctggctggcttcttccgaccactgcgtagtgtcgacatcgaacccgactccgcgtgtctcatgctatgcttccatgagcccatcatcctcttccttgacgggtttgaacataaacggtggcgggtcacgggcttctcatgggcgggagctcaccgtattctgaagtggtgcgacagtcggtgcaaacacgatgtctcccggctcgggtgccatctttggacttgctgcaacgggggcgtacccttacg

SEQ ID NO: 88991 - DNA, 546 bp, Homo Sapiens
ttattgcctacgatatgccaagcaccttgaggtgattcacacagacacttacatcgaatgactgccatctctctgtggattgtctctaggtctacctcgctcccatctcacataggaggaaactggcatcccccttcttcctttgaccccataaataaacaatgcacagtgcctggtataggacatgcttggtgtaacagggaaaatcattcacccaggcaagcattgatgttcagagcacttagtggtggaatacgttatcaccagctcaagcatgcgatgttcagccactccggcccacgaaatgtaagcacgggacgaacgggtggttttcccacgcctcccttgccagctccaagggctgaggctctccagagctgggctgtgagtgcctctccttctctctggggagagctcacagcatggctgtctctacagagcacgaggataatgggcagatgaaggtcaaagctacaggccctaaccaaccactattgagcacttgtcgtgtgcccagacctataaagcgttttcatgagcaaaaaa

SEQ ID NO: 88992 - DNA, 1249 bp, Homo Sapiens
  misc_feature (875)..(875): n is a, c, g, or t
attttataacataggtgatcagaggggccatggagaagatcactgccagtttgtggattcatttttagatggacgcactgggcagcaactcacttctgaccagttaccgatcaaagaaggttatttcagagcagttcgccaggaacctgtccaatttggagaaataggtggtcacacccaaatcaattatgttcagtggtatgaatgtgggactacaattcctggaaaatggtagatgctgcacaaagttaccttctgtttcatcattgcaaacaaaaatcattgaaaatactatgccgcattcatttaaagctattttgtttactatgtataaaagtctacaatctaattaatagcaatactagatgtttattattagaaaagattgctgagagtatttatcaggttttacaaagtcattttaagaaagcaagatactgatgttaacagaataacatttttggggaagctggctccctattcatggtattttaagagatcatttgtatattattttatcacactggtgtaatgatgtttagagatacttttataacaaaattaacatcaaaaaggtatatactttttaaaaaaaatttacttttatggatgtgtactcttcctattgatgagttaattccataaatctctacttagtttaacttattggatcaaattatcttcagcatgtatatctggggaaaaaaggtccgaattttcacatttatatttaaacttcaattgtttatattttaaacttcaattttttagcaacagctgaatagctttgcggaggagttcaatagttaccacattcatgctaatatacatgtcctttaaacatccacaaattcttaaaaagatggaatcagtanaattcattttcagctaaaaagtggagtctaatatatggttcaaaagatacatgtttaacccacaataaatgttacaatatcgtgaaataatggttgtaaaggtatgccttaatgcaatcgtcttcaatatggtaaatgaattaatcaagctggtatgtagcagaactggactggtgaacgcccggaccatgacgcacaccacaggcataaggcccgcacgcagcatggcgtaccaatgtacaaggacatcacaaagacattgaaaaaggaagaaccccaagagcggacgcacacgcgacggcctggaacggcacagcgcgggcacacatcaacacacgcagctcactaaacgggctgcccaagcgcggcacgga

SEQ ID NO: 88993 - DNA, 518 bp, Homo Sapiens
tttccgaacacatcagaactggggtgttggtgttttacagcaaagggtgtctgcctaacaattactttccctagacatgcataaatatttaagttgacaactattcctgatttacagtgcaactttatagcagataatactatcactggttatgaataacatcatggtatgctgctacaaactgacaagactaatgtgaccactaaatcaaaaccttcaaattacaaagaaaatagttcctagtcacgagggctgcattgaaaagtgagagctgagatcagagcattaacaaggctgattgatctatatatgatgagatgattacttatatgaagattattgcgagaggagatgacaaggcttatagataaaagccatttctctgatccatggacacttttttggtttaagagcctcttgtaaagttactcaagatacctctgcatcacagtaaatttggcagccacaatattggcaaacaaagaagagatcagtgagacagccatctgtgaattcat

SEQ ID NO: 88994 - DNA, 535 bp, Homo Sapiens
ttttttttgcttttcttactatacagggatagccaaacattaggttttaatatgtcaatttaatgaagggcaatgaacaaaatcacaggtgtctttaaaattctatgctattagttctcacttcttttgtttcacccatgtgcttcactataagctcttctacatctgtggtagcagtcctcagcctgtcttcactgtgctggctggaataagcaccaaacagagttgttcttctgtagtagcaaggggattgatttcttctttttcaagatggtgaagtatgtcttctaactgaacttttccctcgctgaggatgttctaagcccgctctaataataagcggcagcctaatactaaatgcttgtggcagctgggtccggggaaaacgggcgaattctccttcaggcggaatcactccagccagggaatagaaaggccgggccaggaggggttcccctcctgtagtttcggaccatactggggagaagcagaaaaggcccgtaatgcggaaaagaggggagaatgggtgctttcc

SEQ ID NO: 88995 - DNA, 562 bp, Homo Sapiens
  misc_feature (236)..(252): n is a, c, g, or t
gacttctttattcctgctttcagttttcctcacatagcagctttgtatgtgtattgccagctatattttgttctttagaaatatcttggattttccaagatatatatacatacacatacataagtgtgatgaaggttcaggtagcttactagctttctattgctagtaccctaaagactagtactctaataaggagactaaggtggcacccacatagatatcttgcatcctcagtnnnnnnnnnnnnnnnnntcatatacatatgcttatttcttctatcaagggaaaagttcagttagaagacatacttcaccatcttgaaaaagaagaaatcaatccccttgctactacagaagaacaactctgtttggtgcttattccagccagcacagtgaagacaggctgaggactgctaccacagatgtagaagagcttatagtgaagcacatgggtgaaacaaaagaagtgagaactaatagcatagaattttaaagacacctgtgattttgttcattgcccttcattaaattgacatattaaaaactaatgtttggctatcaaa

SEQ ID NO: 88996 - DNA, 534 bp, Homo Sapiens
ccgtgctgagactgctgaaactgataagaaggcttcctcggaacctggtgagaaaaatccatcaattctcccttttgtaataaaagtgtgttacatttgatagcatgtattttggggggtggatataaatgatggaaattgtcttttaaacatcatataaccattcagtgtgctgagacgtggcacagacatctccatgtgcaaatgtactttgcagctcatatgaccccctttataacacgaatcactgtcaagggaatgcctgactgtacaaaaactgcccacaattgagcatctatcactgaagatctctcagtagggctcctctctaggttatgccagatcactggtggtaatgtagaggaccacagaggtgtgggcagagcttatgtcccaaaatacaggaaacgatggggctggggagctggtgatgaaggacatatcgtctgtctgttgtgaatggatgaacttcagccctatcccttaatagcaaaatttcctaacaaaagcaaaattatctgtgttgcacaaaaa

SEQ ID NO: 88997 - DNA, 440 bp, Homo Sapiens
ttaaataatgatatctgccatttatataatggagcatgggttacttttgacctccactaataactcattcaaatatggcttctccacatagagctaatttaataattatcagggtagctctgttgctggtgtcttgcctgggttttctctgaggaagtcctgaaatcacctggtgcggccccaggtcagtgagcatccacaggtgggaagcccaggtagctgatttgcacagcacatcccaggtttgtgcatcagaggaagtcctcactttcttgctggtcttgctccttgcttgaaaacagatgtgaaaatatgtagagatgcattccatggaggttctgatttggaccttccgtccccatcccgggtctgatgttactggtttttaatgcagttttatgcaggatacttgtcaagttgaaaaaaacaattcgtttgtt

SEQ ID NO: 88998 - DNA, 364 bp, Homo Sapiens
gagatgggaagaacttgggtcctccttgctccacccaccctgcatggtgagaatggtggagcaggaaaggcaaaggggacctgatggagtgtctctcctgccagggctccctccttccggctgccacccgatcccagcttgccctgcatcctggtgggtccaggcactggcattgcccccttccggggattctggcaggagcggcaaaggcaagggctgggccctgagcttctggcttcctggtgcctggtacatagtaggtgttgactggattgaggacaaaggaaaatagaattttcaaagggattagggctaagactcaaagaagaactgcccaaggtggattcttgactgtgccagagct

SEQ ID NO: 88999 - DNA, 879 bp, Homo Sapiens
tcatctctaagagagtgtagaatgctttcacagagacctagcacagccctgatttacagagggaaggcaagcgcgggtgaggtggtggcccctggtggagctgcgctagaatgcgcggcttcggactcagaattccatgccctttgcattgtgtgacatcgcagtccccttccccgctcccacttcatattctcccatacttataactctcctcccagtcacagccctcttcttttgattgacagaccaccctgggcaccccatgctcaatatgaacaccttgtagcatccttaggtcttggacagacctcggtcagctctggcacagtcaagaatccaccttgggcagttcttctttgagtcttagccctaatccctttgaaaattctattttcctttgtcctcaatccagtcaacacctactatgtaccaggcaccaggaagccagaagctcagggcccagcccttgcctttggtacctgccctccccttggtctcatgagcgtcttttcagctttgtggactttgtttcctgccctctctttcctatttcctgccttccagccccacccctctgtccctagattgtgtgactcccttcaggcagtcctttagtccccagcctcacctttgctctcaatgtcatgcagccgctcctgccagaatccccggaagggggcaatgccagtgcctggacccaccaggatgcagggcaagctgggatcgggtggcagccggaaggagggagccctggcaggagagacactccatcaggtcccctttgcctttcctgctccaccattctcaccatgcagggtgggtggagcaaggaggacccaagttcttcccatctcccaccaaaattaaaacaaaaacaaa

SEQ ID NO: 89000 - DNA, 459 bp, Homo Sapiens
gcggcagttgctggcctagactcacttcttcaggagggaggttcgccctggaaaagctgatttgcatttctgctgggatcgatgccgtggagactgaatacattgaggtctccaggtgaaagaagaaagcttaacctggcttctgaattccaagagcacacggcaaagtgggtctaaatcaacgtctggttatgaagggcctagagccagataggagcttcttacagcttttggcagtttctggtggaggccagctctccttgtcatctaccttggcctgagaagcctgttcccctctgcagaggatgagctcagggctacacctttccttccaggctctcatggtgtggtccaggctccatttctttctctttgaacctcacttcaacatgattagagtgactgaaggtaaagaaataggaactgttttaccgtaaataaattagtccctgctacaaa

SEQ ID NO: 89001 - DNA, 566 bp, Homo Sapiens
agagagatactgcaaatgaagcagagacccattctgttttgcttactgctgttgaatccagatatgacttcgttgtccctgcatcaatagctacaaacctagtggaagaatcatctacagaagaagatttgtctgaaactgataatacagagactgtacctaagatcactgagccattttctggaactacctctgtattagataccccagactataaggaagacacctccacaactgaaacggatatctttgaactactgaaagaagaacccgatgagttcatgatttaaaagcaacaaaagggataccatgtagaattgtgcaatagtctagccagctagccttaacatctaagaaatttttccaacaagcaaaaacctttagaaatgaaagaatgtgggcatttaaggtcttaaacactgaatatcacactcttcttatgactcttgttagcgattcaaggacataaatcttcattcttttctggcacagactacttaaatgggtctgttttcactttgctcatttttcttcaataaatctttttggcaagcaactgaaaaaaa

SEQ ID NO: 89002 - DNA, 577 bp, Homo Sapiens
ccttggtatccaacttaatcccagaattttgttccaccatggttagttatttgccatatgaatgtattcttgtttctaccaatattctaggcatgagaataccttaatactgagttggagattttgtatctgtttctcctcctttacgcccattttcctacccacagcagcaaatgacaacgtgtctgtccaggtctgtccccctgctcatcccaggatgccactcacatttttttcttcttgttaccttgaccacgctgtacagtaacatccaagagcccattctacagtgggtggttttggtctttttataactttttctcaaagtcactgatgtttgttcctgttaaatgtatagcattgtaatgagagcccatcaaatcctgagtgtcagtttgttgtccctattgtagatgaaatagtgatgtagcaaaaacctagtaaattctgaatgcttttccacgtagacttatctggaatgtgaacacaactctttggttaatagtaaatgcttaactgtagtcctgagtaggtgcatttctgtctgtctcaataaattttactttgtctgcaaaaa

SEQ ID NO: 89003 - DNA, 454 bp, Homo Sapiens
tctcaagaaaaagaaaaaaggaatgaattaataaataaaatgcatttagaagagacagaattgtcattacttgcaggtaatataattatctacatcaggggggcaacccttttctgtaaagggtccatagttaagtagtttaggctttttgagccatagtgtctctgtcacagctcattaacaatcacattctagcatgaaagcaccaaacagtacagaaacaaatgggtatggctatcttccaataagaataggcagcagaccagatttggtctgaggttcataatttgccagcccttagcctacatagaaagtcatgatgatcaactaataagataactcagctaaatagccagattcaagttgaacatacaaaatcagtagctttcctatgtatgccagcagcaacttattttaaactgtaattaggaagaaagatttatcttgcaagaca

SEQ ID NO: 89004 - DNA, 459 bp, Homo Sapiens
ggtaaacagcacagatgctgggagagggctggcatctgaccgtgaccatcacgcccatgtgacaaaggatgtcaccacagtgaacagttctgaccacagtggcttttcacctgcttcgttaaatttaactcacaccagctcagacgaaaattctgattcattctgactatctcagaatgaaaccagagcacctcagaagatcaaggcttccaaattctcctgggggaacagacgtcagccattcagcacaaaggaaacttccttctctgtatgtcagaggaagacataattgtgccatttccttcttgaagaagtttacaaacatttgcaagttgtcaaaaataattagtctaaaattgtttcataaaccgtggaatgaaacaggacgtgccttgttgagatcaaagggcttctgttaccttcttgtaaactcaaatgaaattcttttgaaagtaaaaa

SEQ ID NO: 89005 - DNA, 264 bp, Homo Sapiens
aacacgcctggtcgttacacatgactgcactttgtgtggctttgggcagcctcagctgaaacatggtgatagggacacttacgcgtcaggcgcggggactgcagggagagtgggaacattagctgcggcctccagtgcatgccagggacaacagcaggggctggcaaaaggctgatggtgggcgggtggggggtttgaacctgaaacttttgctacctgatctcgcttgaccccgagattggcttttataaacagtaaaccgtg

SEQ ID NO: 89006 - DNA, 418 bp, Homo Sapiens
aggtagtaatttttacacatttttatttttaataataggagtaaataccttcccacaacaatataatgaacattacaggaaaattaaggcaacttattatttacagaatgcctttctgtgcaaaacaggacactatactcttcctacacattaaagcattaaagattaaaataactctaaaaggtacttattatcagtgtctttactgaggcaattaccagtgttcagataaataaatgtcagagctaatccaaatatgaaacttgaaattttcccaccattctatacaaattcccacagcaaacagaggaggttattattttagataagtcagggaaagactttgcagaggaagtaacatttctgagatggagaaaactaggagaggaacaggttggagaacaggaatcaaaagctg

SEQ ID NO: 89007 - DNA, 520 bp, Homo Sapiens
tgatcttaaccgatggggtttactggaagcatctctttcaaaggttgcatccaagtcaccttccccaatggccatagctgttccctgacccatctcctctccctcatccccatcggggcaaaggcaggggacaggccagcacccgggtcttgaggaggagtagggctaggagcctgtcctccagggccccctccctcccgactgtctcagcccatggaaaatgctcttatatttatatctgggcgggcaggggctgggagggagaggatgggttggcagagagaggggcagaggaaaggcagggcacctgccaggggcctcggggtgtaaagaatggaggagccactccacttaacgcaggtctggcccaagtcagaggcagcgagggtggccagccccacccaggacacccccagccactgcccaccagccctgcccttcactgctggcctctcctccttgttctgcctgaccatccccaggttaacctggagcggtcatttaaaatctgggcttctgg

SEQ ID NO: 89008 - DNA, 593 bp, Homo Sapiens
  misc_feature (17)..(17): n is a, c, g, or t
  misc_feature (363)..(363): n is a, c, g, or t
tacggaaaccatccagnatgcttccatgtgttgcagaggggatgttagctgagatctagaaaatacctctgttctgggtgttttcataatccagcaccccactgggggctcaagtcacatatttctgcccaaatagtacagatgaaaagaccaaggcctaagaggaaaggagaaaactgccaaacggctaacagcaaagacagctgaatggttccagtctttcagtcctgctcctggccaacactggacctctcaaagtctagccaactcctcttccagcgccttgataaacaaccccctcatgctgggaaccacagcagtgggctgtttttctccctcatgcaccccaggaagcctctcctnctttgcctgggctttcttcccaaggccttagctgccaacccattttacacccatgcgaagcccagtcagtcacctgaagaaaaggagactcacagaaggcccaagatgaaagactctttaatcctgtggctttttgagttttgtttttagcaggaagaccttattttcaaaacaaattgttacacagaatttgccagtttacaaaacacaccaataaagacatttatggc

SEQ ID NO: 89009 - DNA, 560 bp, Homo Sapiens
  misc_feature (17)..(17): n is a, c, g, or t
aatatttaactcttganaatgttaaactctttggttgcagaatgattactccattataaaggatagatcttttttagagtagaaaataggaaatgataggaacaaagttggcatgtcaacataatgaacaaatttaacatctgcatattcctaaagtacttttctaaattacttgtttcttgagattagtcaacattaagaaaaaaattgttttacaacaataattttgccccattgttttttaaattagattgtgtatagttacctaaattgtggtttcattttactcaccagaccatattaagctgtggaaccattagaaattggtgacagacaacactgataagtgggcattggcagcactaatagttatttgttgctgactatgcaacaaaaaagctaaaagctataaaacataatgcctgaatttttcatttgttctatagtagctatctaaaaaaatccaagtttgcttatgtaatattatttggtgtggtcatttgcccaaaatgaaataagctgtaagtttgtataatataaaataatctacctaaatcgta

SEQ ID NO: 89010 - DNA, 1215 bp, Homo Sapiens
  misc_feature (76)..(110): n is a, c, g, or t
ctgtcgatcactatagggcgctactcgtcatagccgaacgacgagcgcagcgaagtattgagcgaggaagcggcgnnnnnnnnnnnnnnnnnnnnnnnnnnnnnnnnnnncagtcgacggtaccggacatatgcccgggaattcggccattacggccggggggggagtgagcgcctgtctctttaaatgccacgggctgcgctcccgcccgggagcccggagccggatctacaatcccgtccctccagctccggtgcttgtttgctcgccctggcccaagcggggagctgttgccgccaggctgcgaggctgccgtcctctcctcctcgcgccccacctcccccgagagctggctgaggaggggcagcagccccagctggcgggaggaagcgcggtgtgaacagggattgccccccgccttcaagtatcggggcgctacgcagccgcgggggaaagacatgcccctagtctgcccgctgcgctgccctctgcccagcctcgctgccgcccgcgccgggagaggagggactgccgagcctacaccttcaaactcgccctagaagtctcggggcgcggcagggagcccttccccaggccccacggccttcacctctccgcgggtaagcctcagcccctgtcctggggacctgtgcaaatgaccctggagttggttttcgctttctccccttgcggcggtgtgaacgtgtgtccgcagcgtgatgggcaacccaggtggagaaattgacccacctaagttacaaggaagttcccacggccgacccgactggcgtggaccgggacgacgggccccgcattggggtctcctacattttctccaatgacgatgaggacgtggagccgcagccgccgcctcaggggccagatggcggcggcttgcccgacggtggggacgggccgccgccgccccagccgcagccctacgatccgcggctgcacgaggtggaatgctccgtgttctaccgggacgaatgcatctaccagaagagcttcgcgccgggctcggcggcgctgagtacctacacgcccgagaacctgctcaacaagtgcaagccgggcgatctggtggagttcgtgtcgcaggctcagtacccgcactgggccgtatatgtgggtaacttccaggtggtgcacctgcaccggctggaggtgattaacagcttcctgactgacgccagccagggccgtcgcggccgc

SEQ ID NO: 89011 - DNA, 209 bp, Homo Sapiens
ttttgagctgcggggcatgatggggattgctgcatatcagcagttggatgttcttgcctctgacagtagcttatttgctctgggggccaggaattggattcagtttacactatcattaaaaaagagggagagagataataaactatattttggtggggatggtgattaaacacctcttttgggtatgccttttaaaaatgcttatagag

SEQ ID NO: 89012 - DNA, 555 bp, Homo Sapiens
cagtgctcagaccctctctaagccttcctttccaaagcaaacttcttcagttcctctcatcatcctataacacctttttttgatcccccagcaacgtgtcagtcttgctctacatgtgtttttggatgtcgaaggcccttttaaaacgtggtgttcacaactgaatgtaacagtctaaatgaagcctaaacatgtgcagagtgtattgggaccattcacttccttgtcctgaactccaaaggcctagtcctgtaatattaaattgcattcaatttttcagagattaagatacacaagttgccttctgctgaaggttaaagctcctagtggttccctacccccacctccagccgctctgatgcctcagaggtccctggtgtgtaagggatgatgtacaagcttttctatgcccaaaatataagtgagagtttctccttccattagcataggggaaaaaatataggaagttagtttagtcaggaagatacttaatttgcatttgggcatttctaaactatataataattagtaattaaaatttagagtacttaaaaa

SEQ ID NO: 89013 - DNA, 475 bp, Homo Sapiens
gggcagaagccagagaagatttctgtcgtgggaaggcgtcatgaaacaggtgtggatgacactgtcacggtgctcctgcagtacccaggggaggtccatggcagcttcacctgcagcatcaccgtgcagctctccaacacggcctccgtgagcggcaccaagggcatggtacagctcctcaacccctgctggtgcccgaccgagctggtggtgaagggggagcataaggagttcccgctgccccccagtcccaaaggactgcaattttgacaacggggcaggcatgagttatgaggccaagcacgtctgggagtgcctacgcaagggtatgaaggaaagtcctgtgattcccctgtcggaaagtgagctcctggctgacatccttgaagaggtgaggaaggccattggagtcaccttcccccaagacaaacgctgatgtatccccgaataaataaagacatcttacatcttcaaa

SEQ ID NO: 89014 - DNA, 495 bp, Homo Sapiens
ccataaatgggcaatatagcatttttactgaaaaggtaaatatagcctaatttactctgcttaagcatgatgctcagataggagaactaatctaccgtgtccacagaccagtgaatttactgtggggaaacagtaaacagttgaggtgacgtctatggtctaaggcctgcagaaattgagcaatggtaaagcctcaagaggagaatgttacaggttaagagagaaaaggagcagggtagtgtaccccttagttttgctcgacagatgaacagtctacaaagtagaaacatgacattcaggagagccaggcaccagaagacccagagggccagagatcattaaaaggaaaaagaaatcaggagtgggaatctcagccacactcccaaaggtggagtgttcaagtgcaggatgcagagaaagcaagatgcacacattctagactgtaagtcaacaagcaacttctcatcattaaataagaagtgcctattaaaaaaa

SEQ ID NO: 89015 - DNA, 523 bp, Homo Sapiens
ttttcactggaaacccagcactggttttatgttgagtgagtgggaagctgggactctgttttacagccatctgtactggagcctggacaaaccactggtctctatgggaggccccagcctcacatttccctggcaaggagagagaggtttagccatgtcctgggtctaggattacagcccagagatgggcacttaagaagacctggtcattggtccagacttgggccaaggctctcctctgtgagggatgggttttactggtgaattacctgtgtggagaagctatcagggccatgtttagcacactgaagggaccagtctccaccaagcactttaacatccctccagccagcatagattgatctcgtgttacagagagggcaaggtttttggcccctgtttgcagactccatgtcttaatcagagaccacagttttctctttgttccaatctgcgccacctcggtagccccactttccttgctgtgtggacttgaaacaaaataaaatgtgttgcttcaaaa

SEQ ID NO: 89016 - DNA, 577 bp, Homo Sapiens
acctggtcgctgcaccagtaccagcccgagacgattgtgagtccgaggagcagcgcgggccacggcagatccccggtcacggggtgccggagcaggtggtaggagtcgggccggggtcgatagcagaagctggagatgtttcccacggctggatcctcggacaccgtcagcgaagtcgctgctcccaggtatttgtcgaagagacccgaatacccgcccacctcgtggaaggctgccgggcaaggccgtcaggggaccctccttaggaccctcagaccggagacgcgcaacggccccgcgcgcaggccgagagctccgcgaccatgccctccgcgcccctccctggtaggcgagcccctaccgtaacccatgaggatgcaggcgccccccagaatgacgaaggtctgtaccgtgtccgtgtacatcagcgcggccagccctcctgcaacaggccggggtcaggggacagcccagctgtttatgttacaggctggccttagcaataaggcgtctttgtgggaatttgaaagagttccccttcctggagaataaatttcaaaacgataaatttaaaaaa

SEQ ID NO: 89017 - DNA, 278 bp, Homo Sapiens
ctcagtgcccaggaagtggtacagtgtgctctcaatagtccttcagcttatgacagcctcagctcatgggacttgatgacagggaagagcaagctgcatgccatgaagtcagccaggtttgcctgtggaggctgctcccatctcctttcagaactgccccctcccctatcaggcccccacttcttccccagggccttgctctcagccagctgtctgggatggctttcctgtatagctttgacctccttcagcacaggagcctgacatggagtaagaaa

SEQ ID NO: 89018 - DNA, 919 bp, Homo Sapiens
caagcctctgtgtcagcctcctagccagccagcctgaagactggcctcccatgcagccagcattccgaacagcattccagcaaccctcttcccctgccagaagactcgtgatttgattagcctcccatgcagccaggctctaggccagcctccaaaaaaccggcctgccaccaggcctccaagtcacattcatcttgccggactcttcagcaagcgttttaggaagcatttaaggcagcctctcacacagcctctcccgcaggctcttggccagcctcctagacagccagcctccgatccagcctttcagaaagtctctaagcgaatctcccagacaatcagcttccagaccaacctcccatgcagccagcgtttttaacagccatccagcaagcctcttgcacagccagacaatctgccactctgccagtttcctcgccagcctcttggttagcctcccatgcagccagcttctaggccagcctcctaacaagccagacttgcattcagactcttagccagattcagcctgccaggatctcagcaggccttttagcaagcgtttatggcagcctctcagacagaaagcctctcccacaggctctaggccagcctcccagtgagccagcctctcagcaagcctctatgctacttttcaagagagtccttcagtacaccagcctcccatgcagcccgcgccttggccagccttccagccagcctctagcataaaaaccacttaagaaggccctgttgcttcccttcaccctaaaacactgcagagagtgccctgaaatatttgaaatgttgaaaagctgaacctacaaatgtcaaaacacaaatgtatatttgttattgggaatgtttttctcaacaaaaattgaaacattaaaaataataaaatctaattacttataaa

SEQ ID NO: 89019 - DNA, 552 bp, Homo Sapiens
  misc_feature (181)..(304): n is a, c, g, or t
accagctactgggtcataaggacactcaagcagcaccatggaggggcccaagtggagagaaaccaacttgccagcattaacttggtagttgtgcagccatgtgaatgagtggatcctaccatcctagtcaaacctctgataactgaaggtcccacctatatttgactgcagtcttccaacnnnnnnnnnnnnnnnnnnnnnnnnnnnnnnnnnnnnnnnnnnnnnnnnnnnnnnnnnnnnnnnnnnnnnnnnnnnnnnnnnnnnnnnnnnnnnnnnnnnnnnnnnnnnnnnnnnnnnnnnnnnncaagtcatcacaggtaatatttttattaaatatttgcatagtacaaacctgggtctccatctttgtaggctttgatttttgttttttaccaatcactgactgttaagccacatattttaagtttttgttacaatcacacctaacctcaatgtaccaatttctgtaaatagataatgctaggtaccgtaaccgataaatcttgacatctgagtggattaatacaataaaagtttatttttcatctcaaa

SEQ ID NO: 89020 - DNA, 653 bp, Homo Sapiens
tgtagtcttcggaccgtctccactagaggctgcacagcccgcccggaccaacgcctccgcgcctgccgccgtctggccggcgccctcccgtttccttcctccagggggaaaaaatgtctttcgggccgctttccaggaagcagcaggatgcgccgctccactgtcggtagcaacaaggtcagccctccctgcctgtttgtttttgcctccgctcttgccctcaggtgggaccgagccaggtgaggggagggggctgaagggccatttcttatcagggtccccggccccggccgtggcgtcggggcggtcagtggcggcagtgggggtggcagaaactccttccgaagcccccggcgctggagccagcctctcctgcggcagagcccattttgggggaactacaccacctccgcgaggggtcggttggtttggtgcgtgaggttcttcttgagggggcgggcaaatagggactgcctggaccagacagcttccacccgagtctctatgtgtgtttggggctggggagttgggggaaggaaagatgattctctccctctccagaaaccttctcaaatgtgcctgggctttccagggctcgccgacagtctccaaatggaacacgttggtgaataaacagctcttgcttactcaaa

SEQ ID NO: 89021 - DNA, 1019 bp, Homo Sapiens
  misc_feature (82)..(116): n is a, c, g, or t
aaatcgtatagactactatagggcgctagctcgctcaagcgaacgacgagcgcagcgaagtagtgagcgaggaagcggccgnnnnnnnnnnnnnnnnnnnnnnnnnnnnnnnnnnncagtcgacggtaccggacatatgcccgggaattcggccattacggccggggaggcgcaattgtgccctggttcgccaagatgtcgttcccaaagtataagccgtcgagcctgcgcactctgcctgagaccctcgacccagccgaatacaacatatctccggaaacccggcgggcgcaagccgagcggttggccataagagcccagctgaaacgagagtacctgcttcagtacaacgatcccaaccgccgagggctcatcgaaaatcctgccttgcttcgttgggcctatgcaagaacaataaatgtctatcctaatttcagacccactcctaaaaactcactcatgggagctctgtgtggatttgggcccctcatcttcatttattatattatcaaaactgagagggataggaaagaaaaacttatccaggaaggaaaattggatcgaacatttcacctctcatattaagtctggcaatgatgactatatgtattcctgcctaaataaatcatctattaatcactagaaggcggggacgcaaaccagaaaaaaagccatgtcggcccgcctcgggccctccgagaaagctttcctaaacccattccgttttggcggccgcgggggcccagtaagggtaaggggaaacatggggccataagcctggttttccctagggaaaatccctggggccatggacctaaggggcttggggattccccccccaaataaaaaaacacgccccgggcggggtaaccaggaggccggttctctgaaacacaattcccaaaagggggaaggtctcgtggcagggtgctctttaccctggggattcctatctgcagcagggggagtgtctctaagagcgccggagccttcctaaattatctcagaaattttaaggg

SEQ ID NO: 89022 - DNA, 503 bp, Homo Sapiens
tttttagggctttgtccgcctttattgttggtgaacacagggcccacctcaccatgctggggtggcctggcttgctgtctctgagtaccgtgggaactgaggcgggctggccttgtctccccagcgcctgctcacagaaggtgccccatgatgtctgtcgtgcagatgaatgtgtccacgcatgctgggctagtacagaagatcggtaggcaggggtcttcgtggccagggcctgactgaggaaaatggattctaggaacacaaacgtcattgaagaaggagagtgtgtgttactggttgagggtgtcctggtccttggcatctgggtggatgagctggagcttcattctgtgaaagcagtgggctggcttcagatcccgtgacagctgcaagcacagcagaaccaaggcaggcacttgtggacttcttcactgtcctcaaaaaagcaggtggtgttgtcaactgtggttacactcactccccatgcgctgccctgctctcaa

SEQ ID NO: 89023 - DNA, 493 bp, Homo Sapiens
ctcacattcttcttccaattctgaagatacagagatgtgatgaaaacaagtaatagctttggctgtttatttgatagctgtttctgggtatttaataggaatcctttctcaaggaatgagttgtgacctgtttactgtctctttagaagaaaaactccactggaaaccattcaccatgtgtgattgtcttctgttatcatttgtcttacaggcggctattgcagacggctaatttatgcttaacttaggaagagataaggcaaaagctagatttttttcatgtgatcttttccaagcttcaacttaacttaactacatttctctgtatgatgatgtctcttacttctacaggttccttgagcaccaaagatgattcataactctgtataggtgacagctgcttataaaagcatcttagcagataagcctattaaaattgtgcttttgtaacaatcccgtggttgctagaataaatgcctttaaaaaatgccga

SEQ ID NO: 89024 - DNA, 588 bp, Homo Sapiens
aaccaaacaaaccctatttcagagatttgaatctgggagggctggtcatcttagattgattggcttgatctttaacagatgccagaggggattcctgagagatggtggttttactctgttcctgtgagtttatgagaatgaattcttatgaacctggaaggtccaggagcaactgctgaagacattcatagaaataggagttattttagaaatggaacttcacttcatctgaagttctgaacctatgagtaagagtaatagggtggagtttttgtgatgtcttatattcctttcctgaaaactgaaaaatatagataacactcatacctcgatttcacacagatgacttggtgatactcaagagacagagacttttatcaggggtgtcaaactcaaatgactaccaggtcatgaaaggtaacataaattagtgaagccggctaaggaatacctatcccatatagagaaatttcccatcactcggttacattccaaaatgtatgtcagtattgtaaaatcatccagcctttcaagaagcttttaaatgggattatttttcaaaataaaagtagctaagtaaccaaaaaa

SEQ ID NO: 89025 - DNA, 360 bp, Homo Sapiens
cattacagtaagtctcaacagatctgctattctgctctctggaatctacaggatacacctagccttgattccacaggagaatacttcaatttacctgggtacatattaactccatcagcttttcttcatccattaggaaagctctcaggaggagatttactttgccaacatctctctcaaaccctgatgccaagaattgaattcaaggtttcacccaagtgacaaactagaaagatgtttaatggctttgttgtaattactgtatttccctaagtatatccttggagcttccatggcagcaatattacccagctgactccatattacaatctaccaaataaaaccttaaagtgttaaaaa

SEQ ID NO: 89026 - DNA, 555 bp, Homo Sapiens
ggttacaaatgtttcacaagacagcaagtgacctgagaatattcatttggtttccaaagcaaactgccttgctcctttggggtgatttatggtatagaagaaactgacttaacatatactatagggaaaaaataagccatgaatcagcaagccaggcctgcgggaaaagtatgaacccaaacaggaaagggctgaggcaggtggtagggctggcacttatttcttccatctgcctcagagtttatccaaattttgaattttccgtaccttaaccatgcctaaatgctttggcttgttcaattttggcagattaagcagttcaaggtaagcagagaagtaagttcccaaccacaaggaatttaaaaggagtaggaacgtactttgaactacatttcccattttgcgatcattacgtcttctattacaatgccctactttggcagcatgaagagtactgcattaatttaatttaatttaaaatttaatttaaaactgtctttctctgtattttcaggagtttgaaaattcaaaaaataaataataaatgtcaataaa

SEQ ID NO: 89027 - DNA, 571 bp, Homo Sapiens
ggacaccatgagggccagcagcttcttgatcgtggtgggtgttcctcatcgctgggacgctggttctagaggcagctgtcacgggagttcctgttaaaggtcaagacactgtcaaaggccgtgttccattcaatggacaagatcccgttaaaggacaagtttcagttaaaggtcaagataaagtcaaagcgcaagagccagtcaaaggtccagtctccactaagcctggctcctgccccattatcttgatccggtgcgccatgttgaatccccctaaccgctgcttgaaagatactgactgcccaggaatcaagaagtgctgtgaaggctcttgcgggatggcctgtttcgttccccagtgagagggagccggtccttgctgcacctgtgccgtccccagagctacaggccccatctggtcctaagtccctgctgcccttccccttcccacactgtccattcttcctcccattcaggatgcccacggctggagctgcctctctcatccactttccaataaagagttccttctgctccctggtgcctccagcttccccccgccctctctctt

SEQ ID NO: 89028 - DNA, 531 bp, Homo Sapiens
  misc_feature (432)..(440): n is a, c, g, or t
  misc_feature (513)..(513): n is a, c, g, or t
agttaaaatttatcaaaacttaggcacagaaacacttaaagaccacacatgatgccatttgcagtccagagaaatgtaaacaaatgtaaaggtatagtactgaatcataactacataaaattcactgttgtacatactgtactacttaatataataatttcatagccaattcttcttgctattgctgtgagctcaagtgttgcagatacacgcttaaaatgctatgtgatgctaatcatctccacataagcaatttgtctctctggtaagttggatgtagcagtaaaaagtgatcacttgtggttcttgtgtatttttcatcatgttaagtggaatactgtaaagtttgaataacaccatggcacccatatggagtgccactaatcatgccagaagtgctcccaagaagcagagagaagtcatgacattagnnnnnnnnngttcagttccttgatatgtggtgtagattgaagtctgcaaatgcagacgctcaccatttcaagataaaaggtntaacgtttggatcttaaa

SEQ ID NO: 89029 - DNA, 671 bp, Homo Sapiens
aacgggtgatccggttgtcatcgtctgcctgctgaaccactacaaagtctccacgcggtccttcatcaaccgcccgaaccagagccggaggcgggaggacgggctgccgcagatcatgcatgccccgcggtccagggacaggttcacagcgccgtccttcatccagagggatcgcttcagccgcttccagcccacttacccctatgtgcagcacgagattgatcttcctcccaccatctccctgtccgacggtgaagagccacctccttaccaggggccctgcaccctgcagctccgggaccctgaacagcagatggaactcaaccgagagtccgtgagggccccacccaaccgaaccatatttgacagtgatttaatagacattgctatgtatagcgggggtccatgcccacccagcagcaactcgggcatcagtgcaagcacctgcagcagtaacgggaggatggaggggccaccccccacatacagcgaggtgatgggccaccacccaggcgcctctttcctccatcaccagcgcagcaacgcacacaggggcagcagactgcagtttcagcagaacaatgcagagagcacaatagtacccatcaaaggcaaagataggaagcctgggaacctggtctgattccttccaacgtgcacttcagctggag

SEQ ID NO: 89030 - DNA, 567 bp, Homo Sapiens
aagggattaagctggcggccgccgccgccgaggcttacccgggaatgtctgggcccgcgcctcgcggcccccaagctccacgctgcgcccgctgtcccggcctctaaaggccgccacgtccctgcggcgcgcgcaggcagaaagcggcttcgtgccggcggagggggcccgggcgggccgggaggggctgccccaggccctgcgcctaccccatcaccgcggccggcgccgggccgggaggatgcgcggtgtggggctctgaagcatggagggggtgttgtacaagtggaccaactatctcacaggctggcagcctcgttggtttgttttagataatggaatcttatcctactatgattcacaagatgatgtttgcaaagggagcaaaggaagcataaagatggcagtttgtgaaattaaagttcattcagcagacaacacaagaatggaattaatcattcctggagagcagcatttctacatgaaggcagtgaatgcagctgaaagacagaggtggctggtcgctctggggagctccaaagcatgtttgactgatacaaggcctcg

SEQ ID NO: 89031 - DNA, 513 bp, Homo Sapiens
ggcccgcgcctcgcggcccccaagctccacgctgcgcccgctgtcccggcctctaaaggccgccacgtccctgcggcgcgcgcaggcagaaagcggcttcgtgccggcggagggggcccgggcgggccgggaggggctgccccaggccctgcgcctaccccatcaccgcggccggcgccgggccgggaggatgcgcggtgtggggctctgaagcatggagggggtgttgtacaagtggaccaactatctcacaggctggcagcctcgttggtttgttttagataatggaatcttatcctactatgattcacaagatgatgtttgcaaagggagcaaaggaagcataaagatggcagtttgtgaaattaaaggtgacaactttggaggggaccacccttgattggatgcataaattctgttcattcagcagacaacacaagaatggaattaatcattcctggagagcagcatttctacatgaaggcagtgaatgcagctgaaagacagaggtgg

SEQ ID NO: 89032 - DNA, 946 bp, Homo Sapiens
gggagtgggagggggaggtacctggaactgggagtgatgtcagctcccagctcggtgcctgcccggattcctgacatggtgtagtgcaggcagggtggggaaaggacggggaaggactcgtgtgctgcgagctggcggccgggccggagtgctggggctttgaactccgagaggaggtggaccagaacttttggaactagtgccggcggctctccaccccccagtataaaagaacgtgtggatcactttgctgagtacatccaagatttgaagaactgaaataaatcagctttaaacctgctttttaaaaatatctgggttggaatttgcccctgacaaataataaaatgatgagtgatgcaagtgacatgttgactgcagcgttggagcagatggatggtatcatagcaggttataaggctctggaatattccaatgggatttttgattgccaatctcccacctctccattcatggaaagtttgcgagctctgcaccttgtggaagacctgcgtggattgttagagatgatggaaacagatgagaaagaaggcttgagatgccagatcccagattcaacagcagaaacacttgttgaatggcttcagagtcaaatgacaaatggacacctaccagggaacggagatgtgtatcaagaaaggctggcacgtttagaaaatgataaagaatccctcgttcttcaggtaagtgtgttaaaagaccaggtgaaggctcagggagagaagattcgagatttggagttttgtcttgaagagcacagagagaagttgaatgccacagaagaaatgctgcagcaggtatgtgcagaggccagaaccaagatgggatttccctgctgaactatgtgagatgctgcatttctatgttgccgcttaataataatcaaccacgcgcgtttcttgattcagtaggttttacgctttca

SEQ ID NO: 89033 - DNA, 1458 bp, Homo Sapiens
agttaggatatagacagtgtaaaaaaagcaggctgtacggtcggatatcccgggatatcgtcgaccacgcgtcggggaagtttgcgagctctgcacctggggaagacctgcgtggatgtcagagatgatggaaacagatgagaaagaaggcttgagatgccagatcccagattcaacagcagaaacacttgttgaatggcttcagagtcaaatgacaaatggacacctaccagggaacggagatgtgtatcaagaaaggctggcacgtttagaaaatgataaagaatccctcgttcttcaggtaagtgtgttaacagaccaggtggaggctcagggagagaagattcgagatttggagttttgtcttgaagagcacagagagaagttgaatgccacagaagaaatgctgcagcaggagcttctaagtaggacatccttagaaactcagaagttggatctgagtggctgaaatatctaacttgaagttgaaactgacagctgtagagaaggacagattggattatgaagataagttcagagacacagaggggctgattcaggagatcaatgatttgaggttaaaagttagtgaaatggacagtgagagacttcagtatgaaaaaaagcttaaatcaaccaaagatgaactggcatctttaaaagaacaactagaagaaaaggaatctgaagtaaaaaggctacaagaaaaatgggtttgcaagatgaaaggagaaggggttgaaattgttgatagagacatcgcaagtacaaaaaatgaaaaaagctgtggagtccttgatggcagcaaatgaagaaaaggatcggaaaatagaagatcttcgacagtgcctgaacaggtacaagaaaatgcaagacacggtggtactggcccaaggtaaaaaaggcaaagatggagaatatgaagagctgctcaattccagttccatctcctctttgctggatgcacagggtttcagtgatctggagaaaagtccatcacccactccagtaatgggatctcccagttgtgacccatttaacacaagtgttcccgaagagttccatactaccatcttgcaagtttccatcccttcattattgccagcaactgtaagcatggaaacttctgaaaaatcaaagttgactcctaagccagagacttcatttgaagaaaatgatggaaacataatccttggtgccactgttgatacccaactgtgtgataaacttttaacttcaagtctgcagaagtccagcagcctgggcaatctgaagaaagagacatctgatgggggacaggaaactattcagaagacttcagaggacagagctccggcagaaagcaggccatttgggaccctttcctccaggccccccagggcaggacaacctccatggaatgacaaccccccttcgggactccaaaaggccagatctttccttttggcccgggggctc

SEQ ID NO: 89034 - DNA, 817 bp, Homo Sapiens
  misc_feature (706)..(706): n is a, c, g, or t
gggctcgagaacctgggaaaggactgggtggctgaaagatggctggaaagcgcatttagccaaccgagcctgcgcatggaacctgcggcgctgcacagctgcatagagatgtggagcacctccctttaccgtagaaagtaggcgagccagctcgaggcactatactgaggaagcgctgcggcctacttccgccgtttttcttaacatcaaagaaacttccggtagtggggtgtcttgcattccaccgtgtcggtgccccagaatgagacgcaagctgatctgcagatcccgcagggtgccttctgctcttttcggggcaggttggccggtaggggagaaggccgccattggaacgcggcctttatgtcgggttctctcaagagtctaagatcgcaccctcaccagcggagggaaggagcccactcccagccacaccgctttgttttctttcgcttagccttgttgcgccgttctctaagccactcatgtccttagatcagattgaggggcccgcaggatttaagcctttaatccacagcacattccaagcacctacccggtggtaggccctaacaaggaacacaggcaagtgacacgctgcctggcctgaaaggtccgctcagacctttacatgaagttaataaatgttaaagcttcagggcccctcgcttgtatggcctcctgggagaataaatagttgctgaanttggggagaggggaaaccagctttgagattaggaagcaaacctatgtaaccatttctaataaattaccccgaagaaatctaaggaagaactgaaatctccagtcctccagc

SEQ ID NO: 89035 - DNA, 477 bp, Homo Sapiens
tgccaggcggcgccccgcgggctgccgccgccgctgccttgaagaagcagttcaacctcatcagcaggtggccgacctgactatgggccggtcggctctggaccgaaccacagcccagcccgaggccagcgggacgcccgctgccgctcaatcgccccctggtccttggcgaccatctgggacgggccgctgcctcctctgtagcaacccctcgggtgccccctgcccattgtccctaccccggcgagcattgccctgcgaggactacacccgatgcttctcctctcttccggaggacacagccagcctgggaccgctgccctgtgctaaaactccgatgacttctgtccctaacgctgtgccgagcgctgtgctgtggggggcagcattgtcagactttccgggttgacccgctgttgggagtcctttaagtgcatggtagcaagaaataaagggatatatgaaagccaaaaaaaa

SEQ ID NO: 89036 - DNA, 1079 bp, Homo Sapiens
tttaaggcattctcacgggtgtgcagtagtttctcattgtgatttttatttgcatttcccagaggacagtgcttatttgccacctagagagcttctttggtggagtgtctgctcaaatctgttgcccactgtacaaaataagttgtttttgtattagtgagctttgacagttttttgtatgttctggttacacgtccttaatcagctacatgactggcaaaggttttctcctggtaacttgtcttttcattctctaaacaatggttttcacatagcaagaaggtttaattttattaaagtatgacttgccaatttttttccttttataggctctatttttggtgtcatatctaagaaatgtttacttaacctatagtcacaaaacttttttcctatgtttcatagttttgaatttcatgtttgggtctatgattcattgagttaattttctatggggtgtgaggtagggatcaagattacttccattaaagttttgaatgttcaagtatgtacatttttcatttttagacgttctatttggttcatttagttatgctgcttagcctctgatactctcttgcttatttatgctccttagcttctcctttgtttcttcaaacacattaaacatatttgcatctcctattctaacatctgagtctttgcaggtgtgctatctttcggccataacttctgaggccccttctctagtgtgtgctgtgattttccactatgagctcatagtctagggatcctgctcgctggaattccttgaggcctgggttgggggttcctcctgcaaggacatacatttctttctaccagaggcctgggggcactatagctccagatatgcttgcaattaaaagtcacagtttgcagttcttttgaacatgtaaataatatgaactttggccctatacctgtgatggagagtgctagccaggggccataaatttataggagagactttttaaagatgttccatccacagccatggccaagtgagatactgtttctgcagtgaagcccggccgtaatggccgaattcccgggcatatgtccggtaccgtcgactg

SEQ ID NO: 89037 - DNA, 702 bp, Homo Sapiens
  misc_feature (17)..(17): n is a, c, g, or t
  misc_feature (56)..(56): n is a, c, g, or t
  misc_feature (58)..(58): n is a, c, g, or t
  misc_feature (76)..(76): n is a, c, g, or t
  misc_feature (156)..(156): n is a, c, g, or t
atgggagacgacagacngtttgtgtgcaatgccccgggctgtggacagagattacnanatgaggaccactggcagngtcataacagcaagcatgagatgacattgaaatttggcccagcccgaactgactcagtcatcattgcagatcaacgcctnactccaactagattcgtgaagaactgtgaggaggtgggactcttcaatgaactagctagctcctttgaacatgaattcaagaaagctgcagatgaggatgagaaaaaggcaagaagcaggactgttgccaaaaaactggtggtattcagacctaggctatttttattgtgctttgggataattttcttaattggttaaaacacaaaatcatgggcttagtagagtaaaaccagtaaaaccagatagtagtcactaatcccagtcagccattcaggtctttaggagttccagatgatggatcagcacaagtctgtcgtcaccgaaaattagtcctcttgttcttacaggggagtattagtttaataatcggttttttaaaaaatatttatattataaatatgttgaagatgttaaaaggtgataaattactcagattttgttggataacatatttgttgccaaattccactcttttctgagctgatcagacttctcagctacactgtttttttgaatcagcaagtcaataaacatttatcaaattac

SEQ ID NO: 89038 - DNA, 781 bp, Homo Sapiens
  misc_feature (27)..(27): n is a, c, g, or t
  misc_feature (427)..(474): n is a, c, g, or t
tagttctgtagctctgactactccagnatctttcatgctattagtttgctcccctatgtcttctgtagagtcttccccaaagcttgctggaccctatggggatagggcagaggtggccttatgagatggtgggaggaaaaggtggtacttcctggggcagagagtgcagtctggacacctgtgtggcatgagacctctttccctcctcccctcctgctctggccattcagtccacagtgagctttgggattcccaggtacacaaggtgaccttttcttccaggacagatattgccttgacattgatgcaggttgtagcacagcttgtcccctgatgcacagtgcaggcctgctctctaacttcccctagtcttaggatttaagtgtatctctcctaaacaggatgcagaaagtaattactcatgtgnnnnnnnnnnnnnnnnnnnnnnnnnnnnnnnnnnnnnnnnnnnnnnnnggtttctctgtattagaccattcctgtcttcctatttcctgtctctgtctctctcccctggagagatatttgttggaccctcattctgttttctcaagttctgtccatgcacttcacagcattggctttactgcatgctgggtgccaggcactaggagcagagatgggaaggaccacccctcaccccccaataccttgaaatgggtgcaaaccttgaaactttgaagcctccccatccttgtttcctctcctccggtcgtttcccttattccatgaagcacacttgttccctcaataaatacattag

SEQ ID NO: 89039 - DNA, 339 bp, Homo Sapiens
aaaaaagaaatagtcagtgttttcctcctttcaaccgagactatttctggattgtgtgctcctcgtcagttgacttgttttgcacacttttctttacttcatgtccccatcaacaaccgtcctgctccccacctcccccaggaaataaggggcctgctcctctccctactgtgaccctggaggctcttaagatgatgatggttttttttattgggctgagttcacgaattaggggcaggagctggaagtcgccctaggaacaccagatttcctggttctgttcaagttggcatttcttgtttggaataaactatttcttggaccttccttttccaaaaa

SEQ ID NO: 89040 - DNA, 486 bp, Homo Sapiens
  misc_feature (37)..(37): n is a, c, g, or t
aacccaaatgtccatcattggatgaatggataaacanaatgagatagagacatacaacagaatattattcagccttagaaaggagtacaattctagctcatgctccaatgtggatgaagcccgaagacatcataagtggaataacctagacacaaaaggacaaacactgtatgattccacctttgtgtacctagaatagtcaaattcagagagacaagaagtagaacagtgattctcaggaactgtgaggaggggaaagtaggctgttatgtttaatgatttcaaagtttgggatgatggaaaagttctggatttggatagtgatgatagttgcacaagaatgtgaatgaacttcatgccactgaactctacacttaaaaatggttaagatggtaaattttatgtatattttaccacattaaaaaatgaatggggtaaaattctacccattcatatgaaaagatttcaaagatgtaatatagggtg

SEQ ID NO: 89041 - DNA, 505 bp, Homo Sapiens
agcagaatagcccttagcagaaagaaaagagctaagagaccctgtatctgtccctcacccttcagagctggtgcccaaacccaaagccatcatcacattggatggagcccctgcctcaggtttagtcacttgatctctatttgaggggaagcaaagatacctgtgactcatgaagagcatgagtcacatggtggagggacttgagaattaggaaatcaaaatgggcaagaacgatgtgtgccttcaaatggaacatgaatttgaagcaaatttcggttcaatttgctgtcacacataatgatcaggttcagtaataaagaattgtacttaaattttgattcattaaactttctggagagtcctaaacaatttatattactaacacatagagacttctttctggagaaaaatgaagtaccaggtgccaagtaacagatttacatgagaattttttaggaacaacacactgccacctgtagcacagtcatagcccatttgaacccaa

SEQ ID NO: 89042 - DNA, 520 bp, Homo Sapiens
  misc_feature (103)..(103): n is a, c, g, or t
  misc_feature (114)..(114): n is a, c, g, or t
  misc_feature (503)..(503): n is a, c, g, or t
ccccaagccgcccgcctttctccagctgattcctgcgggaaccggggcggcgggaccctgcctctctccagaaggccccgggaacgctggcgcggggccctgnaacccacgatnccgtttgagcgcctgctgtgcgcctccgccgcgagtcgcagggcccgagataaacaatgggtctgaaaaaggagggagtttcaccatcctctctgcatcatcctcctggctgtccctcgggacagatggtggcaccgccagggtctggggacagatttggattctggtcccatatcatgccacccacaggcttcatgacttggtatttgctctctaggagcttttttcccatctgcgagtaggactgataagaatcccgaccccccagagtagcagggagggtcccaggagtaaatctcaggcgtggagcctggcgctttgtaaataatcaattgtggtgttgttttttgttgatttgttcctagcctccatctcaagaaaaaataaantaaagttgttctctgaa

SEQ ID NO: 89043 - DNA, 499 bp, Homo Sapiens
  misc_feature (405)..(440): n is a, c, g, or t
accaccaccatgtgcagaaatgcctgggcacccttggggggctgccggccagcgtgggtgaatggcgcccaccagacggagcagggcctgctactctcctgggccacccctcctgctggacctcgggcctgcctccctgccttccctgcccttggcaccttgagaggagaatttgagtactagaatttgcatctgggagtgtccaccacgggatcttccagaagcccaggggttcgggccccactcctggcatgaagaaatagcttgggctggtgtcaggccgacccaggtcctggctgtgtggcctcgggcgcgtcacttaacctctctgagtggcagtcacaccatcctgcgtgggattcagacttgagcctgtcccagggcccctagcggggtgggcctccnnnnnnnnnnnnnnnnnnnnnnnnnnnnnnnnnnnncgcggctcaacccttcagtgccccgcaggcggctgtgcgtggcgagcagaggacgccca

SEQ ID NO: 89044 - DNA, 438 bp, Homo Sapiens
  misc_feature (319)..(319): n is a, c, g, or t
gtgaatggcgcccaccagacggagcagggcctgctactctcctgggccacccctcctgctggacctcgggcctgcctccctgccttccctcgccttggcaccttgagaggagaatttgagtactagaatttgcatctgggagtgtccaccacgggatcttccagaagcccaggggttcgggccccactcctggcatgaagaaatagcgacggctggtgtcaggccgacccaggtcctggctgtgtggcctcgggcgcgtcacttaacctctctgagtggcagtcacaccatcctgcgtgggattcagacttgagactgntcccagggactagcggggtgggctccggggagggagggagggagggagggcggcgctggggcgcggctcaacccttcagtgcccccaggcggctgtgcgtggcgagcagtggacgccca

SEQ ID NO: 89045 - DNA, 398 bp, Homo Sapiens
gggaagacaggatttgcagggacacacctatgaggagggattcccctgcgatggacaggggaggggtttaggtgcaggtagcaccctgggcgcagggaagaaggcgtcacagtgagggcagaaaagacactcctcagatcctggaagcagcaacctgacccccaggggccactaagaccaaatcatggccatctcagcagcagcgtgtgtgacagttactggaaaaagatacctcacacctggcactgcctaacccccgagaacctaatgccactctgagaaagctcagtacgggtgcaagttggattaagtaattgcagtgcgagttttcctgtgttttattggtgtaatgctccttttggacattaaaaaaacttgacatatacaatgatcaaaaa

SEQ ID NO: 89046 - DNA, 637 bp, Homo Sapiens
  misc_feature (470)..(520): n is a, c, g, or t
  misc_feature (546)..(554): n is a, c, g, or t
tattatataattttattacttgcgaatcagacaaattttcaaacacagctgaaaaacagttgctaagcagaggtcctatccaacctggtttaatgaacataaagttattatcagcataaaacttgagtcctgaaacaacttactgtcttcagggtcttcaaataatgggtttaaaaacagataactgttttgttctttacagctatttaaatctttcccccaaatacagagtactaacatttgtttggttcatgaggttttattttagaaaaatagctaaagctattagctaatgatttgaaaactgcagtacgtttgctcatttccagtcttctgtcaccttacattctccatggtttctcaaaaattcccaacagttgttaatagaaagcatttgcaacctccagcagctctctaggatacagaagtgtgggtctaacaaccttgaaatcatttaaggtgacaataannnnnnnnnnnnnnnnnnnnnnnnnnnnnnnnnnnnnnnnnnnnnnnnnnngtccagccatatctccttgtaggagnnnnnnnnnctgagttattctgttcttcctgattgtcaatccattacactactttatccattcctttttgccctcaggtttaaaaaagaaaa

SEQ ID NO: 89047 - DNA, 155 bp, Homo Sapiens
  misc_feature (92)..(92): n is a, c, g, or t
tttttcttttttaaacctgagggcaaaaaggaatggataaagtagtgtaatggattgacaatcaggaagaacagaataactcagtttttttntctcctacaaggagatatggctggaccaaaataaaatgacatgaaattgcaaaaatgaaaagt

SEQ ID NO: 89048 - DNA, 662 bp, Homo Sapiens
ttaatattagaatcagcgcatttggaattatatttaaataaatacgacaaacatgaggaaaaatagaattataaaaactgtacacattcttaattgaaaatatacatataggcaatttatatagaaaattgctgtttcactcataacttctcatacttccataactgtaactagacagaaagtttaaagtgaaatagcaaattcctcacactcaatgcttatatgcatactttgaaccaataccttacatatcaatatttaaagcttttaatgtgataagtgagcttgcttcttgcttgttaatttgtctaatctaggttggattgatgacaatgctaccctcaggggataatgtatatttaaactgtttctatgttttgttttaataacacttaaagtagagaatccggtctcacagaggtatgttgaggggaaaagaagcagcaattttaaagcaatctcagcaagctcacgatagtcatttttagcttttatccaaaatgaaggaagtgatgctgtattttcaaaactgattttcaatccttcgtcggtagccagcttcaacaacttatcctgtagagttacagttaaatttaagttatctttcgatcaaagaaatggaccccgcgatccacaaatttcctatgcgagaaacttctttt

SEQ ID NO: 89049 - DNA, 963 bp, Homo Sapiens
  misc_feature (776)..(776): n is a, c, g, or t
  misc_feature (805)..(806): n is a, c, g, or t
aaggtagcgaggcctgggtggcgaattcggcacaaggatacccaggctccaacgaagcaggaagcaggtggtggctttgtgctgcccccgcctggcactgaccttgtgtttttacgggaaggcgcaagcagtcctgtgcaggtgccgggccctgttgcagcttccacagaagccctgttgcaggtgaagcaagagaaggcggatacccaggacgagtggacaccaggcacagctgtcctgacttctcccgtattggtgcctggctgccctagcaaggcagtagacccaggcctgccttctgtgaagcaagagccacctgacccagaggaggacaaggaggagaacaaggatgattctgcctccaaattggccccagaggaagaggcaggaggggctggcacacccgtgatcacggagattttcagcctgggtggaacccgcttccgagatacagcagtctggttgccaaggtccaaagaccttaaaaaacctggagctagaaagcagtagactggaggcttctacagactgtaggattcaaggtgatatttgcagactggctttatgagagacaacactgatctactaggggctggaccctagattggttgccagggcttgtgtgtgaatcaacccctaggaggaaaaacctactaccaaaccagaagagcaggcctaagagtactttgagcttctagaagaagtaagcgggaaaggaagagaaagagtagaaagttggtgcatcttctcctccccaagagcctgagtataagaangtgggattttaagggtggggggagctggnngttggagaaagggtaatataattaaaggccaccaccaaaaccaacctaaacaagccatgttcatgagtaattgtaagtggcttctggatgagacctggcagtgtctctacatacttcctcagggagatacgccattgccaatgtaattgaataaata

SEQ ID NO: 89050 - DNA, 1544 bp, Homo Sapiens
  misc_feature (81)..(141): n is a, c, g, or t
tagagtatgaagtcgacggcgcgccgaattcggcacgaggggagcaacgaacagccgcggaggcgacagctaccgcttcannnnnnnnnnnnnnnnnnnnnnnnnnnnnnnnnnnnnnnnnnnnnnnnnnnnnnnnnnnnnccctcgccatgggtccacgggcctagagtggcggaagataccggcctggtgccaaactggctactgctgcttcctgtggcctccatggctgaggactggctggactgcccggccctgggccctggctggaagcgccgcgaagtctttcgcaagtcaggggccacctgtggacgctcagacacctattaccagagccccacaggagacaggatccgaagcaaagttgagctgactcgatacctgggccctgcgtgtgatctcaccctcttcgacttcaaacaaggcatcttgtgctatccagcccccaaggcccatcccgtggcggttgccagcaagaagcgaaagaagccttcaaggccagccaagactcggaaacgtcaggttggaccccagagtggtgaggtcaggaaggaggccccgagggatgagaccaaggctgacactgacacagccccagcttcattccctgctcctgggtgctgtgagaactgtggaatcagcttctcaggggatggcacccaaaggcagcggctcaaaacgttgtgcaaagactgtcgagcacagagaattgccttcaaccgggaacagagaatgtttaagcgtgtgggctgtggggagtgtgcagcctgccaggtaacagaagactgtggggcctgctccacctgcctcctgcagctgccccatgatgtggcatcggggctgttctgcaagtgtgaacggagacgctgcctccggattgtggaaaggagccgagggtgtggagtatgccggggctgtcagacccaagaggattgtggccattgccccatctgccttcgccctccccgccctggtctcaggcgccagtggaaatgtgtccagcgacgttgcctacggggtaaacatgcccgccgcaagggaggctgtgactccaagatggctgccaggcggcgccccggagcccagccactgcctccaccacccccatcacagtccccagagcccacagagccgcaccccagagccctggccccctcgccacctgccgagttcatctattactgtgtagacgaggacgagctaaagcggctgctgcccagtgtctggtcagagtctgagggatggggcaggatcgccccagacttaccgtcgtcgaaagaggcccagctctgcccgacggcaccatcttggccataacttgaagcccaccttggatacacgcacagaccccaagcgagaccatacccaaggactcaacgaagcaggaaagcacggtggcggcttatgagcctgcccccggctggactgacattgtgtaacacgggaaggccgcaaacaagcactgtgcaggtgccgggccctgtagcagcttccacaagaagccctgatgcgggagagacccaggcccgcatctgggagcagac

SEQ ID NO: 89051 - DNA, 673 bp, Homo Sapiens
caggagactggactcaattgggggttttattacaagtttccattgtaatattagacatgttagttctctccagtctcagttttcccttatataaactcagaaatagttcagattatctccgaggctcttctgctttgacatttctagatatcttcttcaagccctgagtgcctatggggctgtccagctccagctccctgtgtcgaagggaggaccaagggaagggaagggctctccctctcaccctggaggggcttgtggcttgctgggcagaggagacgcagtgcaccttgcagcgctggacagggcaccaggcaatgtgtggaacaaggtttccatgccttcacttatttctcctttggtttcttcctttttttatgtagatccaagtgtctgacctatagaatttccctgctctctaaagcacttcttttaacatttcttgcaaggcaggtcttagagcaaaaacgccatcagcctcgagaagtgtcataaattaagttgctatttaagccctgattctagtaaaagggtccaaatttccaaggtgtctttaatgactctgtgttcagtgacaatgaagtatttctttaacagactgccacatccattcctgttgctctttctttggccttccctttagagatgcagttgaaaaccctcagcacacaat

SEQ ID NO: 89052 - DNA, 590 bp, Homo Sapiens
  misc_feature (520)..(520): n is a, c, g, or t
  misc_feature (569)..(569): n is a, c, g, or t
ttgctggatttttcttctattttattggttgtccttgggaatggtccaaaaattttgctacttcactttttatagaaagaggaatttaaagtgtttctatagctatatatttacaatgaaaaatcattcagatagttcagttcacaatgcaactgaccatctagcagcttgagttcaaggtttataaacacaaatgcctaccagcctaagcagataacctgaaagagaagtgggatggtgaagggcgggttggcttaggttgtatgaatgcagaacagggtagagtactctttctaaaagtggatatcaccattcagcaactgaagattttatgccatgcaggaatataatagggtttatactgtcagattttcaattgaagtcagaaatctgaatgtctgggaaattcttgattcttaaatgttggcataaacttaaataataaaatgctttgtgggccaaacaaaacaagcctatagactaaatgcagtatatagactggcagtttgccactcagctntagttttatcctatcacttagatattctaagctgaccaacacagcctangtaagaatattataaactaca

SEQ ID NO: 89053 - DNA, 416 bp, Homo Sapiens
ctgatccagcagccatatctgagtaggatgtatctgatgtggtgactcacagagggattgcaatgctcatgacgtccaacacagcagagattggaaatcacggggtccaattaatggagactgaccactctgagagtgggggtgagctgcagagcctcatccaacatgttatggacatgaggaatcctttatatagacttctgaatatgaagtccccccaaattatctgctagtagttctgaagaccttgtcccaggcgctgccggggcctgggcccgggctgcggcgcacggcactcccgggaggcggcaggactcgagttaggcccaacgcggcgccacggcgtttcctggccgggaatggcccgtacccgtgaggtgggggtggggggcagaaaggcggagcgagccaaaggc

SEQ ID NO: 89054 - DNA, 653 bp, Homo Sapiens
  misc_feature (12)..(12): n is a, c, g, or t
  misc_feature (601)..(610): n is a, c, g, or t
aaactggtagcntatgctaagaaagtggaaggggacatgtacgagtctcccaacagcaggggatgaatattatcacttattagcagagaaaatctacaagatacaaaaagaactagaaggaaaaacggaggtcgcgtttacataaacaaggcatcttggggaaccagccagccttaccagccccgggggctcagccccctgtgattccacaggcacaacctgtgagacctccaaggatgaattcatttaaccccatgtccttggggaacgtccagttgccacaagcacccatgggacctcgtgcagcctccccaatgaaccactctgtccagatgaacagcatgggctcagtgccagggatggccatttctccttcccgaatgcctcagcctccgaacatgatgggtgcacacaccaacaacatgatggcccaggcgcccgctcagagccagtttctgccacagaaccagttcccgtcatccagcggggcgatgagtgtgggcatggggcagccgccagcccaaacaggcgtgtcacaggtactgtgccccactgggaccgtggctccctaggaaataaaattcttgtgttaagttttggnnnnnnnnnnctgtcttccttcgtggaaattaaaattccagaatgcacatttc

SEQ ID NO: 89055 - DNA, 936 bp, Homo Sapiens
ttctgtggtttatgaatggatcttaaggtaattacaaaagggaaattccaagaatgcataacacaatgacaacatggtgagaaaagtgcagtactacttccaaggtagctagtgtaaaggacacttgagtttttaaaactgtggttaaatgttttatgtggaatttgatgagtttgtatattaaataccactgcttgctgcttttactagaatcaagttaagggacacgttagaaatagaacagcttaatatcactggcttcagagcaaaatgagctcgggtgactgcagattatgatggtaaatatggctttaattacaaacatgaggaatgattcactgaagatgaaaagataggacggatgtgatatgaaaaaaacccaaacattttggcattgaatgatggctaaggtgttccaagtattccatcttttaagatgaattgcttaattaattgcctcgctaccccaggattctcattctttggaaataatttttattaaatttcaataaactgtgaatcccaatggtattttactttacaacatggatgggctcatccttatctttaggtcatttggtcagaatcctcccgagaagactgatgaagagtatggaatcatgttccaattctatattcttaattatccttattcctgatgctactgcattgctgggtttccatagccaaggcctaagaacaggaggagaaggcaatgcttgtgggagggaggtcccaataccaaaattctgggcactaacctggtgtctgcagcccgttcccgttagcctcggggatgtcacctcacccacagcctgggatctgacgttcttcctcagactggagtaaggagtgatggaccgtaaaatgctgtgtaatgataaaaggctgaaatatccactgaatgattaaaaccaactctaataatttgaaaaa

SEQ ID NO: 89056 - DNA, 353 bp, Homo Sapiens
gcggccgcgcttcccctgcttagaaatccatcatctacaaggggtggggcctgaggagcgcaactctcacttgttactttagaaatcaatcatctacaaggggtggggcctgaggagagcgggcttcccctgcttagaaatcaatcatccagaaggggtggggcctgaggagcttggctctcacttgttactttagaaatcaatcatctacaaggggtgggacctgaggagggcgggcttcccctacttagaaatcaatcacccacagggggtggggcctgaggagcgcggctctcacatgttacttgagttttacccagcaggtgggaagtccagaaggctgactcggtctc

SEQ ID NO: 89057 - DNA, 950 bp, Homo Sapiens
  misc_feature (69)..(101): n is a, c, g, or t
  misc_feature (505)..(558): n is a, c, g, or t
agtgttttagggaaactactcagaattcacagtgaactgcctgtctctctcgagttgatttggaggaannnnnnnnnnnnnnnnnnnnnnnnnnnnnnnnnatctccttccacgggccaggcgagcgccgcccgccctcactggccttgtgacggtttattctgattgagaactgggcggactcgaaagagtccccttttccgcacagctgtgttgactttttaattacttttaggtgatgtatggctaagatttcactttaagcagtcgtgaactgtgcgagcactgtggtttacaattatactttgcatcgaaaggaaaccatttcttcattgtaacgaagctgagcgtgttcttagctcggcctcactttgtctctggcattgattaaaagtctgctattgaaagaaaaagaaagcgaacagtttttgtttggttttttgccgtgtgtgctccatagtggaggcgctattttccaattgatgagaatgacaaacatatatannnnnnnnnnnnnnnnnnnnnnnnnnnnnnnnnnnnnnnnnnnnnnnnnnnnnnacagggggcttgaaccttactcacccaagagcttcttacggaatgtggtagaaaaccaagttgtaacgacactgtaacctacctgatgcctgttcgcgcccgccgtgagctgcgcactggccgtggccaccattcacctctgtaatttaatccgtttctcttggattgtctggacgtgcccgatggttctttcttttgctcagtggagttggaggttttgtgtttggttttctcattcttgtcttgttttgtgtgggtggattttcaccgaccaatgatatcctcttctgacggtcaccttctttccacttcactggagtccagtattctgtaccacatcacgcaacgtgttatcttgtggtgtaaataaagactgcgttacttgccctccc

SEQ ID NO: 89058 - DNA, 330 bp, Homo Sapiens
ctgcataggagcccaacatcaccagcttaccacgtattggtcattctctttgaggagcagggccatactgacggcttacatgtgcgctctggtggaagtaggatgtttggtggcagcaggagcaaaatcaactctgccaggaagaccaacaaacaggtgtttgtcagctataaccttcagaacacagacagtaacttcgcattacttgtagaaaacaggatcaaggaagagatggaggctttccccgaaaagttctagctgagtggcagaagtgagaatttgtaaacttatgtacaatgtacgtgtaaataaatggattgaattctcaaa

SEQ ID NO: 89059 - DNA, 741 bp, Homo Sapiens
ggggtgggccgggagccgtggggcggcatggaggggctggttgtcgccgccggcggggacgtctccctgcacaacttcagcgcgaggctgtgggagcagctggtccacttccacgtcatgcggctgacggactcgctgttcctgtgggtgggggccacgccgcacctgcgcaacctcgccgtggccatgtgcagccgctacgactccatccccgtgtctacctccctccttggagacacttccgacacgacctctactggccttgcccagcgcctagccaggaagaccaacaaacaggtgtttgtcagctataaccttcagaacacagacagtaacttcgcattacttgtagaaaacaggatcaaggaagagatggaggctttccccgaaaagttctagctgagtggcagaagtgagaatttgtaaacttatgtacaatgtacgtgtaaataaatggattgaatttcagtttgtcatcaggccgcgctcccgttttgtttttaaggggttaatcttttgagcttccttctcagcagtgtgtgggccaaaaggctcatactgacccacctggtgaaggagaggcaaagtgggcagtatatacttcctcatttggctgtgagtgatagagggatgaaatgggatttttgttgggattgaagactgtaatctaagagtttcaatcagacatgactgtaacgtgcatcctcaattagaattaaagtgatatataaatatgaaaaa

SEQ ID NO: 89060 - DNA, 474 bp, Homo Sapiens
gaggctgctctgcatgaaaaccctaatggtttcttgtttgtttttcaaattatttagaaataagttctccggatgggctgttgtgataccacttaaaattctctagagaactactgaacacctaaagattttctgtagcgtagatatttccccagaggcacgcgaactgtcagtctttcctaaggcccccgggagacgcaggcaatggggcctcgcaggccaggcttgcaccagcatgtcttgagttagaggacttaaaattatccagtttcttctgtgtttctacttgaattgtggaaaagctctattatccaattaacttctccataattattgttgtaatattattattgtttgtaaaacatggttcacataactagcttgtggaaaccagcaggtaaaatgaattcttaagttgacgcttttggttctgttgtaaagcaaagatgaataaaaatttccaatgtcttcaaa

SEQ ID NO: 89061 - DNA, 718 bp, Homo Sapiens
taaaggcagagaaaattcaataccttcatttctcatagcttctcttaaacctcgagttgttggagatatgagagctgtgattaagtcacttccagctaatcctgctgctcggaacaggacagtaaactgataggtacaaacgtagaaataggggcaaagttttgtcttcagcaaattatatagagaagtaaagctcacagaccagtcactcattaaaacatgctgcagggttgcatcatttgaccaaggacttgtctttccagccatttttctatcagctccaatacgagggaacagtggtagccaagacaaagcagggtggagccaatagataaggctctgctggaaggtacaacggagctcagaggagagtttgggatcctgtatacttttaggcaaagtaacttctgttgccctacaatgctggacaagaccttgagcttcttcctgtgctttcaaatgatctgcccaggtaaagggttgagaagaggtgaaaaggagtcgcgttttaatactccagtccacaggtaactcagtactttttgaggacggaatatcaggctcggagaatgatacatgtgaagtctgaggtaattcagtaacagttgttctttcaggaaacttctcttcccatagcaaatcattttcttgattagaatctaaaaacgggaccggggcctccggctgctcggaggaaccccttcgcccgcctggacaa

SEQ ID NO: 89062 - DNA, 736 bp, Homo Sapiens
  misc_feature (132)..(132): n is a, c, g, or t
  misc_feature (193)..(193): n is a, c, g, or t
  misc_feature (199)..(199): n is a, c, g, or t
  misc_feature (473)..(499): n is a, c, g, or t
cagaaaatgagctcatgtgtgcaagcctccttccggaaatcataacagctatgtgtatatgaagtgtttactctgtggcaggtactctggaagcaccttttattcactgtctcatctgattctcatgacagncctgtcattatcccccaaccccccaccttcccatttcacagctgaggaagtcaaggtgcanaaaggntaaaggaactcataagtgaaggcactgcgatctgaactcaaacaatccagcctaaaaacccatggtctcagccaccatgccatgtttcctaaaaaaattacgctatgacagtggaccgtttttgcttaactccagagactttaattcacccacctagaaaacctgtcatgaaaacatagaggattttttcctgagagttcttaggaccgtgaaacagtgtcacaaatcctgttcagaaagctgggatcatgcagatgaccaggcagatggaagnnnnnnnnnnnnnnnnnnnnnnnnnnncctgggatcactgctttaagtttcaccgagctttaactttctggaagaggagaaatataacacagaccctacgcattgagaatagatggcgttggagttgtggattatctgtgcttgccaacagtgtacaggaaaaaaagcgatgcatttgacttccctgcttggcagagccactgcctctagagtattactcaaaaattgattttttaaaaataaaaataaatgaatttgaagacg

SEQ ID NO: 89063 - DNA, 238 bp, Homo Sapiens
aatggatctacactgttaactgagactctgttgagattcactggtttacttaaaaacttctcagggatgtctgtaaatttcagtgttatatgtcatgaaaactggtgtgggcagatctgttggttgaaataatttctactgtttcaaatactgaaggcaggaataattggtttatactgtgttttaaatagaagtattactggtaagtcccccaggacattaaaccttaaaaatcaaa

SEQ ID NO: 89064 - DNA, 478 bp, Homo Sapiens
tccatccacaggaagtcatgcatcttcagagattgaaaatgtcagggaagtccagcgggcaggaattctcttcttccgaatcatgctgctcgagctacaggaaagcatccaactactcaattccatggaatttgtgtcactgttgctctatgaccatactcttgtaacagagccaaattctcctcaagacagcaaatctatggagttggaagccaacgtgaaactagtgcgtgacatcctgaaggcggttatcttgttctttcatccagagttggaattttcaagtgactttggaagttgggataagtgtaaattttatgttaacaaatatttagtcaacaatatttgtgcctttgatccaactgccaagcatgtggaagttaatgtacagcttattgatgaatatatcagaggtaaatttccacttaattacagcctaaatctatgccaacagcaataaaacccagttgtgattttt

SEQ ID NO: 89065 - DNA, 588 bp, Homo Sapiens
accttaagtggtctggagaaaaaacttgttttagaggactgcaaaattgagtttccaacaatgtaaacagtgacttcataaaataggcagttttagtctttaaataaaccattcttttgttttcctttctgtatcataataagagttaaaattatggctttgcagtttctattgtactgggagtcgattggtcccttgagttaacctggcattcaggtcaggaattgccagtacttttgtttcctcatcttcagaatagcttctggtagatactaagatttgttacagtaaagatatttgaaatacttattacttagactccagggagcccatcctattcaagccttggtcttagaaggaaaaggttgagaaagagttgaagaagtccctctttatcagtggacttctttgtgtattgataaagatgaccactgcccaggtggagcaaaaagtgatctcctgagcagggtaggagaatggctttgacccagagctccacctcagaccatgtaaggtcagctcgtagagtattcagttgaataaatgtttgctgaacacttattatatgctatatataggacccttcag

SEQ ID NO: 89066 - DNA, 531 bp, Homo Sapiens
cagaatatacattcttctcattgccacaaggcacttactctaaaattgatcacataattggaagtggaacactccttagcagatgcaaaagaactaaaatcataacaaagtgtctttcagatcgtggcacaatgaaattagaaatcaagattaagaaattaactcaaaaccacacaactattatatatagtaattcaacaaccttctcctgaatggctcttgagtaaaaaatgaaattaaggcacaaatcaagaagttctttgaagctaatgagatcaaagagacaccataccagaatctctgggatgcacttaaggcagtgttaagaggaaattttataacattaaatgcccacatcaaaaatctagaaagacctcaagttagcaacctaatatcacaaaaaaagaactagagaacctacagcaaacgaaccccaaagctagcagaatacaagaaatagccaagatcagaggtgaactgaaggaaaaagagacaaaactatattcaaaagatcaatgaatccaggagttg

SEQ ID NO: 89067 - DNA, 674 bp, Homo Sapiens
ccaggggtgctcttgggcatccctacgaccccaaaaaagtacgatgtgtgaagcatgggcgtcgtgctttactcatgggtcaccgggtgcatgccttttgacgactcggacatcccgggcctgcccgggcgccagaaaccggcggtgctctatcccgaaggcctcgagctgtccgagcgctgcaaggccctgatcccgaagctgctgcagttcagcccgtccgccaggccctccgcgggccaggtagcgcgcaactgctggctgcgcgccggggactccggctaaaaaccgggtggttccagccattcctgcagccaagggcactgggccagggcggcgcacgcgcaaaaggcgcgcttcgaaggaatatgcgaagctgccgcgtgctgctgcacatgcgctttttcccttccgcttccctccctttcttcccacgggggagtccgcagttgcccttgttcggaatccacgttccccgcgatcccgggagctggaggggcatgagcatccgcgattccctgcgaccaggccccgagagggcgagaccagaggggacggaagcattgcgcctgcgcggaactctcagcctctgcgcggagggcgtcccttcccaaccagccgtgggtgccaggttcccggttggaacctgcaataaactcgctgttcctcgcaaa

SEQ ID NO: 89068 - DNA, 346 bp, Homo Sapiens
gcaggagcctgtgcccatatggtcatccaaatggactggccagcgtaaatgaccccactgcagcagaaaacaaacacacgaggagcatgcagcgaattcagaaagaggtctttcagaaggaaaccgaaactgacttgctcacctggaacacctgatggtgaaaccaaacaaatacaaaatccttctccagaccccagaactagaaaccccgggccatcccactagcagctttggcctccatattgctctcatttcaagcagatctgcttttctgcatgtttgtctgtgtgtctgcgttgtgtgtgattttcatggaaaaataaaatgcaaatgcactcatcacaaa

SEQ ID NO: 89069 - DNA, 538 bp, Homo Sapiens
cctctccagggtacacatatttcctgctactgaatggcttagactgggatttgcaaggaactacgaagtccaagacctttgcctttcttttagaagaaggcaccagctggttctccaatgttgaaggtcttctccagagataccttaaggtgtggggagattacaacttgctcaaggtctcatagctagaagatgtcagagtgataactcaaaccatgtcacatgactctaagcccaaagcagcctctagaaggttgtttgatcttctgatggaagcacaaatcaccattccaacatgaaagatggagaaacttaagtctagagagatttaaaggacttgtcaaaggcaatgaaacaagtggaactctgaaagccacatgttgagatggccccattacaggatggagagcacctgaacccccaagttatggactagaagaagacagttgccctggaaaatcatctgacccacattggactttatgtgagggggaaataaacctttattatgttaagctacacaataataaataacaaa

SEQ ID NO: 89070 - DNA, 353 bp, Homo Sapiens
  misc_feature (73)..(88): n is a, c, g, or t
gccaccattactttcagggcccctattgctttaaatgcataatataacctgctgccagaacccgatgtgtttnnnnnnnnnnnnnnnncccccttctttttatagcccttaaagccaacttttctgttttaaccaatttggtttttattttgcattgccccccctctggttatttaaaaaccacacccccttgggagtaatgtttcagggcaaggagggattacagcttgatggttgggggttttaattttaaaagttttttattcccgatcaaaaaaaggagttaaaaccactggaacagcctttttttaaaaaccttgttaaaaaataaaagggcccccaatttaaatcgg

SEQ ID NO: 89071 - DNA, 537 bp, Homo Sapiens
ttttaactataacacagtatcatgtacatttggttaagcataaattaaaaacataccacatgcaaagcactacaccattttctcaggctatagatttaaaggtgtgtcaaacacaacagattgggtccttctgtggggagaatggtagaaaacaggattgaaggagcaaaattaaaaccaaggagtcctcattgttggataatagggaacctgggcaccaatgggatgtaattaattcaactctgcatccaaagtttaaagaaaaagacctatgtctagcaaatgaggtctggttaatacaccgtgagggcaaccacattctcctggcatgcttgaacccaccactcagtatactgcactgactaaaactcaccatgccttactcagtgtggtatatttgctctgtaaaagagaactttaagcactaactctgccagggactcaatgagtgttgggtcctttagcagatttatttaaccccaacagcctgtgagataataaacacctccattttacagatttaaaaagccaagtcac

SEQ ID NO: 89072 - DNA, 449 bp, Homo Sapiens
caggtggctgcaccctgcgagcaaggtgctcgaagccccgagaacgcaggacgccgctcgggcagcgagacggccgggaagcacgagaggccggggagcggcggcggcggccctccttacctttccagatgcccagagagagctgggacgtgtccaagtccaccacatagtcccccaagaaccggttcaacacgtccacgaccaccgactcgaaaaccatgttcctcagccgtggtgggcacggcagccggcccgtgcgctcctcctcccgccgccttccccacgcccctccctcgagagtaacacgcttccctgcagataagagttggagtcagccggtctggaaactgctgaacaccctccaagaaatactgggagtgctggacccttgacccctatgcctccaccgaaccactgacctaaaataaattacaattacagatctttcg

SEQ ID NO: 89073 - DNA, 812 bp, Homo Sapiens
gcgccgagcccggctcctctttcctgtcggccccgcctcctccccatcgcctggcaacgggacaccggtctggagctaccggattttttccgaccccgccccctcctgcagatcagcgtccccagcggccccccagggcggggcggttacgcccgacgggaacgcccctccccctagaaggtggtggccgcttccacgcgtatgacagggctcgcccctgagtaagggtgggcggatcccagccccgtcgccagaagcttcaagggggctgtcccagggagcatctcccctcatcattacagggtgggagggtccagccagcctgggtgtcttggtgcctgtaacctccccgcctggtcctccgaccgcctggctctcaggaggagttaacttcctgctgcgagtcgaggatggagttacatagtccctgccctgcatctgagatgagcacccatttttggtcaagtcatttatacggagctgtctttcattccaaagagtaacacgcttccctgcagataagagttagagtcagccggtctggaaactgctgaacaccctccaagaaatactgggagtgctggacccttgacccctatgcctccaccgaaccactgacctaaaataaattacaattacagatctttcgacctgtttggtcttacttagaagtaatcccaaaggcctgaggtcacagagatgctaaatgtgaggtttagagaactgtaattaatcatctgcaggaccgaaaaagtgtacattgagcgttttctctttacacgttaaatgaataatgatggatttctattaaa

SEQ ID NO: 89074 - DNA, 573 bp, Homo Sapiens
caggttattgacattacatgtttgaaaattccctttggtctttagggaaaataaacaggaagccaagatttggagcctttgtaataaggacttcctgcagaaagtcttttctttactataattgagtaattcatatttaaagtcacatgtccagtagcatttctaattttgagcattcaccttgctacctttaaaaaacatctgagttttaagtggcctttttatcatcatacacatgtgcatacaaagaagggacttggcagtttaaaagccacatatattcacttttattgccctaaatttacatgaaacagacatactggcaaactcacatattgctggtgctaaccttatatttcatagtgttggcatattccccttttcttagattcttactccgaaatataggtacacatcctttgctctgtgcagagggaattacatcctttttcctctcctacaaaaacatgctttattaagtatccatcattactttcctttatgctcgctcaatatgcaatgtgctgttattctaccatgtaccttaaataaaggatgatggcaaagttaaaa

SEQ ID NO: 89075 - DNA, 466 bp, Homo Sapiens
tcgggtcccctgcagtgggcacaaggacacagtgggtccacaggccctgtcatcatcacaacgcctgacaggcactctactactcatcttccattccatttcatctcagtgactactaactgaggtctgctaaggtccaggcccagggatacagagaccaccaggccctgtcatcaggcttctccctgtgcaggtggagcttttctctaacagcacaaacagcagagacattgacagattccttgcattcaaatcctggctccaccactcaccagccgtgtgacccttcacttctctgagcagtgtgcttatttgcaaactggggatcatcatggtgctcatcgcttacaggattttaatgataatgaaatgaatccgtagttgtaaagtgtttagaataatatctggcacatagtgagggctctatatgtgtttgttaaataaaattaatactccatgcttcaga

SEQ ID NO: 89076 - DNA, 618 bp, Homo Sapiens
agactctgaccgtcgttctgggcaagatccaggggaaaggtttgggttccttcttcatagatatcgcccttcagaccaggactttattagatgatgagaacgacagtctgagatactcggcctttgttttgtttgggcaattggctgcctttgccgggaggaaatggaaaaaatttttcaccagtcaggttaagcagacacgagattccctcctgatccatttacaggacagaaatccccaggttgccaaggcttgcaaaacaacatttcaagcctgttctccatatctgaaactaaaggaggaatacagcttccagagtgaagaagatcaaaggaacactaagctctaccagcagctgagccactatcatccagagatcctgcagttcttctacgcaaataaaattctgtaagcgcagagcagcagggaaatggttctgtatgagtgcattgctgagccatcatgttcccctgttttatctcactggatgcctcttctcactgcttgcctcttgggattgtaatgggaaagagggtgctgggagagcaatcaaaggcaaaaataatacatggaattgtatgattttatctaaagtaaaattctagaatgctaaaaaa

SEQ ID NO: 89077 - DNA, 580 bp, Homo Sapiens
cagtgaggagggcaggaacacagggagaaatggtgggaatgcattcagggaagccaaaagcaaaagatagctggcagcatgccaggattcatgttgatgcaagccagcgtctactgagtgcttccgtatgtaccaggcgcccttctaggctcttggcctgcagtaactccagatctggcagctgcaccagggggtgggcattctgattaaccctgactttgcaggtgaagaaacaggctcaaaatagtgtagcgaagctttattataaagtcacacagctctgaaatgatggaaattgggactcaaacatgattgtctcacagcccagtgtcttaatatctgcctcaaagaacactgcccacagcatgcaggcttctttatgttgcaagaacagaaaaccccactggcttaagccacaatgcgcagctaattcaacacccagcaccccacttccaggctaatttctaccaagacctggcttgaatgacatcattttctttctcagaaactcttcatgagtcttgctttattgtttacccccggaaagaaaataaaccacaaaccaactatagtcaaaaaa

SEQ ID NO: 89078 - DNA, 915 bp, Homo Sapiens
tccgtgccctccacctgacttcttccgcccgtgccgcttgctgccaaccaagaacaatgtgcgctctgcctggtaccgagggcagagtcctgcaggggatggtagcccagagcctcctaccccccgctataacacatgggtcctgcaagatacagttctcgagtcccatttgcagctgctgtcaaccattctgagttcagcccagggcctgaaggatggcgtggcacttctgaaggtctggctgcggcagcgggagctggacaagggccagggtgggtttactgggttccttgtctccatgctggttgtcttccttgtgtctacacgcaagatccataccaccatgagtggctaccaggtcctgagaagtgtcttgcagtttctggccactacagacctgacagtcaacgggatcagtttatgtctcagctcagatccctctttgccggccctggctgacttccaccaggccttctccgttgtcttcctggattcctcaggccatctcaacctctgtgctgatgtcactgcctctacttaccaccaggtacagcatgaggcacggctgtctatgatgttgctggacagcagagctgacgacgggttccacctgctgttgatgactcccaaacccatgatccgggcttttgaccatgtcctgcagtgagtttaggggtgacaagtctccgtccactgagtcgcctgccagcagcgtgccaccggctgaagctctgggcagagctgcaggacaatggtgggaactatgtctcagctgctttggcccccttgaccaccctcctgaagcagggccttggggctcgctgaacttgctggctcactctaacccccatccccaatgtggattcccccaagatcccaaaaccaaaaaacttgggaccctaccctgggacccct

SEQ ID NO: 89079 - DNA, 411 bp, Homo Sapiens
agccacagaactcggccgagggttcagcggactgcggctgcgcggcgccggcgacagcgtcaactgcttttgtgtcaaaaggaaaccaacagccggctccatagctcagggggggagacgatggcactaccgcgccccttcccgccatgcgtttgtttgcggcgttccccgacgcgcgcgctgaggctctggtctgcggctctgcgcttggcggctgcgcgccctcggccttcgggtccccgccgcctccgtgctgcaaggtctgatttcttcctgtggagttaacacggaaaagcgcagacggccacattcatgacccgggagtaacggctctacctgtcacattcgctttcagcctaaaacaaaattttagtttattttagacaaaatatataactaaggtatgctggc

SEQ ID NO: 89080 - DNA, 1111 bp, Homo Sapiens
  misc_feature (919)..(930): n is a, c, g, or t
gatctgtgaattatctgttcaagtcgattacgacttgtcgataaatatttcgggggggcagttgtgtcggttttgtccgtgggtatcacgtactatcgtttattgctgaagtatgtatttatgctcgggacgcagttcgtgcatgagggactggggatggtgagtggaccaggtattgctcatttcgcatgagcttgactggtgatgtgggtcatgtgcggggttctgggcgataaatgtggataaaaggcgggggggatagggatgggcatcacccaggtttccaggtttggaaaacagactccaggaaggaccatttgcgccggaggtggccaaggttattcagtagggaggcatccaatttgaaaaatccaggctttctcacttccggggccttttctagttacataagttgagggtttggcagtaaatgaggagcccagctccgagatggttagtttggagcccaaacattagatcaccttgagcacatggggccagccttgagagtgcagagccctgggtctaggaatcctggctctacagcatgacttggtgatcctgtgcaagtcttttaacctctccacaccagggatgcgctggtccagcaggattccctatcagggagaggggacttagtaaaaccatctggagagcatgtctgcaaactacagtgggccagcctctgcccagagagcctgaagttgctcacttgcaaggaagaggtgcagagcattgcaatctgctaccacacctctcacacctggtgagaatcagttctgatctccaaggttctgacctctgagagtgacgttaagtccagagagccacaccactacaccctgagagaccttcagcaaaaggcccgtgagctcaaagaaattggggtcaggatgcttttaaagcaaaaaatgctttnnnnnnnnnnnncagatggtggttaggagaagatttgggggtaggtattgaaaaggaagaatgggactggtatgtaaacccagctgacaggacagggtcaggccaggcagagcctggaggaatcacgttttgtggctctggattgcctggtatctgtcgtgaggctgcacttgctacctcagacagtgatccc

SEQ ID NO: 89081 - DNA, 419 bp, Homo Sapiens
ttttattttatttacaatcaaaacttcatgtttaatagggattcatctgtttcccatactttttacatgttcagttcagacagaactcatggaagaaaagacttttctgtgagatagaacagaccatctgcttgaccggatggctctgagggacagccaaactcccaatggccaaagggctgtgaggaagggcaacacatatcagaagaattttcagcaagggctgaaacacagtaaggttagccacaaaatggaatgagagaagccctaacccaatgggagtttgcctaattttaatgaacccaaactctaacattgtactggaaaagcagcattaaaatccagcctgattatcacaatttacagaatttctcaccagaggcccacaggtgaaaaagctgcttactctaaagccctta

SEQ ID NO: 89082 - DNA, 368 bp, Homo Sapiens
ggattacaggagccatgctcaccccgaacgcttccaccagctgaggctgcatggtttcaacaagaggaatttgtttctcatagttctggaggctggaattccaagatcaagcagggcctatgaccatgtctgatgttcagggaatgaaggagtgaagaaagcaggaatgaacgaaggaaggaagcagctccagcaattggttcccaggcaagaagctggtggggttctgacttctatcccgattcacacccttttctcctgccctcagggcagtccttctcctgctcttgttcattcatccccttcagccctttcttattctcttctgtagccgaaccacaaaaaataaatacattagaaatgttaaa

SEQ ID NO: 89083 - DNA, 1199 bp, Homo Sapiens
aaccgtaggctaggtacgaggccggggtggtaatcggcacgaggcatggcggacgcagctactcaactaggcaagaggaagcgcgaattggacgtggaggaggcccacgccgccagcacagaggaaaaggaggcaggagttggaaatggtacctgtgctcctgtccgcttaccgttctccggcttcagactgcagaaggtgctgagggagtctgcgcgggacaaaatcattttcctacacgggaaggtgaatgaggcctctggggatggggatggagaggatgccgttgtgatcctggagaagacgccatttcaggtggaacaggtggctcagctcctgacgggcagccctgagctccaattgcagttctccaatgatatctacagcacctatcacttgttccctccaagacaactgaatgatgtaaagacgaccgtggtttaccctgccacagagaaacacctgcagaagtacctgcgccaggacctccccctgatccgagagacgggagatgactacaggaacattactttaccccacctggagtcccagagcctcagcatccagtgggtgtataacattctcgacaagaaggctgaagcggaccggattgttttcgagaacccagatccctctgatggttttgtcctcatccctgacctcaagtggaaccaacagcagctcgatgacttgtacttgatcgccatctgccatcgccggggcatcagatccctacgcgaccttactccggagcacttgccgctgctcaggaacatcctccaccaggggcaggaggccatcctgcagcgctaccggatgaagggagaccatctgcgagtatacctgcactacctgccctcctactaccacctgcatgtgcacttcaccgccctgggcttcgaggcccccggctcaggcgtggagcgggcccacctgctggctgaggtgatcgagaacttggagtgtgaccctaggcactaccagcagcgcacgctcaccttcgccctcagggctgacgaccccctgctcaagctcttgcaggaggctcagcaaagctgaattaactcaggcagaagagcacagatgtgtgggattgggggaggagtggggacaagattttttatctccaagtgaattttctaaaaatgtattttataccggcttattcctagtattgaataaactagcgggctcactca

SEQ ID NO: 89084 - DNA, 529 bp, Homo Sapiens
  misc_feature (505)..(505): n is a, c, g, or t
gcggccgctggtaagtcacaccaaaagcaatgatgagtcactgatggagtcccaagtaaaagatgaagggggttagttcagcactgggggcagaggggaggtgacatccaggggacagcaagaaggagacatagactacaagtctctggtgtctatccatcttctagaccttcaagccggcccacctacctcatgccaggccacctgtgcactgcagacccccaagctgccatgcccttcccaaccccaccttgcacctgtgctgatgccagctcttgactctacgttgggccccggtgctccctgggaagctggcacagggctcctggctctgcctatggggtctgggcctggactccctgtcaaagtctctggtgaatgccctggccaggtccctgcctatagaagccatggaggccaggacctagtggagactgaagaagagaaacctctctgctcctcatacttgtgtcagagaaggccctgcctcctaaacacgccctgngccaggagcctggagacctggctt

SEQ ID NO: 89085 - DNA, 471 bp, Homo Sapiens
  misc_feature (394)..(403): n is a, c, g, or t
cttctcgtgccaggccaggccccgccccctccccgggactgggcagaccccctccctcatgcatctgtgtccactgaggcttccctcacctagaatggcccatccttcaggacccagctcactctcatcttctttccagggacttatcccccaaggctgtcctctgttctggtgagctcagggctcttggaacttggtctgcagtgactctggggttcctggttaggacccatgttctctaggtcccagcaccctgcacggggcagtgtttgtgacactgggcccagctattctgagagaaggactccaaccttccatcaggtgtggcccgagatgtgggtggccctgggcatggggcatggatgcattgtgactttcatgggcctcttctgcnnnnnnnnnnttaaaattatactttatgactattggtagaaagataaatatattaatacattaaaatttctctttgaa

SEQ ID NO: 89086 - DNA, 544 bp, Homo Sapiens
caattttattaaattaatggttttttaacataaagatatacttgaaaagataacagacaccacccataatttccccacccaggggtgacagccgacagtcctgggcagctgcttttccatctcatatgtcttatttgtgtgcagtgactgctttccagagcacgctctccagcgcccaggggtccgtgtcctgacagcagtagccgggcctttctctgcactgagtggcatctccctcctaaagatactttgcttcagaatttcatcctttcacttttgaagttcctctgggccagtgtagatactttgtttcagaatttcttcttttcattgtgtaactccttctgggccagcatagcttcgctggatgagctgggctctgcaggtgaagcctccctgttaagtttctgcttttcctgactttctcagaggacagaggggtgaggcggggcagctcatgaataattttttatgttgaagacttgtcgaaataatattttggttatgttgggttaaataaaatataaagttagtctgtaaaaaa

SEQ ID NO: 89087 - DNA, 582 bp, Homo Sapiens
ggggactcggccgccatgttaggagtactgggacgattccgcggagccgggcagaggttttaggggtgcgcaggagtcaagtggtggttcagtggggacggaatgattaacaaaggcgtccgaagaaatcgttgttggaaggtgaccaaggtggaaagagacgttgctttggccctgcaagtaagaagagagagggaatagcctgaaggagtaacactaaatttaaaatgacacttttttaccaaccagcgaaagcagatgttcaaaggggatattggccagagtctgtcacactaagatgagaaatgtcctttcttcctgaaggtgtctgatgtgtaaaaatatgatatactttgtgctgtttcctcccttcccttttgcatattattctgaaacaacattaactagttactttgcgtcattgaaggtatgcacttcccctctatgttaggagtgaataaaattaaaaatagatccttataacaaagaaaggcagatagaatgattaaaaatgaccaaaacatgttagaaacagtctctcaggtgtatgcagatggtaattacaaaaatactttttcaaaa

SEQ ID NO: 89088 - DNA, 420 bp, Homo Sapiens
caatatgccccatttcgctaacctccactgagccccaagctctgaagatcaaagtcaaagcacgaaatgaacgtgagagagctggaaagctaactacaaagcctctaaaagttacgtaacatgaagaaacacactcgattctgcctctcccattgaatagagcaataaaacatggacacaacacacaaagcagctatttgaggactctgagaaggaaatggcagcacacagattgggggagaagaccagaatttgaaatgctgctgaaccacagtagagtgatacaagatgtgaccgttgaagaatgctgggtgaaaggcgactgccttcatggaacccgtatggactccgtgtatattttttgggtaatttcctatgactcagtaattatttcaaaataaaaatgtttaaaaagtgaaa

SEQ ID NO: 89089 - DNA, 654 bp, Homo Sapiens
taagagattctgaacaccctcgctgtcaatacctgactgcctctgttaaatttgcactgttacattttggttcagtttatttccatgttgaattagagtggattaagttaattttattttgtcagtgttactgttttttacgaattttttaatgcttcagactgtctgattcagtgaactttttgtagtgaaaaagccatgaagccagtagacaagacagatattctgtatgctggaggggatacaggatgattttgaaaaggtacaaagtcctcagtgggcttagaaaattcactgtatgatccttatattatcctacttggcttgcacgtcttcgggtgcatgtatataccgctactgtgtcctcgccatcacctaaatgtgactcagtctgttccactgtaatatgttgtgaatttccttgtactgtacttttattgttggtcttcttgcatcgatgatccaacagcaacaccatttttaaattattgtgaaaagattaactggcaatgtacagagtttactcaaagttttcttaagggaaaacactacaaaaagtcacaaggataccaaatggaaacacatgatgatgcctctgggtctgtatgagaccgtgatgaagtagaaataaagcccttctgagatggcaaaaaa

SEQ ID NO: 89090 - DNA, 455 bp, Homo Sapiens
gcagtaaaaaaaagtaaacagaagaacgaatgtgacaatagacaagggggagacaagtatctctctcattgtgaaaacttttacaggcataacttgttccactttggaaggccagcgatgtctgtgtttaaagtttactttactgtttgtcttgagtgggatcagtgttgtagtgaataatttatagccagcatgaatgagctcattagtcaccttttcagactttaaatgagttttgtggttgtcattactcgagccttctgttcagccgcggagcaaaatgacagtttggcagttgttgctggggccgcctgttccccttcaggtctgtgttggcttttgtatttcgttgaatccttccctggctaacccttcgctggtccaggcagcaactctcccacttcacatgccttttgcaccccaagtttaaatgagaagtttttaaagcttcaaaa

SEQ ID NO: 89091 - DNA, 431 bp, Homo Sapiens
ttccccaactgtgagaataccctgccccacacctggatatctctgtgtcgccaagcccatccccactgcacagggaccgaatctctgcctcccgctctgcagccaggtgctccaaggcagccaggacgtggcctggggggtggtttgtcagcagcgtctagggggagggagggtgaagtcagggcaggatcggggcagggctgtgagctgagaccccatgggaatagggctgtcatcaagagttaggtcctggcaccctaagttttgatcaaggagcgggagggtgtggctttcctgagagccctgccctctcacctccactgagctcagccactgctggtacgaagtgccaaagtggtcatcatgaggggttctgtggggttgggtaagcggacagagaacgttacaagacacgtcaattatcctctaaa

SEQ ID NO: 89092 - DNA, 535 bp, Homo Sapiens
ttttaaaaattcaatactttaatatgatcactaaacaacaaagtggaagtactcattgtttggtatcaacaactattaccaaagacaataaaataaagcctttagccttgataacaactagtaaacttaaatgtacttttgtttttacaacgcttaattttcctaagaaaataaaattaaagacaatatatttggcattcactaaaaacagcaatcaatgcaaaaacatttttaaaacaatgactaaacatattagggctccagctctgataagcacatagtcaacagatttctaaactgttaactatgttaccccattacaactcatcaatatatgatctaagatttgaataaaattagaaatctcagcctcttatatcagtaactgcccattatcctcctgtggtgatggggtcctggcaaggggtgagactgtccataatgggaagacagagaatcccctatgacgttccagcttcctatgtggggagacagctacaccatgagacaggaagagcaaaaaggtttttccttc

SEQ ID NO: 89093 - DNA, 341 bp, Homo Sapiens
accctgtggccgtgggcctcgatgagggccacagagttaccaaaaatgggagcaagcctggcccagccaccgccaaagtgggcaactgaccaagcacaccaagttcatgtgggacattattccaaagatgtatggctttactccctacgagctggcgcgccatggagttgctcaaggtttccaaggacaaacggccctcaggttcatcaagaagagagtgggggacacgtccgcaccaagatgaagagagaagagctaagcaacgccctgcccgccatgaagaaagtggccacaaagaaggactgaggccccataccctatccataaaaccttcacagaaa

SEQ ID NO: 89094 - DNA, 517 bp, Homo Sapiens
atagtgcttgcttatgaatttgaaagtagagcaacaagttcgaatgaggtagcgttaggcaataggccccttggtttcattccaaagagtctatcaaaagcaagttatcttccagttctgggccagaccaagtagaggtcaaaagtccaaggccttatttgggttctgtattgggttttcagccaagaataaaaagctggccctttatgggcctcagaggcaatagccttttctatctgttcaccctatattcattctcagggcttagcacatcagcaagtttctaataagagctcagtaaatacatgctgaataaaataaatgctgaaaatgcttttatttaactgtagaatacgttatctagatttttaaaaattctgttataatagcttgtctaatccagtgtcttcaaagcagaaactttgaggcaaatcacaagactggatgcccaatgccaacattttaatggggagctcaataaagttctcaaaactcatcacctgagcaacagaaaaaa

SEQ ID NO: 89095 - DNA, 482 bp, Homo Sapiens
ggggctcttggctttaacgaatttactgtatctaaaagacatcttagtacaggaagaaaactaaatctgtagcatgtaaggagcagttttatttgattggtatattcaggtttctaaccagctgaaaaattcaaatacatgccctttaaggattaagtttaaaccacactacagaaagaagagaaaagatttatatgatcacatataagcaatggaatcagcaatatgagcacttttcacaactatacaaatcaaatttaataatctccagaacattaaggaagttcagcccttaatggaaatgaatgaaaagaaattattcacccactgttacatgccctggaaagagaatgccctgcaagactcaaaagagtaccacaatattactcagattttcagcaatgaaggccctccaaggatctaatgatactcatattttcagcttatttccttcactgataaacattgttaataaataaaaa

SEQ ID NO: 89096 - DNA, 514 bp, Homo Sapiens
ttttgagtgtctaagtgggtggcggcgctgtttattgagctggttgatgtaatggtattactttttcctaaagtctgagttactcaggactaataaaacagtaatcaaattccaattggcatttgatcttccaactgtagcacaatatttaaatcacgaaatacaacatgtagcaagtgttccttctgcttttggattatataaggtcaagagtaagaacctgtaatagtgagctgtacccacacttatcttctccaaggaccaatgttcattactacaaacacatctcagcttcatattaaggaatacaattatttctcttgttggcctttcttggctatagagattcaaggtaaacatctaaaatgacagctttttctgctgccttaagacagatgacctttgtgtttatgtgttttcccccataattctctcagtaagctgcaaggcaggatgagagtttattttccttattttcaagcatttcctaatattacaatcatacttgaaaagg

SEQ ID NO: 89097 - DNA, 715 bp, Homo Sapiens
  misc_feature (516)..(516): n is a, c, g, or t
  misc_feature (561)..(561): n is a, c, g, or t
  misc_feature (617)..(617): n is a, c, g, or t
gaacttgcggcggaggctgtctagggcctccagctggctctgccggccgatgttgggcttgtacaccgtgaagaactggccgcggttctgctccgccagcaggcagctgggcttgttaccgcggacctgcggaggggggcgttgaggccgcgccccggtccgccccccgcgggccctcctctgggggggtaaccccgcccgaccccaccttgtaggagaggtagaagccgtcataggggcccgtcagcgccagagacttggcaaaggcgtcctcccacttcaggccgcggtccacgctgatcttgtagaagaccacctgcccgtcctgcgggtgcccgggagccaggaacacctgctggctctcctcgtagatctcctcgataccgggagcaaggtccaggatgcccatgtcgtatttgccctcccgcttgtccatctcgatgaggtggtcgaaggtgtctgagaagtactggaacagggcgttctgcttgtgcacctccagccccaggatgcggntcaggaacttggtgatggaacagtccttctccacgtccaggcagncattccgggactctaggccaccaatgcccacagacagcaggccctgcttcatgtcnctggagaaaggtgggaccccttccaggtatcacctgggcacaggcactttgttctcagtctgcctcatgcatggcgggaggacacagtgcagatcccg

SEQ ID NO: 89098 - DNA, 1191 bp, Homo Sapiens
  misc_feature (550)..(614): n is a, c, g, or t
  misc_feature (712)..(712): n is a, c, g, or t
  misc_feature (987)..(987): n is a, c, g, or t
  misc_feature (1123)..(1123): n is a, c, g, or t
  misc_feature (1164)..(1164): n is a, c, g, or t
ggcaatacgacatggtgcatctggaccttgctcccggtatcgaggagatctacgaggagagccagcaggtgttcctggctcccgggcacccgcaggacgggcaggtggtcttctacaagatcagcgtggaccgcggctgaagtgggaggacgcctttgccaagtcgctggcgctgacgggacccctatgacggacttctacctctcctacaacgtccgcggtaacaagcccagctgcctgctggcggagcacaaccgcggccagttcttcacggtgtacaagcccaacatcggccggcagagccagctggaggccctggacagcctccgccagcaagttccaccgggtcaccgcacgaggaggccaaggagccccccgagagtggctaacgctttgtcgctgaccgcactgcagccacaacgcctggaaccggcaatgccggctggcgcatgacggccaggattgactgtacgggccgcggctgcgagaccaatacatgctgcggggtgcgctgatgcccgcgcggcgccccctcgacgccggcattgannnnnnnnnnnnnnnnnnnnnnnnnnnnnnnnnnnnnnnnnnnnnnnnnnnnnnnnnnnnnnnnncggaggagttagagcgtcggcaggcggggagaggcgaggggggtaggtagagcgggccgcggccgcgttagtggcgcgcggcttgggggaagatgctngggagcggccgggcggaaatagggaaggagcgcgagagggaggcgctagggtggataagatagattgcattgacgagggagcgaagcaagaggagctgtagagatataagcttgactgtgcccccccggagccccaacggagctgtcccgccctgacgaagaaaagaaatatcctcagtatcccccgacaaccccgcccggctcccattaaaaatcgcgcgaaacacgcatagcacctccccccccgctaatttcaccgcgcccgcatttgagancaacgctgcgcatttcatcataacaagaacttatatgcacgtgtagccgctgtgacaagacaaccaaacccctcctgtacacaacccacagaggagacagataatagccaccacaacactgccgtctcagaacganaatgctaaacgcccgcccgaggaatgtacaaccaacgaccnatagttgtcatgcgacgcactgaccct

SEQ ID NO: 89099 - DNA, 349 bp, Homo Sapiens
gttctagttgagagcctaagtgaagagccacttccttctttgcgtcgaggccggaaaagacactgcaagaccaagcacttagaacaaaatggctcccttaaaaaactgcgacaaaccagtggggaggtgggtctggccccaacagacccagtcctgcgagagatggagcagaagcttcagcaagaggaagaagaccgacagttggctctgcagttgcagcgcatgttcgacaatgagaggcggactgtgagccggcgaaaaggaagtgtggatcagtatctcctacggtccagcaacatggccggggccaagtagcacctaatgaagtgttacctatttttaaaaaaaa

SEQ ID NO: 89100 - DNA, 471 bp, Homo Sapiens
ctatacaatatctctgttaaaatgctgagaagatttatcctaaaagaaggcaccaaagcaatggggttcatcaactcaggatccagtagtgtaatacagaagcctgttacgagatataagcaattgtaatgaacagcataactatttgtgtgactacacttggtataattctattaagcatggagattgcaacttttgcattaaatgcaaccacatacaattggtcaaacgcacttcgccctcggaaatctcactgtcggaatccttggaaatcacaccacgcacaacttctatttcttcataatttgcaaagaaccagtgtgactccagtcaagaacaaaagattaattgtgaattagcgaagaactctaattttttcaagcagccacatggaaaacgcattctaatgaaatcctttccattgctcttttttcttagttcttcaataaagcatgcgatttgatcacaaaa

SEQ ID NO: 89101 - DNA, 741 bp, Homo Sapiens
aggaagcgcccaccgggctcccggggctgccaggccccaaattgaggaagttgactgccagatcacactctgttggcccacgcagatagattccattcatcctttctaatgtctacaccatattttggataacatgccatcatctcacattgtgttgaaagaagaaaccagaatgttggggttgatgtatgccatatggatgaatttaaacagtttcggccttgcaataattggtatacttctaattgcatgtgaaattatactctttttaacgaaagatgaaactattcagtggccacatgtacccagtaacagagggagcaaagcaaatcttatcctcaaagaactgcagctgcttgttagatctacctggtggttccatagagaaactgctcagagaacctgcctttacctcgcctaaaacagaactatcccggagctcagttcatcaactcaggatccagtagtgtaatacagaagcctgttacgagatataaggcactttgccctcggaaatctcactgtcggaatccttggaaatcacaccacgcacaacttctatttcttcataatttgcaaagaaccagtgtgactccagtcaagaacaaaagattaattgtgaattagcgaagaactctaattttttcaagcagccacatggaaaacgcattctaatgaaatcctttccattgctcttttttcttagttcttcaataaagcatgcgatttgatcacaaaaaa

SEQ ID NO: 89102 - DNA, 528 bp, Homo Sapiens
ctggcccattacaccaagcgcgtgaccatcacctcccgggacatccagatggccgtgcgactgctgctgccggggaagatgggcaagctcgccgaggcccagggcacgaatgccgccctcagaacttcattatgtgcgatatggcaacagagaaagtgaatatgctgatacaagaagcaagattattagaaaaatattacagaaatagctgaagagaaatgttatgaaaatagttgaagttgtgcttattgcacgaggagaccaagaaaaaccccccaaaatcagctgcaagtaaatccttttggatggtgccaccaaatgttcctacaagtccggaacaacccttgccaaaccaaagacacttgccagaaccctgctccttcccagagacagagctgtatacctgatccaaaacaccacatctcactcagtgacttatttctcattatgctaattgttttgctgtaaaatgccaatgtttctgtgaattaagacatacgaataaatttcccaagttacccttgcaaa

SEQ ID NO: 89103 - DNA, 748 bp, Homo Sapiens
atatccacaccattctcctcttcccattgggcaggaatttcttttccctaatggtcttccaaagatattataatactctgaaaagaaaataatgtgttggattattgatccttgaggtcctcttctgtagagtacaggcagtaatcaacttttcttctgtcagaagtctttatcccagcctgatagctcatctggaggcattcccttttcaggaggatatttgtcaaagtagctgtgatctatgggtcccttgagctctctttgcaaaggtgatggaaggctccgtgctttcagtccctcccaattaaaaccatttaaccacctgtgtttcttaatgtcatttattccattcttcagatttcccagcctttctgttggattttgcctgcaaagcctccgaatcaaatcctcaggtcgtcgtgttatcttcctgggaaaatccattttttcaattcctttgagaatcaaattgtaggtcatcatttggtcaaccccagaaaagggtgggttgcccgttaggagctcatacactagaattcccagtgaacagaaatccacactgaagtcatggcccttgttgagaatgacttcaggagctacatatttcgggagtcccacagaatggccatgtttttctggccagaaccctattttcttcgcaaatccaaagttcaacaatttaagggtaaacctcaggcatctaggaattaagttttcctggtttgcaggtctccggtagataatacct

SEQ ID NO: 89104 - DNA, 568 bp, Homo Sapiens
ctagaaagtaagaactggtgtagcaatgatgcttcatattctagctgtagccacagagttgagggtagtttttgtaggtctaaaataataatctataaagatgtccaaagttaaattttcaacaatacaaatctagagaagtgacagcctacattacttcattattactcttcttttagtctttagtctttaatattttaaagtttactctataaatcagcattttgtaatcctttataaactcatccagatttaaatgctactttttcatgaagaaaggataactttatagacagtcagtgcaacacacacattttatctcatcaccgtcttactgcctccccatccactgtctcataaagccctcagctgaactaagataaataatacaatggaaattattttcagttccccttgcactgtcaaagtaaaacaagaaaactgaaaagctgcacccccagcaagaaagggaagtatgctgttgtatgcatcattactcaacaattaccctctaactaaacatcctgtttaagagtttaattcaaacaacagccagactgttaagaaa

SEQ ID NO: 89105 - DNA, 590 bp, Homo Sapiens
tttacagctttaaaaatttttatgttttatagggaatttaattgggagtaacagcagtaatagttaacggagccagaatgcttgagtcatataattgcaaagcagagttgggagcaacagatgctaaagagtagttgctgtagttcctctttgggtcgtaggagcagttgtcatattactatatagctactgaatgaagaagagttcttagtgaggcctgggtgaacagctcttcttagtattctgtgtgaccccatttgaccttttaacaaatccctaagtaaataaatagcccctaaggaaaactaagtttttctctgctgtttttttgcttgagagagctataactgtaatagacttatatttctgaacattttagtgcttgccaatatttggtaatatttatgtttcctatatttgtaatgaacattcttcttccggtacattttttgttaaattattgtttcatgcataaaagttcaccttttattgtataaaattgactgagattaatttatacacattgacaatgggtaaatagaatttttcagattattaaaagctgaaggatgcccacgtaagcaaaaaaa

SEQ ID NO: 89106 - DNA, 611 bp, Homo Sapiens
agaacctgtcggccgccgagttctgcagctcgatggcattgcgaggccgaaagcagaatttccaggacctctgagagttgaagtcgttattcggggggaggggattctgtgagcaaaatgtgctgctgttagcattcacggtcacctggtgatgaagagtgctggggatttggccacagtaatggccctaacccagaaccctctttgtcctggagcaacatagcagctctagtggcagtggcgtcaaacatcagattggctcatattctagccgataccctcttagtgtgtgccagtcttagtgttgactgatacaccctaagtgggactgtggttgctcatgaggagggaaaccgaggccaggtgataggggtggaaggaaacacgctttccctctaaatgctttgggacctgtgaatatcataccatgtgcatttcttattcactctttaaaatcaaatgtttttaatatcacttcttcaagaaagtgttcactgactcccccgagagtaaataagatagattaggtttcccgtcacgattccattgcagtctgtacttttaccgcgagagctcttcgcagaattatgaataaacagtaatgagtgtgc

SEQ ID NO: 89107 - DNA, 671 bp, Homo Sapiens
  misc_feature (109)..(109): n is a, c, g, or t
  misc_feature (123)..(123): n is a, c, g, or t
tcccagatggcatcacaatggggcttcctggtatctctcagcaagggaatgcaagactttaattatctccataccaactgctttgagatcacgctggaactgagtgcgnacaagtttcccccngaagaggagttacagcggaagtggctgggtaatcgggaacccctaatccagttcctggaacaggttcaccagggcatcaagggaatggtgcttgatgagaattacaataatctcgccaatgctgtcatttctgtcagtgggattaaccatgatgtcacttaaggtgaccatggtgattacttccggctgctgcttccaggtatctacactgttagtgccacagcacctgggtatgacccagagacagtaactgtgaccgtgggtcctgcggaaccaacgttggttaacttcaacctcaaaagaagcatccctcaagtaagccctgtgaggagagctcccagcagaaggcacggagtcagagccaaagtgcagccccaagccagaaagaaagaaatggagatgaggcagctgcagagaggccctgcctgaaacccacagtgccaggcaacccttcagaaaggctttgctcctgctctcagatcagatcaagcattctttctattttattatctgggacatatttaaatacaaacatattcagaacaaaa

SEQ ID NO: 89108 - DNA, 385 bp, Homo Sapiens
tccgggcaccctcaacccagcgccctgcggcaaggcctggaacagcctggtggttttggtgcgctccctttgccctccccgcaaccctttgcgagcacttgttccaggaaaaagaccctggttagggtggaggttgcctcccccaaagggcgctgttggtggggcctcccctcccccattttcttgtttttttggttttaagactcgggagtggaggcggcaggcgcctccgcaaccgataaagcagctattgtgaccttcccttgcaaaacgggaacccaaccaagtgtgtaccgccggcggtggcgggggaggaggcgactgtgtgtgcaaacctcagtcggaaagggggtggcgctgggaaataaaggtttgcaacctcaaa

SEQ ID NO: 89109 - DNA, 349 bp, Homo Sapiens
cacaacaggcaaaacaggaaaaccagaccagcagagaggagagagaccagcaatcagaccctcccagagacaatcattgttaacatattgtgtccataagccaaggaatgcaggcagcctttggaagctgtgaaaggcagggaaatggattctctccagaagcctccagaaggctagcccaggcttgtttgcatgttggtggaaaggagcaacaagaatagtgagacctcttaagtcctaggcttcgaactgacacgttgtcacatccgccacttctacggatcaacaaaaatcacaaggtcaaaaatgacccaagggcttagaaaataaacttaatctataatgaaaa

SEQ ID NO: 89110 - DNA, 678 bp, Homo Sapiens
  misc_feature (30)..(30): n is a, c, g, or t
ctatagggaatttggccctcgaggccaagnaattcggcacgaggcggcacgagggacgcgcactgtatagctgcataagctgctcgtagggcacgtccagcatctggtccaggcccacaccgcgaaaaaaaggtttaccacagtggctcaaggaaaacggaaccagagtaagacagtttctacttggacttggggaaccagcaaactcattcacttacaatcaagaacaaaccgattaaattgaataaaggtcactcaaaggagccaagcccctttgtcaaatcaggagctccatcagccaatcaggaacccagatgccagcgtgggagtttgtcagtggaaataacattgcatgacttccaagtctggtttcttcatttgcaagatatcaacccaataggattgtgactgaaatcaaatgaggcacccaagtctaatatgagaaaaacatgagaaaaattccaggagggggacattctacaaaatacctgaccagtacatctcaaaattgtcacgatcatcaacaaggaaagattgagatactgtcatagccaagagacgccaaaggaaaaatgacaactaaatgtaatgtggtatcctggataagatcctggaatggaatagaaaatgggcattgggtagaaactgaataaagtagagactttagttaataacaaa

SEQ ID NO: 89111 - DNA, 1030 bp, Homo Sapiens
  misc_feature (63)..(63): n is a, c, g, or t
  misc_feature (958)..(958): n is a, c, g, or t
  misc_feature (984)..(984): n is a, c, g, or t
tgcgagagagggagacaccggaggagcaggtgggaagatgaagccggccagagcccctctgcncagcatgccctgtgatcgcctggcccagcaggagctgcttcagccgagagggactattacccaagagaggtatcctcagcccctcctgccccaggtcgggagacagcagctttggagacacaaaagagacagagcctcagccagggagagtgagtcccccagaagaggctgggtggttgcacaggccaggtgcacaggttggaaatgcactgaactctgggtgccgagagatgtaaggctttgagacatgctactgaatttggagggcaggcacgaagaacagtgagattgtcaaaaggagacaaccacagatcctacaggactgtctgtctcctgccccatgatgaccctcaggaattgcaaaggctctgctgtcacaaggagagcaggctgagtttggagcagggtccatccggcagtcctgggacgggttccctctgctggtgcccctggtggcagtccctccaggtggggctggagcctgctggcgcccaatacaaaacccatacatccaggtgggtcacatctacttctggcggccgcagggcagggaaacccctactggaccctgtgtgtctgccagcctggagcctttgtctccagccctgcctttattcctccttgcctccacaccagcctccccttgcttctccttacagactatccaagaagtgaagcttatgtctttagggagccttgggcagagtccacataaatgcaggaagaacttagacaatgcctgaaatgcaaaggcgacactggagtcttctttctctaacgtgtagcgttgaatgaatatctgcctggaaccaagagggctgctctgatgtttgggagtcggctttttgtgagccacatctgatatttctgatatccccaggaaggagtggcctgnaggtcactggttcaggctccctttgngcgaaatcctgggagtgatgctctaaaaatccacctttcccatcat

SEQ ID NO: 89112 - DNA, 492 bp, Homo Sapiens
caagcagtctttgagaagagagtcgtatgacctaagatgtcccctccaactactttggaaaagacagtttccagaaggttctgaaatgcgtggtttcagcatccactggggagcttggaatgtacctacagcagcattaggcctatcaagtgtcatgcacagctcaagaggaaatgctatctggaaatcccccaactcccatggaaattcccagctggctccctgtacactgcagatacctgaagtggttttgaagactgggcagctaagacttaagtgaagaagaattcctcccctgcaaggatgaccaagaacccagccgctctgtttccttcccgactggagtcctcttctccactgatcttcaggctcgtgtggaaaaaccgataaaatagaaaaagcaatcggaagaatataaaaatcactgataatcccgccacctagagaaaactactgttagtattttgagtgtatttccctccagcttttttc

SEQ ID NO: 89113 - DNA, 637 bp, Homo Sapiens
  misc_feature (350)..(361): n is a, c, g, or t
gttaaaaatcgatttctttttctaaaccgacaatgtatacaattattaaagggggaaaaacacttctgaaatgcaaaacatggaatcactcttgcagagataccagagatctctgaaagctggaagcgtgtctcttctctgaactcctagtgcctaacaagcagtaggcagccctcattactgcctcttggcaaaaagggcagaaccaaacagcttttggtaggtctcgatcaaaatggtaacaaatcacagttttaataaaatggcaaatattctaactgccaactcttggatgtttgcattataaaatgaagcaatacaaagataaaggcaattttctgtcttcattnnnnnnnnnnnngcaaccttaatacccagtggcaaccctaagttatgaataaagcagcagcacagaaaatgctgcttgggttccctttcccaagctgtccagcctcggcggctccgttcttgagctccaagagtctgggcacaaaaagccgcgtggccctggatcctgcaaattgggaaacggggggatcctgcaggccaatggccttacgggagccaatgtgacgggatcaggggcagacccatttaggttgccgtaaccggccaattcagtacgcaatagggaaaa

SEQ ID NO: 89114 - DNA, 463 bp, Homo Sapiens
tcctttttctggagaacggggtcttgctatattgcccaggcaggtctcgaactcctgggctcaagctatactcccacctcttgcctccctgagagctggcattacaggcatgaggccaccgtgcccgggccggctacctcattctagtactgccccaacactgcctgccatttttgggtgctgagctaatcaattacctctggtctttagctcctttctggatgtcgtttcttagtgggtcaaatgagatatataaaaacttcctaaaaaatggatactttgctgtcttttctgtatctttcagttatcatcccaccacaattttcttttagtttacctcttccctctccacaaaagttgttctcaataaggtcaaggaaacatttgtattcattttctattgctgctgtaccaaattatcacaaacttggcttaaaacaacacaaatttattctctcatagt

SEQ ID NO: 89115 - DNA, 1069 bp, Homo Sapiens
  misc_feature (275)..(284): n is a, c, g, or t
ttttgtgttattgggggggagagagacccaaaagacccgttgtggggggtgccccgagttttctcctttggggaacccagcgctagtaccccgggttgagtttttcgcggtgggggcgccgggggccccaaaaggaagtggggttagaaaagttttcttcaggggcccgagggggccccaaccaagggtgtttgtttggggggatctggggtgtacacccgggtgggttgttggggtcgcggggcgtgaagttagcgatgaggagggaagtagannnnnnnnnntcgggaagcaacagaaaacaagtttaatgcaacaggtgacaacggtctggagcgagtccatgctccggaaggctcagtctgtggcagtcccgtggctcaagacaggctgaggccggctgcaatggaggccagcagcaggaggatggccagccacagcccaccacagctctcacccatgctcccagcatattctttgaacactgatgagttgataggtggcccctctaaattgcagtagcgaattttacaacacttgaggtaaaagaagggcatgggctcttccaggagaaaccgcttctcctctggcttgggtctctccatcgctgcacaaccagcggagcactgcttcgcaaccatgaaaaaacgtggaaatattttcacggccgctataacgcagtatggctctgtccatttgcacctccttgggttctggcactcgaaagtgttttctctctcacaaacatgacaccacactctattgtcaccctcgtccgttcgctgggagtcctctggatctcgttgtctcgcagtcaggttggcgtctgtccacacccgcggtagggccacgaccagcagcaaggcgagcagcgccatcgtccccagcggtgcccagggagggtcagcgcgcggcgccccctccccgcccttctggaaccttcgcagcctccgcgcgcctctccccgggtctggccggtagggggagccccgcccgccccggggcgcgcgcctcccacccgccggggcctgtcggggtctttggagcctcatctcagggcctcgcggcc

SEQ ID NO: 89116 - DNA, 824 bp, Homo Sapiens
aagaaaaagtcttgtggcacccacaccgagaagatgtaagcagagatgtgaggaaacaaagctgagaattgagggacaatccaagggaaagaagtggcctgggaaatcggttctcctggcctggaaaagacacgtcaccacaggaaaaaatctggctccagagaacaatttattttaatatgcctcattttgctatttcattaattcagaaatacttggcctttttttctactgttactgtggaggcataataggaaatgtaaacatactggtacaaaataagaaataacttatttatatggcaggaagactagaaaaatcacagccattttcttcttcttactataagctctaattttccatgatactgctctacatacaggatctttatttaaaaaaacctgaagtgatgatattacattgccacatcaacatttgaaattaaatgatcaatgggtgatataaaaatggccagcacatggtacattttgtaatactttaagtcacattgttgagatccttgataaagatatgatttgcttttaatctggcaccatcatttattttgggcaaagctagaaaacaaataacataatttgcataatgaaaccattgagagaaaaatcactgtaatttgtcagaggtatctgcaccattttgacttacagtttaaattcattcaagtttatttctttcctaacccaactaaacaatgcttttgatttattcttgccatttagtgtcatataaaataaagtgttccactaggaggagaaataatttgtcaagtagaaactatattaaatgaaacattctctctgaaa

SEQ ID NO: 89117 - DNA, 560 bp, Homo Sapiens
acagtggccatacgggcacaggagaccttttatgggactttggccctggcaggacccagggcctccagacgtgcgggcggcacatgccttggggacatcctgccttcaggaccgtggggcctggtcagtctgtccatcctcggcaaggacacaacactgccccagagggtgggaccactgcaagctcgagaccttgcttggtgacatgtgccactttggccaccacccacagtctgtcaccacgtggcttgggaacttctggagccacagcaggcatcacggtgcgacgtgagatgcctgcgccagccccgagcccactggcagccactgccattccacccatggtccctcaccctgccctgccgacgagcttgtctctgcagccccaggtacccccttcctggatgctgctggccccaggagatagctttccggtgacagctgtggaacgcgtcagcaggacaaactggacacatggagttacagtgtgtacacggcagtcccgccacccagcccccttgtaaactctagtcactataaacacacccgtacgcctaaaa

SEQ ID NO: 89118 - DNA, 482 bp, Homo Sapiens
tgagccgctgtgcctggccccaaaagtttgagattaaaccagaattgggatactgggcttgtgcttctgcttctgaagagcagaaaaagtgtcagatctaaatccactccccaccagatatgacatcagcaagccaggcagagaatccccttgcggagggataacctagaacgtcaaacgcctccctcggggcagggctgcctggctctgcccctgtcctggctgggaggctgcctttttgaaacctgccctgagagacacctcaggcctgacagcccaacgaggggcctgtgaggcttcaggcaaacgcctgaggactcggacttcaaggcttatgtcaccgagagctgctcccacagggctgaggagaagcagctcagggaggaccgcagatctgctgggcaggggctgcactccttggggggcagactcacccctgccacctccttggcgtagttctggcactcggcgctggcggccgc

SEQ ID NO: 89119 - DNA, 511 bp, Homo Sapiens
  misc_feature (29)..(29): n is a, c, g, or t
  misc_feature (372)..(390): n is a, c, g, or t
caagtggagtctttcctgctggcgtttcntcagggtcaggaagcaactttcccaggacaggggcaccctgaggtccgggtccactgagctatgggggcggcgtgggcctgggctgggttcttgccatcctgggcagcttcccggcgtgggtgactgagcccgggtcctggagtccgcggtcccagcgtctccacttctcagctgattcctagaagctgagtcccgtcccttctccgagcgtggtttcctctcccgccttgcctgcgtcgcaagcagttgtgggagcagaagtgtgtctgtgcatctgtgtctctgtgcaggtattttagaattgttaggatcattatcaccagctttacttttcccaaccannnnnnnnnnnnnnnnnnnctcttccttcttctgccacagcaagacccccccgccccaagcacagtagctttctcagcgtcgaatccctccgtgggaccatgttgcaatgaaatttcaacatgcaaatgaaatttctcga

SEQ ID NO: 89120 - DNA, 455 bp, Homo Sapiens
attatgtaaacaattagatagcttttactttctagaccaggggttcccaacccccaactggtagtgatcatggcctgttaggaaccaggatgcacagcaggaggtgagcagcaagtgggcaagtcaagcttcatctttattacagccactccccgttgtgacattactgcctgaactccacctcctgtaagatcaacagcaacattagattctcattggagcactaaccctgttgtgccctatgcatgtgagtgatctatcttgcatgctccttataagaatctaatgcctgatgatctgtcccccaagatgggactgtctagttgcaggaaaacaagctcacagctcccactgattctatattatggtgagttgtataattgttttattatgtattacaatgtagtaataatagaaataaagtgcaaaataaatattatgcattgaaccattaa

SEQ ID NO: 89121 - DNA, 522 bp, Homo Sapiens
cagaagacaagtcatttttctagacctcccatagacgccatcgttgatcaagccattttcattttcacgaagtattttattatggaactcctaaagaccatcagccctacctggcactggctttctggttgaaaagcagcattgtggagcctgaaacatcatcagaggcaactgcttcccctccctgtggatttaggaccgctatgtgcagagttctcctgtttgttagtttgctgtcccagttgaattccgagtttccgggaatccctagtgcaatgagaaatgatggagaaccaattctcattatctgatgaaggaaagagccatgtacctacaacagcaaaggctcagacaagccttctcctgccttgggttcatggtcacgtgctgtaggtgtcttgtcttcccatgtgcacctgtctgcatcctcatggtgcatcctcaggatgtcccgtacagtgtcttacctatggttatgcttttataacaatgtgctaataaaagcatggattacaaaacaaa

SEQ ID NO: 89122 - DNA, 490 bp, Homo Sapiens
agatgcaaaatcaaagttgcttggatttccatttcttccccatctaggaaaagggcaatggaatcaaagcctttaaaaaatgtagtaagagaaagactctctaattgatcagaaccttctggcaaccaggactttggcccatctactgaaaaatactttatcagtgtctttagtaaaggcccccaagatgcacaatacatttttggttgttgaaatagagtgtcttctaagtcatcaagtaaaagagaaattctgctcagaagacttttggatagtacccaacatttggtgaggcttactatattacatgcattacctcgctaaatcaccacattagaacacttacaggatgatgggaagccatttctgtgcagggagacccgaaaagaacaacaagatatcaatcaactttgagcatcaccaggagggtgaaaacaatggtactgaattgcaaattgtaggactgcagaaataaagttatgttcacaaa

SEQ ID NO: 89123 - DNA, 558 bp, Homo Sapiens
ttagacaaatggtgttggaacaactggaaatcaatatgacacagatccattagacacagatcttacaccctttacacaagtgaactcaaattggattatattcctaaatgtaaaatgtaaaactatatgaacccatagaagacaaccaaggagaaagcttagatgacattggctatggtgttgacttttataagtaggaacacccaaaggcacagaccatgaataaaataattgataagccagggtttttgaaaaattaaacacgtttgttctgtgaaagacactatctagagaatgggacaagcagcagcgactctcattcattgctggtggaaatgcaaattgctacatccactttggaagacagtttcacagtctctcacaaatccagcaactatgcttcttggtattacctaaataacttaaaaatttatatctatacataaatctacacatcagtgtttatagcacctttatttataatagccaaaacatggacccagccaaaataaccctcagtaggtgaatgaatacattgtgaaaatccaaaaaatgaaa

SEQ ID NO: 89124 - DNA, 555 bp, Homo Sapiens
gattgagagaagaatttgaggactggaaggcaggacatgtggttgagtgactggagaagggagcagataatggcaagacttcattctttgtccacaaacagaagagtgtggatcgcaaactaatcagcaggcagaccaacaagctaaaatttctactattactgccgactcagacctggaagaagtagattgggctgcaatcacacaatgggtgcatcaccagtgcggacacctaggcgtacagggaaccatggcttggggagtgtaaagaaggatgttaccccaggatgcagttcagacaattttatcccaatgcactacatgccaacagttaaaaaccaagccaattcctcaaagggctatggggcacattcaccggggaaaaatgccaggacaaatttgtcaaatggactatatttgtcccttgccactttctaaagggtgccaatatatatgtactgctgtagacacctacttagggctcctagtagcctgtgcttatgctaatgctaaccaaattaacactattaaaacatgaaatatcctaattctaaa

SEQ ID NO: 89125 - DNA, 329 bp, Homo Sapiens
aatcttcagatattggtcctcctgttacttcatgattaaacatggtccttgctgaagagtatattggtataagtatggtcttacttataaatggcctgttagccttcccctcctcttcctccactgggaatactaatatcattgcatctgtgtctcccaggggaaatcaaggcttttccttgcacgtgcagtcatgtgatttcagagtgggcaggctttgtatcctcatgagccctcagtcttccacgcaaagcaccatctgttctgttacctccacactgttacagggcagtgggaggaggcattagagtaaaaataaataaaataaa

SEQ ID NO: 89126 - DNA, 603 bp, Homo Sapiens
gctccaacttgcttctgctttgcaatatggtaacacgccgtattatggaagcaccatcattaccgccatttgcaggggaagcctaaagagataaatgccagccagcatccctgtctctggggccctggagaggccttcaacacacctggcctcactgccctgtggcttcaacaaagaggccgagcatctcctataaaccttgaggtccatggatgacatagcggaatgatggatttcagaaaagcacactgctgttacgactccagaaccgataaggaagctatgtgtggaagtatgagctcaggtcgccttctgaccctctgtgacggtctatttcaggcagttatggatagataacattacagacactggtaattaaaacaacactaattttgtctctgtggtcacgctttgttgttagaagccatctatcatggccttcacgcatcacgcaatgagaagacatttgtctacgtacattgtgcttggtcaacggttttacggatttccccgcgtacctggacacccaggcacttttaaagacgtactgccttcatttctactctattactctgattaataaaacattttgcatgcttcatc

SEQ ID NO: 89127 - DNA, 584 bp, Homo Sapiens
tggagacagataccatcggggctggcgaggggccacagcaggcagtgccctggtcagcctgggtcacgaggcatggctgggtgcgctggtgggtgagccacatgcccccgagctggatccagtggtggagcacctcgaactggcggcaaccgctgcagcgcctgctgtggggtctggaggggatactctacctgctgctggcactgatgttgtgccatgcactcttcaccactggctcccacctgctgagctccttgtggcctgtcgtggccgcggtgtggcgccacctgctaccggctctcctgctgctggtgctcagtgctctgcctgccctcctcttcacggcctccttcctgctgctcttctccacactgctgagccttgtgggcctcctcacctccatgactcacccaggcgacactcaggatttggatcaatagaagggcaaccccatcccactgcctgtgtttgttgagccctggcctagggcctgagaccccacggggagagggagggcaatgggatcagggctccctgccttggcagggcccagacccctagtccctaacaggtaggctggcctg

SEQ ID NO: 89128 - DNA, 637 bp, Homo Sapiens
  misc_feature (60)..(60): n is a, c, g, or t
ctgaccatcccattcaagaaccgctattagtacagcagcatgattgactcaacccctggnagaagaagctctttgcctgggacaacttgaacatggtcacttatgacatcaagctctccaagatgtgaaaagcctccaagctgtacaggcaatggcagaaggagatgctcagggctcctggggggagcaggctgaagggagagccagccagccagggcccaggcagctttgactgctttccaagttttcattaatccagaaggatgaacatggtcaccatctaactattcaggaattgtagtctgagggcgtagacaatttcatataataaatatcctttatcttctgtcagcatttatgggatgtttaatgacatagttcaagttttcttgtgatttggggcaaaagctgtaaggcataatagtttcttcctgaaaaccattgctcttgcatgttacatggttaccacaagccacaataaaaagcataacttctaaaggaagcagaatagctcctctggccagcatcgaatataagtaagatgcatttactacagttggcttctaatgcttcagatagaatacagttgggtctcacataaccctttacattgtgaaataaaaatttctaacccaaa

SEQ ID NO: 89129 - DNA, 392 bp, Homo Sapiens
agttgccggaggttgtgagaatttgcatttggaacaagttctcaagtgatactgacactgttggtcctggggccacgctttgagaaccattctttcagctttttggaatcttaagaactttagaagtctagtccacaggctccgtactgatggaggtaccagcaagggcttccttttccacttcaagagaaagaacaataagtttcaaaatttgaagaacacattgacctagcattgaagaaagcaaactctaagaacctcttcaccaaaagtattttattgttggaaaaacacctgatttcagaagtttgcaatttacgtacatagaaagtttatcaaagataacaatgattctgttttccttacaataaatgaattctaaaacatgaaaa

SEQ ID NO: 89130 - DNA, 443 bp, Homo Sapiens
ttttaaaacaataaatcaaggctttatttgtagtgttttctagtttccatagatttcaagagactacatgaaacaactgaatatggggttgggaatagatgtgcagtagacatcatgatgccatacttccacgcatccttcaatttgtttgtgcgacctcatttttcctgggtgctggacaagagcttgggagccacaagtgtggatacaaaaagctgtcacactggccctttgctcttgctggcaaaaagcagccacctcacgtgaaaaagcagaaggccaactgaggtgctaacacttaagccctctgcagatggcagagctaaaagagcactgtaatattccctctggggctttggaggtcacaggcacccccacctagacactgccacggggctcacaaattcacttctgctggcgcccaaaagtgtttgcaacagtcc

SEQ ID NO: 89131 - DNA, 484 bp, Homo Sapiens
  misc_feature (126)..(146): n is a, c, g, or t
acaaaaaagatttgacttccgaatagaatgttttctttaagaggcatgaaaagcaactattgttgtgttacagtgttaaaaatattcagttttctttgacaaaaatgtgtactgtgtaagccttgnnnnnnnnnnnnnnnnnnnnngaagcagcagcagcagcctgctgtgtggcatctgaacttttataaaggtttccttgtgccaaataagtgcaaagatttaatttactattaaaaaccataagcatatgttatagttccagaagaattattttgtcatcaagtgattttgatctttagtgtcaatatttatatttagattaatttttataaatgaaaatattttaatggtttaagaaaatgaggacaacaggataatatctttgatgacttctgaaagttatgcttcccttcatgttatatgcacattgccaagaattactgtcaagagaaatgataagtaaaagtcatttatgaaaata

SEQ ID NO: 89132 - DNA, 565 bp, Homo Sapiens
gatttcagggcagcctcttcctagtgtcagactgagggagaatcaattttgggggagaccacatctaatggataaaagagccacaggattacaaaagggtggaatagttgttacaagaaggtcacatcatcctggcactgcccccagaaccagtgggcctcgaagcccagcttggcactctcatcctctggggactcaggtggtccaccttgaagcctctcccctgggggcttccacacagctctcaagctccctagcctggtggctgccacatccacctcagtcctggccctctctccaccagctataacttttgcccagtccatctcggaacgtggagccccaggtgggccctgttcatccagctcgctgggggccactgtgtccaggaagctgccaatagagacactgtccagccggtcggtggtgctggtgtctggcaggctgtcccagctgcctcgccttgagcggcctgggctcccgcctgtcaggctatattgactgctggtgaggctgctgcaatgactggtcaacgtcccccgctcctccaacagccagcgcactg

SEQ ID NO: 89133 - DNA, 796 bp, Homo Sapiens
atcatacttgggtatgcctgttggtaccataagcctaaactctccttcactgcaatgcctttgagtcagtagcaatagtaaagactagaaacaaagaaaattcagaatttggtatgtgatatgattgttcatacaatatgttataatagcaatattccaaacaatatgtccttcactgtctattgttggaaaactcatgcatcccagcatgaagtaactcctagttttaattttagttattttgagatatatttgagaattgcatctcttctcttgaatttcatttagaagagattaaccagccaaatatccaggaaagtttcaaaacattctagtgtttttcatcctttgctaggatgcactctgtacaaaacattcctctgaaaatctaatatttgcagtatctaagaattgatcatttctattttcattaaattctgtggaaaaaattaaatgaatgaaattcaacttcataattcagttcatcagcttttgtatcttgagaatctaaacacgtctttaaatctgaaagaaaccaagctggattttgcagtgcatatgtttgctagcttcccacatcctgaaccatgtcaaaatttggttttatttagttacatataatttaatgcaaagaaattctgttacttaatgttctgtttatttatgagtgcctatcaggaacactaataggaatgccattcaaccagtgtcttctgcccctctcccagctgttaaattagtacttcttcattggctttctgaaatgtcctgagtaaagtagaaaagcaacctttgt

SEQ ID NO: 89134 - DNA, 590 bp, Homo Sapiens
  misc_feature (301)..(309): n is a, c, g, or t
ctcatgattaggtcatgaggagtactgttagttattgcaggagtgggttcctaataactggataagtttggctcccatcttgcctctctgtctctcatgctgtcttgggcctttcaccatgaggtgaccctccccatatgcaggcaccgtgctcttggacttcccaggctccacaactgtgagaaataaatttattttctttataaattacccagtctgttgtattctgttatagcagcagaaaatgggctgagacagaaagtagtatgaccccaactgagaagtctcctagggggaaagnnnnnnnnntcatcagttcttagtattacctctttggaatgtattttttataaaatctaaattcacaaaaagaagctgagagtatgtgatgcaatagagcttcatttttgtaccagataaatgtactggctgaatacataattgtaatgactgaaagtacacagtccttattaatttctactggcaagatcttctgggaaagcagaagaaaaaaagaggaagcatggtgaaacacacacaacacacaagaaggaagacaacttaggagaagtaacaatttagcgaagaaa

SEQ ID NO: 89135 - DNA, 324 bp, Homo Sapiens
ccaggcgtgagccaccacgccggactggaatagaagtttttgattcaaggtgactaacctgctctttgctcaggtctctttggccacctcatcttcctcaaatgcaaggaattcctcacgtatcattctccctttcgtgcttgctctcctctctcccgctggagcctctgagataaacacagacttaagcaaacaacaacaacacaaacatctcctgggaaagaagctctttcacttgttttgtctcactgaagctaatgctcctgcatgcctagtccagcacatcatatgatttttacaaaaataaaagacaaaagattcaaa

SEQ ID NO: 89136 - DNA, 986 bp, Homo Sapiens
  misc_feature (830)..(839): n is a, c, g, or t
aaaacgctgacattgacccggctaacaagcggctggtacggtcggattcccgggatatcgtcgacccacgcgtcggcctctcctcggccaggcggaacctctctgctgggcccggtggccgcaaaagaactttctttctcccgcccgaacggtcgccgcggccaactgcctcgcccgcctggcagcctaaccctccttctcttcttctcctctccggcttcgcgcggccctgcctccctctcgcccggcggcatccgcttgctgctgccaccgcctcctcatcttctgcccggccaaccggcctgccccgctgcagtgatgtgcgacaaggagttcatgtgggccctgaaaaacggagacttggatgaggtgaaagactatgtggccaagggagaagatgtcaaccggacactagaaggtggaaggaaacctcttcattatgcagcagattgtgggcagcttgaaatcctggaatttctgctgctgaaaggagcagatattaatgctccagataaacatcatattactcctcttctgtctgctgtctatgagggtcatgtttcctgtgtgaaattgcttctgtcaaagggtgctgataagactgtgaaaggcccagatggactgaccgcctttgaagccactgacaaccaggcaatcaaagctcttctccagtgatggatggatggactgataactccggaagaatgactctcctgtggcctcacactgctgcctgtctgtctgtcactctctatctgccagcttcttcagctaaatactttaagaggggtgaggggagagagaaattcataacaaatccgactaccagnnnnnnnnnnttgttttggaggaggggcaaaaggaaccatgatcaggcttttactgggattcctgatcaagtaagcctcttccctttctaataaaatatacgccttatacccaagggagagcaaagtcaaaatacgccagtaacatataaccttttc

SEQ ID NO: 89137 - DNA, 525 bp, Homo Sapiens
aggacagtaaagatctgtctgaagcagcttcacactctgcattacagtctgaattgagtgctgaggcaagaagaatactggcggccaaagccctagcaaatttaaatgaatctgtagaaaaggaggaactaaaaaggaaggtagaaatgtggcagaaagagcttaattcccgagatggagcttgggaaagaatatgtggcgagagggaccctttcatcctatgcagcttgatgtggtcttgggtggagcaactgaaggagcctgtaatcaccaaagaggatgtggacatgttggttgacaggcgagcagatgccgcagaagcactttttttattagagaagggacagcaccagactattctctgcgtgttgcactgcatagtgaacctgcagacaattcccgtggatgtggaggaagctttccttgcccatgccattaaggcattcactaaggttaattttgattctgaaaatggaccaacagtttacaacaccctgaagaaaatatttaagcacacgctggaag

SEQ ID NO: 89138 - DNA, 897 bp, Homo Sapiens
  misc_feature (171)..(171): n is a, c, g, or t
ggatggagtgatgcatgctagaatttgaatttgtcttggtttacctctgaaagaagagatatttacacaaagcccgagtaattttgagtagatccatagtgcaacggtggccaattttgcaaaataatggaatccaaatgagactcagaacaatagcacaagctgcgctgntcttcaaaagaactgaacaaaaatatcctaaccttgaatacagagtcaacaagaataatgacgaaactacgtgctcaacaatgtcgattctggacatcattttttccaaaagtcttggaaatgacaggaaatattgatgaagcagaatgggagtggaaagcaggattccatcgctggaacaattacatgatggactggaaaaatcaatttaacgattacactagcaagaaagaaagttgtgtgggtctctaattaatagatttaccctttatagaacatattttcctttagatcaaggcaaaaatatcaggagcttttttacacacctactaaaaaagttattatgtagctgaaacaaaaatgccagaaggataatattgattcctcacatctttaacttagtattttacctagcatttcaaaacccaaatggctagaacgtgtttaattaaatttcacaatataaagttctacagttaattatgtgcatattaaaacaatggcctggttcaatttctttctttccttaataaatttaagttttttccccccaaaattatcagtgctctgcttttagtcacgtgtattttcattaccactcgtaaaaaggtatcttttttaaatgaattaaatattgaaacactgtacaccatagtttacaatattatgtttcctaattaaaataagaattgaatgtcaatatgagatattaaaataagcacagaa

SEQ ID NO: 89139 - DNA, 572 bp, Homo Sapiens
aaggaaaagtttggggcgggccccccctaacggccgaaaaagggcaaggggccggttcccgccaagggaaccagcaagccggacgcgcccggcccaaagcggccggagcccactgggggacttccggggaagcggccgaactggggccttccagggtccacgccgtctgaggcccgagagagtcggttcggccccggtgttcgcggatcccggctcgcgggagcctcggggccaggccagggaggcagagcaagctgcagccagccggcgccgggctcgtcgggcttcgcaggtccggccagcctacctcgccccaccgcgcaggggccagcggcgtcgcgggcgttttcgtggcggaatggcgtcctcactgagcgctcagccaccaccgcggactcgcgctcgcttcctctggggcccgcgcggcctggggtcgtgtctgaccgcgggtgtccacgcaacacctctgcagtttcactttccggtggaatcgcggggacctggagcgaactcttccctccctcgcgagggccccgggccccgctgtggtccacagagcaccttgaggcccg

SEQ ID NO: 89140 - DNA, 385 bp, Homo Sapiens
tttcggtggtaggatcacacttgattttaatttcatcttcctgcagacaagtgttttctcaagttgtccacaacacgcatgtgtaacaatgtcagtgcttcattggacagtctgaactcagtggggtgtagacatgaaactgcctttaaaaagccctcactgcagctgggcagcacttttcagttcctcgatggcatcttggaaaatctcaaaactccctgagtactgggttggaaagttcctttgcttgtcttaagaggagttctacggtgactgtgttgatgctgcatggcctgggtgaggaagagcactggccaagacctgcagctgcctgagctgtcccactctatcgcaattctggtacccagaggagaaaacagaggaa

SEQ ID NO: 89141 - DNA, 634 bp, Homo Sapiens
cgccaatgccacctcccaggccctgtctgagacacactggactgcgttgcattttgggtttcacagggactgaacaggattgaggtgtgaaagccacaacaatgggaaaatcaagcatggtcagcctcaagcactcctcagaaggcactgccgggagctgcccccacagtgccaggaccacactgcccctgccacacaagctgcagcactgaaggcctgcctaagtgagcgcagtcactcctgccctcactgacatctccgcagaagcaggctctcccagccccagctcaggagccagccagagcacgcagcttgccctgcatcctctggcaggccctgccccgacccctcaactggcctgcaaggcccagacagactggagggcgggggcctgcacttagccacggggggctggggggtggccagggacacccactacgagggtccatgccatgccgtctgggcaacccaagagggtgaggactgcatgcccaggtcccgcagggttgctggtgaatcaatgagcaacgtctaactagtcggcatggaaaataatacttttaatccaccaattatcatactcaaatcctttccttttcccccagcaataaacactgagcaaactattcacaat

SEQ ID NO: 89142 - DNA, 916 bp, Homo Sapiens
  misc_feature (618)..(632): n is a, c, g, or t
tatcaggcaacttctttccatgaaattgagatctgtgcgtcttgaagccgatagattatcacagaaaaaccagcaaccctgattttaaatcatttgccaacagtgttaatgggcggttcctaatccgtttcttaatttaagggtttgtaaaatcaaaaaacagctcagaaatgatacgattaacatatgacgatttaagttgggttgatctcaaagtgaaggatggagaaatgaattctctattgtcataaggaaaagggaagtcatgaagttagaaggggcttgtatctgaaggcctctggccaatgtgcctgctgccatttcctctgtccctgaggtctccagaagagaaaggagctccagccttgcattctttgggtgtggagaggagcagagcagaatggagcctgcaggtcatgccaggagtcaccgcaaggctgtggctgtcagctcagaattccatcatcacttgggagatttctgcgaatcatcactaaagccattcactttctcataactaaacaagaatcttcttctggagttaagtatcagatatgaatgttctcactgacctcaggaagcaaaagtcctaaatcattatatggcagtgaaggtacnnnnnnnnnnnnnnntcagcaggaaataaagcggaactgctgccaacacatacaagctgcagtagcacccacaaaatgtgtagtatctattctaacacattcattggactgattacattggctcatagacttggttaactctggaagaacataataggtgtttattgtttactatggggatgggaaacataattaagtctatagtctccaattcttctcaagttcaaatgaaaccaacaattttggttttgtcttaacattcagcatgtgtttctaattaaactgaaatcacagtaaaa

SEQ ID NO: 89143 - DNA, 399 bp, Homo Sapiens
gggacacattccagcaaaaagacacaaagtgacagaatggctgcctttgagtgggggtgagaagaggtggatggcaggtaccacaaaagaagggaataaatatatgaaaaaatacaaccccctcgggcagagcctggcacaccataattatgcccagaaaaaaaagccccagttgcttacgttcccggcaacagggccgggaccagcgccggcttcctggtgaagaaggccaccctttcctcttaaggggtctaagtatgcatgtcaagcacccggtgggcacccagcaccaagctgaccaggggccttcacctctgtgggggttaccggccctggccctgaaaactgaataaaacctgcaataattccttctgtaataaagcaaacgcaaccacgaaa

SEQ ID NO: 89144 - DNA, 716 bp, Homo Sapiens
aacttggcttcaaatgaaatgccacaatcattttctgcaatcacattaagtaacacagtagatgaataatattaagactaatgcacagagaaacaaacttccaatagaggaacttggtaaagtttctaaacataaaattgccactaaaagaacaccacataaagaagatgaggcaatgagctgttctgaaaattgttcgagtgcccagggcgactcacttcaggatgagtctcaagggtctcattctgagtccagctctaatccctccaatcctgaaactttgcatgcaaaggcaactgattcagttctacaaggttctgaaggaaacaaggtcaagaggacatcctgcatgtatggggcaaactgctataggaagaatcctgttcattttcaacattttagccatcctggtgatagtgattatggaggtgtacaaatcgtgggccaagatgagactgatgaccggcctgaatgtccctatggaccatcctgttataggttggaagttcagtgtccagttgaaaaacaccaactcagctagtttcttctggtctgcattacagtattttacctgtctttttatgaaaagagcacgttctaggaaaggatggaagattctcaaagaaacaactttccccttctaaggcagatgaaaacctgtacatgtacctaacattttttcccctttttaaaatataaaatttcacattacaaaa

SEQ ID NO: 89145 - DNA, 1326 bp, Homo Sapiens
ggcattgatactaaattacccagcttaatcaacagaatggtttaagtagtaccaggaagtaggacaagtaatttcaaaaatataaaggtgtttgctactcagatgaggccgcccctgaccttctggccagagagacattgctgccagccagctctgccttcccatcatctcctttcaggaccgtcccacaccttttacttgctcagtgctgtctgaagatgcagttgctgtttgcaaacaacaggaacaccagttaaactaattaggaaaagagggagatttccaggcctgggtaactatatactgtgaccattggaggtagagacaggtctcaacagttggaaccaggaactctgctgtcaggttgtgagttttgtttctcttccagcttttcactgtgtgggggtcttttctcttatgtcagctctttctatcacatggcagctgacctctcacgctccactctgcagcttggacacccagtagaccctgaatttcactctctctaaaaggttctgagggctcatcctgggccaggggccctcctgtgcactgttagctatggccacgggagcctccagagctgcctggtagcttcaggttgacctgcttatcaggcctacgatccttctgatttaagtacagctggaaagtattatctaattaagttcatgatagtgcttttggagaacttgtcaaattacagccaatgagaaaataaggacctagcataccgtggagaaccattaaaaatttgagaagaaacaacaagtattatgtcaacttacttcaaaggcgtagttttgggaatttgatgcagtaaagattaccctgttttatgattgttccttgaaagtcaaatgggggacctgtccattgtgctctattaatcttgtcagaaaactgtcaccaaaacaaaatttgagtttgtccttgttctaggagttactgggtagttgtaagtataatttttattaaatataatgtaaaataaaatgttaagatacttagttttgtttttcaaagtaaagctgtagtcagcgttatgtatgccattgactctgaaatgtataccagcctttcactgtgtaccgtgtgtatataaatccacagaaccggatgagctgcttagggagggaatatattcaaagtgtaccaaggaccaaatcctggagttctcccaactttagaggatggaaaggggcagagtaatctagcaaaggagactgaggccagtgaagtaggaagaaagtatttcaaggagagtgatgattctgtgaatattgctgagaattcaaataaaaagaggactgagaactgaaaaaa

SEQ ID NO: 89146 - DNA, 505 bp, Homo Sapiens
gtaccattagtgtcttacaggatacgtgagttggtcagcaaatacatgtgctttccattgttacgggcgcggtggtgcaggggcaaatcgggactgggatttggtccttacccttaacgtggctctaagaccagaagggaacacctgacttctgttgacctcttcagttagctgcagctgaaccagtcgtacgagaggggctgaagcacattagtgaaggatgtgtgttcatctactgccaagtaggagaaaagccttattggaaagatccaaataatgacttcagaaaaaacttgaaagtaacagcagtgcctacactacttaagtatggaacacctcaaaaactggtagaatctgagtgtcttcaggccaacctggtggaaatgttgttctctgaagattaagattttaggatggcaatcatgtcttgatgtcctgatttgttctagtatcaataaactgtatacttgctttgaattcatgttagcaataaatgatgttaaaa

SEQ ID NO: 89147 - DNA, 1035 bp, Homo Sapiens
  misc_feature (572)..(573): n is a, c, g, or t
ggggcctacgcgggacccaaccgcggcgaccggacgtgcactcctccagtagcggctgcacgtcgtgccaatggcccgctatgaggaggtgagcgtgtccggcttcgaggagttccaccgggccgtggaacagcacaatggcaagaccattttcgcctactttacgggttctaaggacgccggggggaaaagctggtgccccgactgcgtgcaggctgaaccagtcgtacgagaggggctgaagcacattagtgaaggatgtgtgttcatctactgccaagtaggagaaaagccttattggaaagatccaaataatgacttcagaaaaaacttgaaagtaacagcagtgcctacactacttaagtatggaacacctcaaaaactggtagaatctgagtgtcttcaggccaacctggtggaaatgttgttctctgaagattaagattttaggatggcaatcatgtcttgatgtcctgatttgttctagtatcaataaactgtatacttgctttgaattcatgttagcaataaatgatgttaaacaccctcacccaaccccacacgaccacatnnccatgttcggccgcctcggcccctccaaaaagctttcctaaaaacctttcgtttgggcgccccggggccccagtagggtaaggtgaaccatgggccataacctgttttccctagggagattcctgggccatgaactagtggctttggaatttcctccccccaaataaaaaaaccgcccccgggcggcaaacccgaagcgtttttgaaaaaaatcccaaaatgggggttctggaaggccctttaccgggaatctttcccaacagggagttccacagcggagccttcgaatattcaaaatttacccccccgccctctggcgcatcttcagtggaagaaaccgggttgcaaatttcatttaaagcctttttgcgcccacacttggaaaacccattcccaaaacggggattgtatggaacccttgaattccccccagcggcaatctaaacccactttgttccccct

SEQ ID NO: 89148 - DNA, 668 bp, Homo Sapiens
aaaaagagagagagaaacagagagcaaggagcaggtgggttataatggagtccctgcaccaagcagagcctgatgcccgcccttgctctgaacttcctagttatgtgaaccaaccaccaggccagttgggttgggtttccagccctgtgctcttgtctgtcctcactgacagacaaaaataactcatcagtcggttctcagacccacagtcccatgacatttcttgactgtttcagaagtaatgcctcaaggaccagcttgcagaaagtggaggacctgccccctggaccttacaagtagcaggccactcttaaaaatgcaaggaccacagatgtcaccatgactgaaaaatagaggctggccctgcctctgaagatgctgcaatggacttgtgttcaaagagaaattggctgtaacttcccttattgagatataatcgggctcatcgttaagctgtggtcagccagaagtgtagctgtgcccctgggattgaaatcagcaatcaatctggacatcctttttctatcttcatgaggcacctccccagtaccaaccaaatttcttggggatcccccgggacttctcataaatggaattgatttgaactcaggaaaccctcaaataggccagaacaactcactaattaaattcatcccctcccaaaaaca

SEQ ID NO: 89149 - DNA, 451 bp, Homo Sapiens
  misc_feature (44)..(44): n is a, c, g, or t
  misc_feature (385)..(385): n is a, c, g, or t
gaggagcagggccggcgcgaggcgagactcgggagcgtgagtgngtcccctgggggccgcgatccttcttcgccccggcgccgggggcatgtagcctgtgtccccgctcctctgtcgggccagtctgcaggcggagagagtcggacggcgcccggagcgcggatctcgccttgtggaggacagcgcgtcggctgcggttctctctcgaccccttctgcccggcgcttcggcccggccgctcaggtgcagagcatgaataatctttcatttagtgagctatggtgcctcttctgctgtccaccttgtccagagaagattgcttcaaaattagcgtttttgccacctgatccaacttacacactgatgtgtgatgaaagcggaagcngttggactttacatctgtctgaacgagcagactggcagtattcttctagagaaaaagatgctattg

SEQ ID NO: 89150 - DNA, 575 bp, Homo Sapiens
tgatagttaaaatgtatatatatcctagtcccctaaccaaatcctgacctattgggatacttataaaaatttaagtaagtgggatacacaaagaataataactattaactcttcattattagcaaaaacctaagggatttaaactaattgaaactgtatttgattggacttaattttttatgtttatttagaagataaagatttaaagaagacctttacaataaagagaagaaatatcgaagtcattaaaataaggagacttacttttatgacattctaatactaaaaaatatagaaatatttccttaattctagagaaactagttttactaattttttacaacttcaataataccatcactgacacttacctttattaattagcttctagaaaatagctgctaattaggttaatgaacattttaccttagtgaaaaaaaattaattaaatatgattacaaagttgcacagcataactactgagaggaaagtgattgatctgtttgtaattacttgtttgtattggtgtgtataaaatacaaaatttacattaaactctaaatcattaaaaaaaa

SEQ ID NO: 89151 - DNA, 506 bp, Homo Sapiens
cagccaaagagtggttcctggaccagcatcaccaacaatatctgggagcttgctagaagtcccaattcttggatcccactcatgaccttctgagtcaataactctgggggtggagcccagcaacctgtgttattaataagtccttaaggtgactcagaggcacattaaagtttaagaaccactatctaggccattgcaacaattctctaactggtctcctgactttattcatatctcttctgatcaatttccaacttccacaagagtgactggaccatgttacctccctactgaaaactttcctagggctccccatgacccatcttcgggggaaaaaaagtttaaacattttaatgagcattccagactctgcagttgtgactaacttacttttcctctttcaggaactgcttcacaagattaaaggagaaacagaaaatgtatctagcgctgtgcttggggcatggcaggaactcaatgaatcctcattaaatactgtaaatgat

SEQ ID NO: 89152 - DNA, 361 bp, Homo Sapiens
  misc_feature (19)..(19): n is a, c, g, or t
agctgatggagcatccagnatggaacataaacagtggacttttctcactcactgatatctgaggacccagcaccatcccccaaaagaatgttttatatccccacctgcccagactgatctgtcaacacagggaatactgtcaatatttcagagtataaattcaaggagagattaactgaacaaatctcaccttcatcttgagaatgtgtccttgaaggcatcaggacaaactttttacctggtaccaccacacccacaggcagaaggactttaaagtgcagaaaatgttctctccttctggcctttgttgtagaattcagaaacaatgacctgctaaataaagatgaaactgtgacttaaa

SEQ ID NO: 89153 - DNA, 380 bp, Homo Sapiens
tttttcaagatttctgattgtttattgaaatcatttaagaatagagcctggaaaactttcagtaatgttcctaggacatcttcatctgagataactttgtctttggattcctctggaacatatcggagggtccccaatccgaaacccaccatcccgacgtgcttttgagtggcgttctgcccgttcttaacgcgcgagctactgcacgctattctcacagccgggatgggcttctttaaccacgtgaagtacttgtatgaactatgaaaataaaccctggcttggcttttctgaggaagttcaagcacctaattaacccctggtggagaaaaagccacgcactctcacgcggtaagggcagtctttttaaaaagtttcca

SEQ ID NO: 89154 - DNA, 1378 bp, Homo Sapiens
tttttgtcatctgaaaattactgataggggaaatttgaatattatcatattaaataattatcttcattttccttaggaatctccatctcaaggctcagagagatgaactgctggcgcagggatacacagggaggaaagtcaaggcgtgagttgcctggtagagacatttgagagtgggtcattgcctcagataatttccacggaactctgtgtgcctctcctttaagaagaggtgaagccaatccctttcttgggagccttgagaagccgcctcaccgagaacagaaagtgcgctccaggtaccacccggattccgtcaaactacattacccagaaggcagtgctacaagggacggaagccgaccccaagccatagacggaaggcgcagaggggcgttcccgtagcggcgtgggcgggacttccggcgtccagtcttcgtccgccgttaggttgcggctgctgtggttgccaacgctacactgggtagaacgccagacaggggccaattttcgagaccgagtagagacggacagtgaggaggataggacccacttacacgcttttatgtcagccgcgatcccacccccacaagcgtctgcaaaacccttcctggggccttggcgacagccctgtgtcctcacggcgcgcagaggcggcgccgcgaaccttgtgtgcattttacacgacggcggggactgaggtccctcgcagcccatagccggagcccggggtcggccgagcccgcaggaccggcttcctcgccgactctcacggcctcacccagccccctgggcccatggcggcgccggcgttggcattagtatcatttgaagacgtggttgtcaccatcactgcagaggaatgcgggcacctgaacctggaccaaaggaccctgtaccaggaggtgatgctagaaacatgcaggctcctggtctcactggggcatcctgttcccaaaccagagctgatctatctactggaacatggacaggaactgtggacagtgaagaaaggcctctcccaaagcacatgcgcaggttggtgactgagagtctggcagcgggtatcagggcagcctgcagaccacccaggcatcactgtgtctgaaatgccatgggcagctattttgtggtcttgagcagtcatggagcccttgaccccatggtcccccgtcttcccacttctgtcacacactctttgcctttattcaggttggaatatgttaggtaggagacagattctaggctttaatgatttgccactcactagcctcatgactctggagaggttgtgtgacgtcactgtgcctttggtatataagttaggctgagttaatgaccttctctgaaaaataaactccaaaatcatgtgactcaa

SEQ ID NO: 89155 - DNA, 416 bp, Homo Sapiens
gagacatgcagctgtcagacaagccagcatgtcaaacacaggttagagagactgagcttccagattgcatagccatttccttgactactgagtaaaggccaaggctaagatttagtaagcctagccctgaagcaagcaaagaatatggcagtgtaatgcaggtcatttagaaaaaaacaatgttgggcacaaagaaaatttagatctgacaagtataattttctaaagacattatttcaggattaacatcaatttcttagcagaggaaatgaatactattgtcagaaccatatctatatagtcaatcatttcctcttttaacgtctgtcttgttctctttttacccaccacatatgtataactatgtgaaaaattatatttgtgcataataaaatgtgataactttttacaacaaa

SEQ ID NO: 89156 - DNA, 495 bp, Homo Sapiens
gcggccgcggcccggactctcgcggtgggcgagcgccctgtgaggtaagcggccggtgcgcagaggctgcgggcgaacttgggcggccgggggaggggacccggggcgcttccccaggcgaccgacccaggaggcgccgctcagtcctggccgaggctgagcgtctggtcgggcttcgggcatcaggggtctggcaggaccatgaggcgtaccctcaggccgcccgcggctccgcggtcccccggcatccggaggctcaggcgcgccgacggagagctatgccttggtttaccctcccgtaaaactaccggacgcggagcatgtatctccgcggtgcctccagccctgagatttttcgagtgtgtaagtaaagtcgaagaagaagaagctgactcttgggatgggaagagccttcacctaggaacgcaggggcaaatatggggctgggcacccactgtgtattttatgcaaatctcaaggggcaaatatggggct

SEQ ID NO: 89157 - DNA, 484 bp, Homo Sapiens
actgtaaaacccaatgaaggtaagaatgcgttaagtatcttgattttctcatttttttgtagttgaaggccaagaaaagatacgtttaaagtctgtagcccagctattagggatacaaataagtgtgaagttatacaagaaccctctagagagaggctgttggccagaggtagcatctgcttctttggtggtcttggagcttgagagtgttgatgtcatttggtgtgtggggaccaaagataatgagcaaactgtaaaatgcttgactgtcttggacaaagacgatttttctcatacaaacactcacagtgtccctacggaacagtaaagcagtagaactaataatagcaataaccagcccaaattgaatggaggagagaagagagaggatttgggagaaagtggttttgtcattactcttggtgaagagtcaattgattatatccgaagaaatgtaggattgaataaattatatacaaatatg

SEQ ID NO: 89158 - DNA, 510 bp, Homo Sapiens
taaaatgtcaacagtcaaaatgccattctttttggccatcataagagggagtaggtatcactgctgcatgccagttgtttttgactagaatatgccaaccagagcttgttggggcaggagacgtttttccttacaacaagactgcctgtgccctgtgccctgtttgctacttcactgcaatggaatgatccgagttactgtatttcagagctgccccttccccagcagcaaacactcgctgagtccatgtctggcttcaggtgggagaaaatgtttcagatgaaacttactcaattcataccaccctgaaatggaggacagaggtgacaaacttcagtttaataggtttctcaccaagttgtatgttccattggcccaggattcttgcactaatgggtttctatcacatcatgtctataaatgggtgcactttactgtttgaatttgtaactgaagtactggatatttaagtgtgagtaatgtcttcattagaaaatagcagaaccaaaa

SEQ ID NO: 89159 - DNA, 543 bp, Homo Sapiens
gtgctgctgggaattgcgcgtggctgctgggttctctcttatgattgggtgctatggtctttagaattgggtcactggatttctgaggagccgttcgaactgtctcaccacttccctgcagctcccctgtgccgaagtgagtgccacttgtctgcagggccgtaccgcggaaccctctttgccgaccagccagtgatgtttgtctcgcctgccagcagccccccagtggccaagctctgtgaactagtccacctgtgcggaggccgggtcagccaagtcccccgccaggccagcatcgtcatcgggccctacagcggaaagaagaaagccacagtcaagtatctgtctgagaaatgggtcttagattccatcacccagcacaaggtctgtgcctctgaaaactacctattgtcacaatgacagtgacctcactggcctgtggtgactgcacacagctcgcaaaactgtctttggatgttcaaatgagaaacaaaactgtgaagagaaggaactggcgtatacaagatgacttctgaaaaaaaa

SEQ ID NO: 89160 - DNA, 555 bp, Homo Sapiens
tcctgagtggagaccgccttgctacttcaaaaacattttaaacccctattgtttagagagggttctcttggccatctaggatggaatccagccctggcctgtcttgtgaaagtgggtgcttcagtctgctttcaaacagactcagattagttgtcttttgtttgctggtggaacctcttctaatcttaataaatgggttaaagagctaccaagaggaccctcctaaataaatagtgcaggtataaaacaacatttttaaaacaaaatgtagagtcagctccatggctgccctgtatggttgcaacaattcttagaaatacattctttctttttaccaataaagattttgaaaaatccagtacagacaaaagagcaaagaatcatttccccataaaggttctacacattcaatattttagatcaatttttgtattttcatcaagagttaattcataaaacctggcatatagtagccagccctataagcttatgcattttagagggagttaattgtaaaacataattgagctcaatacaaagagacaaattcttaga

SEQ ID NO: 89161 - DNA, 517 bp, Homo Sapiens
cacactcccttcagccaaggcggccatttccccaccatcttctccaccaaccccaacctcctgctgatggagcgcgccagcacccgggaccgctggctgcacaagcccagctacactcgcttcaacctggacagccatcgctccacagagcttacgaatttctaccagatggtccagcagcatcggaagtactatcaagacaagacgggcacagtgcctcgagtcccctactttgcgatgcccgtgagggagccggaacggtaccccctccccaccgtcctgcctcctctgtgcccaaagaagaagtggcaccttttaagactagcccccgagaacctgaagacctaccagaccttcccatcagggaagagggtctctccacaggagcggaaaaagagagactgctactttgagttcagagcatgagacttttagttcagagcagagcctgatgcctgagatcctgggtcgtgaccagcctggcttgcttggaataaaatctttagccatgaaaaaa

SEQ ID NO: 89162 - DNA, 545 bp, Homo Sapiens
  misc_feature (255)..(355): n is a, c, g, or t
gttaaaatatataaacaagattaccattgaccagtttggaccaagttaacaactgacattaaagtaaaagcttggttagtctttttttcccccgttttttgagacagggttaaaccctgttgcccacaggagcacagtggcatgactacagctcactacagacttgaactcctgggcctaagtgatcctcctgcttcagcttcctgaaaacctaggattaacaggtgtgtgccaccacacccaaccaatttaaannnnnnnnnnnnnnnnnnnnnnnnnnnnnnnnnnnnnnnnnnnnnnnnnnnnnnnnnnnnnnnnnnnnnnnnnnnnnnnnnnnnnnnnnnnnnnnnnnnnnaccattcctggccccttggctattcttaatggaatgaagtcacagaaaacatttagtggtaccgaggaaagcttgattgtaaaataggtgactgactctatactgatagctctacttactcacctgttccctggctcctaaatttgctttctccatttcaacaaatgggaccataatttgtggagttgct

SEQ ID NO: 89163 - DNA, 467 bp, Homo Sapiens
gaatcataagctcttatgaggattctcaattttccagtacgtttttgagtattttctcttggattagttaagtctttatgatggctctaagctcagctttagaccatggagtaaaagtggttacagcaggcaggctggttgactagagagtctcactttgtaaggcatttgtccaacttcccctttttcattagcctcaaggagaaaaggtaactgagcaaaagggttactgtactcaaagcatcgaggcaaagaagagacagagaaggagcaatccaggttcatgtgctgcatgagcctttcatttgcgttttgtaaagaatcttttaggcaattttagatttgtataatcctttagatgcctctgcataccgatttaaaatgcatcccgttgtttttgtggcgttttcgatcctttcttttctaatgtgtcccataaataaacagttttatttaaagttaaaaaa

SEQ ID NO: 89164 - DNA, 406 bp, Homo Sapiens
tcagcgtctgaaagctgggtttgatgcgtctggaaaggcgtccctgacaggcgtcgttgccaggagcccctagtgccaccagcagccagcaggggagggcgtcctctgcccgctcacttctgacccttctctcgttgcacccggaacatggtgcagctgggagcagcctgggctgcgcggaaggctcagatttggggacggcccttgccagtgactgtgagctggggtgtcttggaaactcccagtctcagcttctccatttataagatgagaatgatcataccagactcaggcaaggttgtttgtgcattagtgaaatcagacgtattaaataaagtaccacattgatcgtggagttgttgaataaccaagaacacgcctatctgtctccaaaaaataaatgttg

SEQ ID NO: 89165 - DNA, 510 bp, Homo Sapiens
  misc_feature (313)..(313): n is a, c, g, or t
caggaaatattgaaaatggacatgtgaagctcattgttatacatttaagaaataacagagaacacctacctcttattggaaaagttggcctctcgtggaaaactgatatttttgatggctgtataaagagttgttccatgatggacgtaactcttttggatgaacatgggaaacccttttggtgtttcagttccccggtgtgcctgagatcgcctgccacaccctctgacagctctagcttcttggggacaaaacaatacaaacggtggatctacgttgtatacggaaaggaaagaggtgcacggtggagctnggtgtggatcagagagaccgaagaataccttattgtcaacctggtcctttatcttagtatcgcaaaaatcaaccattggtttgggactgaatattaacagtaggtggcaaattattgttgttatttagttgtttaatttagacaggccttgttctaggtgttgaaaattaaaataaagcaaatctgcagagtgcaaa

SEQ ID NO: 89166 - DNA, 469 bp, Homo Sapiens
  misc_feature (259)..(259): n is a, c, g, or t
tttcgttttcctatttcaatgcaaactgaaacatttctctttatttcttagatcaaggcttgtggaacaggatttgcctgaatcacaggatatgatttcttcctctaccacctctgttcttgtggctcagaagactgttctatgctgttgtgactataagaaagcaaaacattctactgaccacagcatctcctttagttcatcatgcaatgactccagtctgtctcatcttcctgtcttttctgaaggaacaacttgngaattccggagccatagtttacctatttcccacaaaaagcaatcctctgtgttcaggaaccaaggcagaaccctgcctctttttcagctctcagagccccagaaatcaaaaatttttcagaatttggcagatctttcacccttacaacctcagagctcttttatcaactctatttctgaacccctaaatatctgcaaacaaaaaaggaaa

SEQ ID NO: 89167 - DNA, 638 bp, Homo Sapiens
agtgcctgagcagcatggtgaccctgttccccaagctccagctggagtggaacgttcacctgaacatccctgaggtcacctcgccaaagccaaagaaatgcaagttgcctgcagcctcaccccggcacatccgccccagtggccccacctacaagcagccctttctgtctaggcaccgggcatgtgtgcccctgcagatggcccgccaacaggggaagcagatggaggctgtctggaagaccgaggtggcctcctccagttacgcaatagaaaaaaagacccctgccagccttccccgggaccagctgaggggacacccagatattccccggctgttgacactggacgtgtagtcctcctgccacaaaagcctgaacttcctgaaggcccagtaaggctcttggcactgtgcttaaggggcctggtggctgaacttgctctggtgatggaggactttgaccttctgcacgtcctctagcgagctctctggcaagcatgcagagtgtctgacattcttctcctgctttggtaacaatttcatcttcttaaaggcaaagaaagcctgcacgggccaagctgtgaagccaagagggttggaagacaaatatatatgtgtgtgtatctttgtgtaaaaaaaa

SEQ ID NO: 89168 - DNA, 414 bp, Homo Sapiens
gagggaaaagaaactatctgcaaaggaagattctcatgcacagattgaaaccctctgagatatcaaccccctagcttggcccgtgcaggctttctttgcctttaagaagatgaaattgttaccaaagcaggagaagaatgtcagacactctgcatgcttgccagagagctcgctagaggacgtgcagaaggtcaaagtcctccatcaccagagcaagttcagccaccaggccccttaagcacagtgccaagagcctgtgaaaacatgaaacctttgaaaatatgggtgccaaaatataaaaacaaagaatgtatgaatagtatgaaatctttataaaacataatattgtcagtttcattcactgtcaaatttaatattcaaaatagtctcattacatttataaaacttgaaaaa

SEQ ID NO: 89169 - DNA, 835 bp, Homo Sapiens
atggggtggcgggcgggtagaggcttactaagttatctaaacaggactttggtagcacaatgtttgggttaactggttaaagtctaggcctatatgtctaggctggtagagtcatgttgaagctaaccttgttcattatggaaaataagaacaaatttgattgaaaaagtcagaaaaaggtctctctatcagagggaaataacaggtggatatatgcactgtcactaaaagcccatttctatgaaaatgcagtacacctgaatctagaatcctctcgttgaaaagccctttgccattatggcttcagcttttactgaagagtcttaccaagaatatccacatgaaaaactgtcctgaatttattatagaaaaatcttggcaagaacttcgtttatcatcgaagtctcaaatgtagtgtccaagatgagaaatgtcattcaggaatttagttaaggaaaagctttgactcttttgcaaattcctaagcctgcttattttgggtgatgacatctgggtattattgaatttatctcttctctctcacttgccaagagttcagaacaaaatttgctgctctaacagagccatgatacgagcccacagagttgacacgttactcacttcatggctctgattcctctttctggttcgttagctttatcattaatccttttgtaggcaattccaaatttttttggaaaaaaggccaagcatataaggtatttcattttgtttgcagttgttaggccattgttaagggtgcaaatgaagcctataactgaggtaccactaaggagagtcacgataggcacatgatggaaggagatggggcagt

SEQ ID NO: 89170 - DNA, 885 bp, Homo Sapiens
gagaggcttctgtggctgcaaagaactctttttctactgtccttacatgtgaccttcatttttgtgcttataaatggtggctagagtgcctgccagtttcgatgctctcgctagagaaagagaagagcaagaagcaaaaggcacatttcatgtaagattgctacccattttggaaattttgctcaacaactttctcttatattttcgttggacaaaatatcatgtgttctcccatatctgaaagagtagaagcgcaatttctctttagggtcagaacaggattgctgccaagagaattggagttctgttaagggagaagtagagaatcaatactgggtaatcacctagtggtctctgccatagcaattgtctgatattctgcaattgagcatatttcaggccgtgaacatcggacatggttttgtcttcacaatggcagcaaatttagataaaattttgtttggggtcatcttgtgtgcatttcttctgtatcttcagcatggtctgtgcctttgtctttttgcagtatgtttttcttcctattgatactttctcttgtctcactaagagctttgttctttgataaaatgatacagattgataaattccacaaaggaaaacaacgcgctgaattaaaacaggctatttaaatacagaagcagcattctgttcagataattttcagtagggccaaatctttgttcatttttaaataaaatgatctattcattcacattaatatgtgttaatgaaattaatgtggcatggtacttaatattattaattgtgttaaatgttcatgcttccatgagggccatttaagaagaggtactcagttggatatacaggtagaatacaccaccctttaaaacttctatcgtgtat

SEQ ID NO: 89171 - DNA, 563 bp, Homo Sapiens
ttttttctcaatgtcaagtacttaagagttgttgcatgaagactggagatagtcaaatgagccagtggctctttaacaatatagggaattaggagcaagtatgagattctgattataaagttgtaggaaaactaacttcccagaaaaatgcacatagaattatgtatacaatgtcaggcgagttatgaactctgaagcccaatcacctaccaccagatccacagacctcaggttaaaaacccactaaaactaagttctcggggaacaggaatcgccaaacttgcttactaattctaattatgccttacccagggcaatgtatacaaacactacttagggaatatttgctgatcgataatttcctcataaaaataaccataacactggcgagtcgttttttccactaaagagccttttagtcaaattattttaaaagtcctaaacctttcactagtaacaccaatgatctcgaaaatcattattgcgctattcacatgtcgactaagctatcacgaatccaggtcttccagttgtctctctactcccttaaaatttagggcttc

SEQ ID NO: 89172 - DNA, 541 bp, Homo Sapiens
aagaaattctgctccttttagtaataaacaatgtcgtgtgacactttggaacgcttctctcgttacaaaccagcgtctttactgaaggtccttccgctgcagagctgcgcaatggatgtgtggacagagctagtcggcacgtggaggctctcctggttttcgagcaggaaacgtgctgtgagcaggaatcgcgagtgagttccatggcgtccccgggtcagcgcgcgtgcaggaatcgcgagtgagttccatggcgtccccgggtcagcgcgcgtggggtcctgtctcgctggctcaccactggtggccagggcatgtctcccccagccctgagtctccgcagtggtgaccagggcatgtctcccccagccctgagtctcccggcagtggaggcagcgtgggcacagggtttgtcacagcctgtaagtgaatggaggacacaaaaataaccagagaggcaggctctgccctccgggagtgcacaggcggtttttaacatgtgtgcgttcatgtaattaaacgtctccgtttgtttcaaaaa

SEQ ID NO: 89173 - DNA, 505 bp, Homo Sapiens
acataaaaagaaatacagaatttaaaagtgctttgatacttgcgttaaacaagctcctgtttataaagacttggtggccatgtaatgagattgttctaattacctaattaaatagctgctactaaaggaagaggagttctttaatttagagcaaaaggtttcttgaggaaatactctttccttctacaatattttaaatctatacagaatttatgccaagaaaaagaaatggaaccagttatactacatcaagaaccagtagaagacacaataggatagaaactctgcagtctgagggtacgttatgtctcaataaagtagagtagacaaaacactgacccatcacttatgtctcttgaaggctgcttaacactatgtttctttaaataaacaacaacagagcaatatacagcttatttgccaaaattaaggataccgggtatggtcacttcatcaaaataccccccaagataaagagctaggaaagcaatataaaggttttcat

SEQ ID NO: 89174 - DNA, 779 bp, Homo Sapiens
ttttgttacaaaacatggatcgatttattattcaaattttggtagtgttttcaattttataatttagcaaccgtggaactgaggtataccttgttgagggaggttaaagtaatgcttggaagcctctttactgtaccccactttgatgactttatgtacacagaacagcagcacactaaacattcacaagctgtgtcatattggcattacaatagtcatttatagaaacaacagcaaatgcaataaaaacaagttaccctttttaaaatctgaaatgaaaagtttttgatttaaaaaaaatagcagtagttcatttaaggaattagtgtcttctgacagacattaagaaatctgatgtcagttttcaaacactccattagccaggtccaaaagatccttgatttggagagggctacattcttcatgtacactttttcaaaagtttctttatagagtttgcaaggtttctcttagtctcatgtccttcacatctgtgctgtcggcaatgcagtaagtctcccagagcaacatttttcaacaaagggtcttctttcttaacatttccaagagacatcctactcattttacacagaaaataaactgtaagcagtttctttagcttagcagctccagttcagagtcccatttcttagagtgcacagatggcgcaaccatcatagactagattctttgggaagaaagtcaacatttgtcaccattgtgaccactgtgtacaatgtcctctggggaataaattttgtagtctctgcatctgggta

SEQ ID NO: 89175 - DNA, 555 bp, Homo Sapiens
  misc_feature (155)..(177): n is a, c, g, or t
ctggatggaatgatgtgataggatacaattttaaaaagaaagaaatctgaactttatcaaaaaaattgaactctgaattttatgtaaacttttaagtgattgtagggttgggatttaaaattacatgttctccatttgtgaattagaaaacgtcnnnnnnnnnnnnnnnnnnnnnnnatactttctagtttgtaacattacaatacacatatgtgtgtatttagtccataaaaatacctaatttgaaacttaaaattatttgcagtgatcaaaattatgtcccactgacaaagttttatacagaggaagctctccaatttgttaatttgaattcaaatattcacgtgttaagtttccttacagtacatgattttacgctgttgccattttgaatgttgtaaattattttttatttcagtaggtttttgggaaacaggtggtgcttcgttataggaataagttctttagtggtgatttctgactttttgatgcacccatcgtccaagcagcgtacactgtacccagtgtgtatgtagcattttatccctcaccccc

SEQ ID NO: 89176 - DNA, 455 bp, Homo Sapiens
aacggatgtgacttctccccaacttggctaatggggatttactttgtctttttacacccgtgagaatgttcggggtcccagagttccttcctcactcttccaacaggttccatgatttgggggcgcctctgccgcaggccctttctacctgagtgttctctcttctgcaacacccgttttaaccccttttaaaggaattgggggctagccagactagactaggggcggcgaaacgcactgaagagagttggatacagaatttcttgcaaacgaggtcgagttgcgtctgggatacggtgtcatgccccacccccgccccacgaacctgccggccccacctttcttttgttcgcctgcagaaacccgcacggccttcatacgtgcatttgaaattacctaagggcgtaagcaatatttcctctgtcacggattaaaactttcgatgtaacggtgtt

SEQ ID NO: 89177 - DNA, 725 bp, Homo Sapiens
  misc_feature (468)..(510): n is a, c, g, or t
  misc_feature (609)..(609): n is a, c, g, or t
  misc_feature (674)..(674): n is a, c, g, or t
  misc_feature (693)..(693): n is a, c, g, or t
agcacacagcacactctcagccctggataccagactgtgagcaacactgggggcaccctggccatgaggagtgtcactgatgccctgagaaggcactaaacctggagtcagacgctggggtttgagccgcagccctactgttgtctatgtgactttcggagcctgtccctctctgagcctgtttcctcacctgtgacatggagcagaagtttctacattgtctggcctcaggggtctaggcaaatcctagcagtgactgaatgggaagccaaggaagtggaaatgggacatggcccctacttcaagtagaatgaaacccttgtgacctgctgtaagcggaaggttgtgtagcatttcaatggggcagaaagaaatctgatactgaaaagcctgtttgggaacccttggactaaatgtctcagaagccactccattttgagcattacttctgtctaatcttaaatggtnnnnnnnnnnnnnnnnnnnnnnnnnnnnnnnnnnnnnnnnnnnggaatgaaaagtcaaaatgacagcagggtgtctgagccagggataagctgagaggctataaagagggctaacagcccataaggtttatttgctcaacanacagtgcagaaaggtcaaaaccaggtgctacaaaatccctttcttcttctagaatataaccatanaacagataacacaggcagntcctaatttgtagacaggatgtgctcccaaat

SEQ ID NO: 89178 - DNA, 521 bp, Homo Sapiens
atatgtcccagaaattgagtttactgttgcttgtatttggactcatttggggattgatgttactgcactatacttttcaacaaccaagacatcaaagcagtgtcaagttacgtgagcaaatactagacttaagcaaaagatatgttaaagctctagcagaggaaaataagaacacagtggatgtcgagaacggtgcttctatggcaggatatgcggatctgaaaagaacaattgctgtccttctggatgacattttgcaacgattggtgaagctggagaacaaagttgactatattgttgtgaatggctcagcagccaacaccaccaatggtactagtgggaatttggtgccagtaaccacaaataaaagaacgaatgtctcgggcagtatcagatagcagttgaaaatcaccttgtgctgctccatccactgtggattatatcctatggcagaaaagctttataattgctggcttaggacagagcaatactttacaataaaagctctacacattttcaaa

SEQ ID NO: 89179 - DNA, 734 bp, Homo Sapiens
  misc_feature (424)..(479): n is a, c, g, or t
cacatccagagctcgctcagctgctgcccagcctcggctgtgaggataggctggctgggcagcacgtctctccccacagggctccctgagaccaccaggaagagcccccaaccaatcttgggattctcccttcgtgcggttgtctgggacctttttccagggtcaaagcagatcgtgaggaggaagctgagatgccctgtatccaagcccaatatgggacaccagcaccgagtccgggaccccgtgaccacctggcaagcgaccccctgacccctgagttcatcaagcccaccatggacctggccagccccgaggcagcccccgctgcccccactgccctgcccagcttcagcaccttcatggacggctacacaggagagtttgacaccttcctctaccagctgccaggaacagtccagccatnnnnnnnnnnnnnnnnnnnnnnnnnnnnnnnnnnnnnnnnnnnnnnnnnnnnnnnngcctctgcctccttcaagttcgaggacttccaggtgtacggctgctaccccggccccctgagcggcccagtggatgaggccctgtcctccagtggctctgactactatggcagcccctgctcggccccgtcgccctccacgcccagcttccagccgcccagctctctccctgggatggctccttcggccacttctcgcccagccagacttacgaaggcctgcgggcatggacagagcagctgcccaaagcctctg

SEQ ID NO: 89180 - DNA, 1084 bp, Homo Sapiens
  misc_feature (670)..(715): n is a, c, g, or t
tgtccagcagggcaggtcctgggagccaggcagatgtacttggcgtggtgcgggcagctgtgcgccgtgaagggagccctggcagcccgtcagcagtgggcggacagccatgaggcgtggcagtgaagcgttgtcgcccagcacagcagcagcagcggccggcagcgtccagcctggggccccgctccgggcccttggttgaggtgcacgggtgtatccagtagcccgcgagccctcaagggtggagaagtgggtgccaaacctgggaagcccgtaggcatggaatagctctctccctccccccagctggtgggtggcctgtgaggggaacaacttcagggggctctgggccaggctggggctggggccggtgggaggactgaaggaaaagaaggctggaggctgtgggggcccagaggctttgggcagctgctctgtccatgcccgcaggccttcgtaagtctggctgggcgagaagtggccgaaggagccatcccagggagagagctggggcggctggaagctgggcgtggagggcgacggggccgagcaggggctgccatagtagtcagagccactggaggacagggcctcatccactgggccgctcagggggccggggtagcagccgtacacctggaagtcctcgaacttgaaggaggcagaggcnnnnnnnnnnnnnnnnnnnnnnnnnnnnnnnnnnnnnnnnnnnnnngctgaggagcatggctggactgttcctggcagctggtagaggaaggtgtcaaactctcctgtgtagccgtccatgaaggtgctgaagctgggcagggcagtgggggcagcgggggctgcctcggggctggccaggtccatggtgggcttgatgaactcaggggtcagggggtcgcttgccaggtggtcacggggtcccggactcggtgctggtgtcccatattgggcttggatacagggcatctccggccggctcccgctgcccctgcccggactggcgccccgagtctcagcctggtccctggtcccgcgtgcgctcccgaagttcttctgtgcactcccccaagtttcgtaatcccgggaattccgg

SEQ ID NO: 89181 - DNA, 1358 bp, Homo Sapiens
  misc_feature (1126)..(1126): n is a, c, g, or t
ggcacgaggggtggggcgcgtctcagcagtggtgtgcacggcttgggctgagaggcccttctcaggatcctttccttcctcacccctacccattcctttgcagttgtccgaacagacagcctgaaggggcggcggggccggctaccttcaaaacccaagcagcccccagatgcctcccctgccaatctcctcacttccctggtccgtgcacacctggactcagggcccagcactgccaaactggactactccaaggtgaggtcccaccccgtgtctgcctaggggaggtctatgagcacatgcagtgcctttgtgcgtgttaggagagctaccccctctggaaggactgaatgagaaaggaggtttaaaaaagaaagaaagaaaagcgactccctccacgttcgacagatcaaagagaggatccccctctcggctgaccagattgggaaaatgcaccccctcaggcaggtgcccaattagaaaaatatgtccttttggcagctgcagccctgggttaatatgtgagacttggcaagtgagagcctgggcaggatctcagatccactcccactcccgggatctggcatccaagtgtctgacacagccatacgtggcagtgggtgtaggagcctgcctggggtgctgaccccactggaccgtcttcctagttccaggagctggtgctgccccactttgggaaggaagatgctggggatgtacagcagttctacgacctgctctccggttctctggaggtcatccgcaagtgggcggagaagatccctggctttgctgagctgtcaccggctgaccaggacctgttgctggagtcggccttcctggagctcttcatcctccgcctggcgtacaggtctaagccaggcgagggcaagctcatcttctgctcaggcctggtgctacaccggctgcagtgtgcccgtggcttcggggactggattgacagtatcctggccttctcaaggtccctgcacagcttgcttgtcgatgtccctgccttcgcctgcctctctgcccttgtcctcatcaccgaccggcatgggctgcaggagccgcggcgggtggaagaactgcacaaccgcatcgccagctgcctgaaagagcacgntgccaactgttgggcgggcgacccccagccaaccagctgcctggtccccgcctggttgggcaaactgccccgagctgcgggaccctgttgcacccaggggcctgcaacggcatcttctaccctcaaactgggaaggactttggggccccccttcaaccccatcatttgaacaaaatccttcatggaaccgcctggccctttttggacccctgggcctgggaaaaaccctggg

SEQ ID NO: 89182 - DNA, 2210 bp, Homo Sapiens
  misc_feature (1529)..(1552): n is a, c, g, or t
  misc_feature (1570)..(1998): n is a, c, g, or t
  misc_feature (2021)..(2021): n is a, c, g, or t
cgaaacttgggggagtgcacagaagaacttcgggagcgcacgcgggaccagtgaccaggctggagactcgtgggcgccagtccgggcaggggcagcgggagccggccgggtaggttcccttcggggaacgtgcatctgtttttaggagcggtgcatgaaggagatgggtgtacgcgcgggcagagaggatgttgtagggccggctaccttcaaaacccaagcagcccccagatgcctcccctgccaatctcctcacttccctggtccgtgcacacctggactcagggcccagcactgccaaactggactactccaaagttcccagggagcctggttggctggccccacttggggaagggaagatgctggggatgtacagcagttctacgacctgctctccggttctctggaggtcatccgcaagtgggcggagaagatccctggctttgctgagctgtcaccggctgaccaggacctgttgctggagtcggccttccttggagctcttcatcctccgactgggcgtacaggtctaaagccaggcgaggtgcaagctcatcttctgctcaggcctgtgtgctacaccggctgcagttgtgcccgtggcttcggggactggattgacagtatcctggccttctcaaggtccctgcacagcttgcttgtcgatgtccctgccttcgcctgcctctctgcccttgtcctcatcaccgaccggcatgggctgcaggagccgcggcgggtggaggagctgcagaaccgcatcgccagctgcctgaaggagcacgtggcagctgtggcgggcgagccccagccagccagctgcctgtcacgtctgttgggcaaactgcccgagctgcggaccctgtgcacccagggcctgcagcgcatcttctacctcaagctggaggacttggtgccccctccacccatcattgacaagatcttcatggacacgctgcccttctgacccctgcctgggaaacacgtgtgcacatgcgcactctcatatgccaccccatgtgcctttagtccacggacccccagagcacccccaagcctgggcttgagctgcagaatgactccaccttctcacctgctccaggaggtttgcagggagctcaagcccttggggagggggatgccttcatgggggtgaccccacgatttgtcttatcccccccagcctggccccggcctttatgttttttgtaagataaaccgtttttaacacatagcgccgtgctgtaaataagcccagtgctgctgtaaatacaggaagaaagagcttgaggtgggagcggggctgggaggaagggatgggccccgccttcctgggcagcctttccagcctcctgctggctctctcttcctaccctccttccacatgtacataaactgtcactctaggaagaagacaaatgacagattctgacatttatatttgtgtattttcctggatttatagtatgtgacttttctgattaatatatttaatatattgaataaaaaatagacatgtagttggnnnnnnnnnnnnnnnnnnnnnnnncctcgtgccgaattcttnnnnnnnnnnnnnnnnnnnnnnnnnnnnnnnnnnnnnnnnnnnnnnnnnnnnnnnnnnnnnnnnnnnnnnnnnnnnnnnnnnnnnnnnnnnnnnnnnnnnnnnnnnnnnnnnnnnnnnnnnnnnnnnnnnnnnnnnnnnnnnnnnnnnnnnnnnnnnnnnnnnnnnnnnnnnnnnnnnnnnnnnnnnnnnnnnnnnnnnnnnnnnnnnnnnnnnnnnnnnnnnnnnnnnnnnnnnnnnnnnnnnnnnnnnnnnnnnnnnnnnnnnnnnnnnnnnnnnnnnnnnnnnnnnnnnnnnnnnnnnnnnnnnnnnnnnnnnnnnnnnnnnnnnnnnnnnnnnnnnnnnnnnnnnnnnnnnnnnnnnnnnnnnnnnnnnnnnnnnnnnnnnnnnnnnnnnnnnnnnnnnnnnnnnnnnnnnnnnnnnnnnnnnnnggccgcgtggctgggtttttcanaagctccgcccctgacgagatcaaaaatcgagctcattcagagtggggaaccgacggatataagaaccaggtttccctggagtcctcggcgccccgtccacctgcgttacggtctgtcgcttccctcggaacggggttccaaaccccggggactatcgggaggctcgtcactgggggtcaaccccgtac

SEQ ID NO: 89183 - DNA, 455 bp, Homo Sapiens
  misc_feature (92)..(92): n is a, c, g, or t
  misc_feature (276)..(327): n is a, c, g, or t
ataatgtggttggccaaggcctgttggtccatccagagtgagatgccctgtatccaagcccaatatgggacaccagcaccgagtccgggacnccgtgaccacctggcaagcgaccccctgacccctgagttcatcaagcccaccatggacctggccagccccgaggcagcccccgctgcccccactgccctgcccagcttcagcaccttcatggacggctacacaggagagtttgacaccttcctctaccagctgccaggaacagtccagccatgnnnnnnnnnnnnnnnnnnnnnnnnnnnnnnnnnnnnnnnnnnnnnnnnnnnncctgcctctgcctccttcaagttcgaggacttccaggtgaacggctgctacaccggccccctgagcggcccagtggatgaggccctgtcctccagtggctctgactactatggcagcccctgctcggc

SEQ ID NO: 89184 - DNA, 254 bp, Homo Sapiens
acagacttcgcactgcgatactcagagaacggagagcaggtcgtaactgctgtacatcccagcatcttccttcccaaagtggggcagcaccagctcctggaacttggagtagtccagtttggcagtgctgggccctgagtccaggtgtgcacggaccagggaagtgaggagattggcaggggaggcatctgggggctgcttgggttttgaaggtagccggccccgccgccccttcaggctgtctgttcggacaa

SEQ ID NO: 89185 - DNA, 507 bp, Homo Sapiens
gtaattatgttaggagagattctcagttcaatctaatcctgtctaaacaggctgaaagaaattagtcactcagaattatataaaaggctctattgagtcttgcaatggtaaacaacagaccctggagtttgaggacaacaccaaggtactgccatacttgaggtggagatggcgtttctcagccagtatcgtactgaataggcaaaagctggaagcagtccctttgaaaaccagcacaagacaacgatgacctctctcaccactcctattcaacatagtattggaagctctggccagagcattcagccaatcttggcagattgaggtactgcaaaaatcatgagcagaagactttatgccattgaatgccattgagacggtcaatgtaacaaaggacagctgtttgtttttcttctgcttttcatgggccagtatcaactaaagattgtcagtttttaagaccctacctaaggatgcaatgattagtaaagaaaattcaacaataaa

SEQ ID NO: 89186 - DNA, 288 bp, Homo Sapiens
ctgggagtgcagagactcaagacagatatgaccacgtgaagagacaactgtaaaacaagtggcaggtcacagaagctggaaccagttgatcgggccgagcctgcagactccctcatcctttccggccttcaacactgatagctctgctctctctccccaacctcagtgccttcatcctcccctgtgttcccatggatgcttggtcctgactttgcacctctccctcacacccagtgtcctttgtttttcctctgccacttgggaggctgatgggaggatcacctgagc

SEQ ID NO: 89187 - DNA, 449 bp, Homo Sapiens
gcccttcatggtccgagaaggaaacggtggaaggtttcactacaacagaaacagaaaggcaggacttgcagcttctcagggggaggcacagcaggtgtgaaggcgacaggaccacgtggcacggggcccctggcctaaagtcctggcgccgccacacctgccccccaggtttccaggaccctcatcttccagggctgagtgtgggtggatcccaggatggggcccaggcagcccaggatgggaggagacacctggggccctgaggaggagacagagctgagcagggcagggtgagtggagaggctgggccagcacaggcttcgaggcggcctggatgagatggcagagggtgatggtctggccacgggaggtgggggagccgggccccccacggcaagggcctggtgggcggcaggacttcagccctcactggtgggaacccacaccct

SEQ ID NO: 89188 - DNA, 465 bp, Homo Sapiens
  misc_feature (107)..(107): n is a, c, g, or t
atgtagcattgagtgagcctggcagattggaagataaaccaagggtgatgataaaaccaattacacactaacccatttcctcctccgtgaaatgagggaatggcccncagacatttttccagacctcttctgtcctaagagtggagctgggtgacagagcaggtgcaagccggcctttccctgcctccccggggaacgcactctgttcggtgagagcaactcagctcgcattgactcctttcagctgcaggagtgtggccgttcagttctcatttgaactgttgacaacagttgtcttctgagaatcatgagttagagcctccctttaggcttctgactccctcaaaagtaccagacaacacaaacttttcccctcttgttaccttggctctctaagctgtatctacttctatacaaggcgaacaattttgtctttttaaattaaaaacaacaacaaaagcaaaa

SEQ ID NO: 89189 - DNA, 498 bp, Homo Sapiens
cgatcctggggccatgcacatgtcaggctgcaattaccagaaagatttcagcttttgctcctggcagaggaccttgtttatatttgtcattggcaccattgcttccatcactgggccaaaagcttattagccactggaagttggcagaggtgcatggaccagagcagctgactgtgacatgaggaactgatattcttgcagtcttaacagtgtctccactgcagctttctactggccaaatttgtgaggacccacctgtaacaaggggcaactggctatctttagtcatcagcatcaaatccatcttcagcccgaaagacagaaataatttaatcctagacttggatagattcggtgagttttttctttcatgctctatgtaagaaaaacccacaaagaaagcagccaaaaatgacttttacccctgagttgagatcacctagattttattcatcagtgaaagctccgagaaacgacaaagccttgtgaaaatacaca

SEQ ID NO: 89190 - DNA, 505 bp, Homo Sapiens
ggcgacccttggggggcatgggcagtggagcagccaccggccctgacctggaccacgtgctgggcgcctcctggcagcccgttctgctcccgaatgccccggcttagtcagtctgggatgcggccctggacaccgggctttatgcagctctgaagtgatcccagcacacagcccgggtcaagctcagcgctcggcaaccataggcacccaacaacgggctgcagccatcagtaacaacggcagctccaacgcccagagaactcacggagcagacacacatcagatgaagacgcggaggcctgagcgctgggggtcgcccggggctgcacagcgggtcagaggccaaccctgggcggagccaggccacaccctccctcaaggattcacagtctccccaaagtaaccgcaacgagggaccctcccgtcaccaaacttcctttcagtcacttccgcttgtactaattctggcccaaccgttcattatatttttacaattcttaaaaaa

SEQ ID NO: 89191 - DNA, 577 bp, Homo Sapiens
ttttttcacagtacaagacagagaaatctactttaatattcacatgtaaaagttacacatcacaagagattggacagtagcttagcgtaacatagctatagtgaaaatcatttttataaaaaaataatctagatgcggtcatcagaatttttggtctgcttaagttaatgtttgaagatcgacttttatccctgcttgaaggatttgccattatgccttttttttctcccactgttgcctattaattctttggaggaaggaaagcagaaagtgttcatttccaagagtttgtcctttggtagcaagcagagaacatttttttcatttccatgatttaaataatctgtacagacatgaaacttagtgacattaagctttagtgtaaaatgaagagtaataagcaattttttttcactttgataaaacagcagatttcgtaaactccttaaggatccaagcatttcctcatcccatatgcaaaatcattcagaatccattttgacctcagttgaaaaacaaaaacaaacacttactctgtatatattacactataaaaccctgtacttaaaaactgata

SEQ ID NO: 89192 - DNA, 544 bp, Homo Sapiens
  misc_feature (529)..(529): n is a, c, g, or t
ctgagccaccgcactcagccctattgtgtccagaattggtgggctcttggtctcactgacttcaagaatgaagccacagaccctggtggtttatttaacaatgtgaagtagtcctgggaagttgtactttgagcaaggtccgcaagcagtattcctgcacttctccagtcatgccccagcgccaggtcggaagctgtccacatgcggggatggagcctggcgtcctgggcccacaaggacagggccctgaatatggacttagcagaacaaagttgggaaggcaactgcactcaccccttgtgcctcctgtggtacctgcccttcacggttcctggtggggacactcaggcaccagcttcatggctggactcagatgacacaacgccaggaaaaaaagtaaaagccccattaccctttccaatgcctagataaaatagatgtctaataaaaacctgctaataatcatttattgtttgtttatatacaattaaaacaaacattaaaacaatcatttaaaaacactcttttntaatgagtgtgggat

SEQ ID NO: 89193 - DNA, 609 bp, Homo Sapiens
aaggtagttatgcttgtcctagcttggaaattggatgcaaaaaacatgggttattttactctacaggagtggttaaaaggaatgacttctctccaatgtgatacaacagaaaaactcagaaatactttggattacttaagatcattcttaaatgattctacaaactttaaacttatttacagatatgcgtttgactttgcacgggccgaagatggtgttagtgattgcgagctgctggctggcacccttgcagagcaggagaaaaggaccagcgcagcctagacataaacactgccaagtgcatgttgggactgttattaggaaaaatctggcccctttttccagtttttcaccaattcttagagcaatcaaaatacaaagttattaataaagaccagtggtgcaatgtcctagagtttagcagaacaattaatcttgacctcagcaactatgatgaagatggagcatggccagttttgttggacgagtttgtggagtggtataaagacaaacagatgtcctaggactttatgcatagcagcgagagacccactgttaccacagttttgtcacccattagccataaattgctgttattttcaaaaaaaa

SEQ ID NO: 89194 - DNA, 1290 bp, Homo Sapiens
ggggcagtgagctggtggggggaccgcgaggcgagcgcgggagcctgggcggcgagccgggtgtgagctgcctgaaaatgcactcggatgccgccgctgtcaattttcagctgaactctcatctctcaacactggcaaatattcataagatctaccacacccttaataagctgaacctaacagaaggcattggccaagacgatcaccaaacaggaagtctgcggtcttgcagttcttcagactgctttaataaagtgatgccaccaaggaaaaagagaagacctgcctctggagatgatttatctgccaagaaaagtagacatgatagcatgtatagaaaatatgattcgactagaataaagactgaagaagaagccttttcaagtaaaaggtgcttggaatggttctatgaatatgcaggaactgatgatgttgtaggccctgaaggcatggagaaattttgtgaagacattggtgttgaaccagaaaacgtagttatgcttgtcctaacttggaaattggatgcacaaaacatggggttattttactctacaggagtgggttaaaaggaatgacttctctccaatgtgatacaacagaaaaactcagaaatactttggattacttaagatcattcttaaatgattctacaaactttaaacttatttacagatatgcgtttgactttgcacgggaaaaggaccagcgcagcctagacataaacactgccaagtgcatgttgggactgttattaggaaaaatctggcccctttttccagtttttcaccaattcttagagcaatcaaaatacaaagttattaataaagaccagtggtgcaatgtcctagagtttagcagaacaattaatcttgacctcagcaactatgatgaagatggagcatggccagttttgttggacgagtttgtggagtggtataaagacaaacagatgtcctaggactttatgcatagcagcgagagagtcactgttaccacagttttgtcacccattagccataaattgctgtttgtatcaaagcgcatgctgcttctcttgcactgtttccctttcgcagggacatgttggtgtttgctattgaattggccagctctgcttgctgtgtggcattgttctcttggaaggctgctttgcagtttgtatttacactacagattggtgaatttgccaacgtcctcactgtgattatgtgtatattgctgtttaaattttgtatatgtgtataaaaggaaaaagcttcacctagagattatttctgaaaaatgtattgt

SEQ ID NO: 89195 - DNA, 983 bp, Homo Sapiens
  misc_feature (872)..(935): n is a, c, g, or t
ttccgggatcgagcgcgggagcctgggctgcgagccgggtgtgagctgcctgaaaatgcactcggatgccgccgctgtcaattttcagctgaactctcatctctcaacactggcaaatattcataagatctaccacacccttaataagctgaacctaacagaagacattggccaagacgatcaccaaacaggaagtctgcggtcttgcagttcttcagactgctttaataaagtgatgccaccaaggaaaaagagaagacctgcctctggagatgatttatctgccaagaaaagtagacatgatagcatgtatagaaaatatgattcgactagaataaagactgaagaagaagccttttcaagtaaaaggtgcttggaatggttctatgaatatgcaggaactgatgatgttgtaggccctgaaggcatggagaaattttgtgaagacattggtgttgaaccagaaaacgtgagtcaaacttactgagttgggtgaatcagttggttgttttctcatacttaaatctttgttctttagcaaactaaataaaataattcaaaaagtagtggctatggcagtcttgtatgaagcaggctaagaaataaggtctaattctagattgacctataagcagattctccattcctggaagtggtattggggaaactacgggtatttttttccctccctttaatttcctgggatggaaaaagggcccggaaagccccaaggcttacaaaatggggtgggcccatttggccctccaagggcgggaccacttgggaggcccctttggacccccgtggaacctttcgggccccccccgaaatgggtttttgcccccaggggaaaggccacctccgggcgcttnnnnnnnnnnnnnnnnnnnnnnnnnnnnnnnnnnnnnnnnnnnnnnnnnnnnnnnnnnnnnnnnggggttacctcccccacgggaatatttccccccaaagggagggggccc

SEQ ID NO: 89196 - DNA, 1094 bp, Homo Sapiens
  misc_feature (628)..(689): n is a, c, g, or t
gaggtgataaggtagagggagtataagtggttggacatgttcaataactgggatatatggatggctaagaagtacaaacagattcgtttgtggtgccacaagggcatcccgccttttctgcggggccgtgcttggcagtacttgtcaggatttggctcctcaggtctcagcccaccaccgctcccaggagagcttgacgtcccaagagagtgaggacacctacttgtaaccctggcagctaaggcctccagggcggggtctccatataactacacggttcatgaactgacattccacatcctgcccaccctctgagggccaagctgcctggccactgggctgggctggagtctggctggtccaacacagattctgcctggtccaacacagattctgcctgagcctccttatttattttctttacagtggcactcaggctggcccagccagggcaggcagaagctagggcctggggggtggggcctccttcagccccctcctcctgggggatgctccccagggttagggtgctggtgtgaggggaaagggtggggtgttctttgtgtaaaatagaaacatggttttgtacagaaataaacagccttgtatagaagaaaaaagacacatnnnnnnnnnnnnnnnnnnnnnnnnnnnnnnnnnnnnnnnnnnnnnnnnnnnnnnnnnnnnnncaggaaacaacaacccaaagcacaaaagaagacgacacaatcgtgcaaatgagtagaacaatgccaataataaggaaggacgggcgtggcaggacagaccactgcacgctgcaggagagcacgtatactccccttaccttggaagtccagcgaatgtcatacttggggaagagagcgttggcaggcacaccaaatagcgatagcagcacggaaaattgagacaaaaggcaaacaggagctaggtcacaggatcgacaaattacaagaacactaacataagctaactgtaagtatacgaaggaaaaccacatcacatgagtcctcccatttacggtggagaccaacacacaaatcgcaagcatggagggcggcaggactagacccaaatgcaggcagccttgccga

SEQ ID NO: 89197 - DNA, 348 bp, Homo Sapiens
ttttttaccttaataatacatcgctactttcctgtcccaataatagctggaaaataaaagccatcgagacctgctggggccatctcccagtttgaagtccatctctcttctaaccttagaacctttttatctacagcaactctaacagcaaacaggagaaaaaaagaacaatgttctttctgaaccaaagcacacaaaaatgttctttctgtggaggtcttgattccacttgaagtgctgttataaccatgtgtgtttcatgttaatgctccacatgaagcaaggaaagagggagtgggacaattctcaactgtgtccagcgtaacttaaataaaacctttaactcca

SEQ ID NO: 89198 - DNA, 322 bp, Homo Sapiens
catgggaaagagatcatacgcactgcactggttacatggattacagctgcagacttctaacacaaaatccacacacaagtacacggacccaggtggaggcctcagccccttatttcctgcttctctccactgtcttattttcaagctgctactggtgcaccatgagaacctgatttaatactaagtgtccataccaaagcaccattcaactctgtgccacccaccaagaaacaagagagtttttacacaatggctacttgtagaacctccgaactacctacagagtccccgtggtgacatgctgtaaagtactccgtatttg

SEQ ID NO: 89199 - DNA, 362 bp, Homo Sapiens
acaaaggacactgcctcatgttttttgctcacaagaaaatgaaacagagtgcttaggattctctgcctcctcatctcgccccacttgaaggcctccacccctggagaagtcatctatttaatcactcccctttggcttgaaagagctaatacacttttacaatatgtattcagtttcttccaaaaactaatatgcacctgggccaggaactaagccagatcaattgtttgagataaccgatgttatattatgctgtagggacagacattgaactttggcatggacacttagtattaaatcaggttctcatggtgcaccagtagcagcttgaaaataagacagtggagagaagcaggaaataa

SEQ ID NO: 89200 - DNA, 441 bp, Homo Sapiens
tcagttcagaaggcacaggggattgtattcaatggtgtgtggtttattgacaagaggttctttttgagaaatgtgtccctgggcaatttcatcattgtgcaagcatcaagggtgaattttcacaaacctacaaggaataccctactacacacagggtatgtggattagcgcagggttcccagacaactaacctgtacagcgtgttactgcactgaacactgcaggaaatggaaacaccatggtaagtatctctctatctaaacacatcaaaacatggaaaaagtttagtgaaaatatggtattacaacattatgtggccacaaacatatatgtggtctactgttgactgcagcattgttacgtaacacatgactttactcaaattgacgtgggttgggggggactaaaaataaataaaaccccccaagacgaatcttaaaa

SEQ ID NO: 89201 - DNA, 305 bp, Homo Sapiens
tcagcctcatctgctgtatagaattgccccggatggagaaagctaggaaatggtacacaggccttgggcctacttaactaaaatgacctaaaaaatcagtgaaaaatcaaggctgggtctttgcttgataaggtagcatccacacaccttggctcttgtccatggcagtcaaaatattctatttagatgagaaaaaagctgtacattagggtaactgctaggtttcctgaaatgaagacgttgtacctgctatgtctcctgctcatattccttacatgaatctaaataaaaatagtattgaagcc

SEQ ID NO: 89202 - DNA, 1691 bp, Homo Sapiens
  misc_feature (81)..(115): n is a, c, g, or t
  misc_feature (1620)..(1620): n is a, c, g, or t
tgtatcgatcactatagggcgctagcgggcgtatttgccgaacgaccgagcgcagcgagtagctgagcgaggaagcggcgnnnnnnnnnnnnnnnnnnnnnnnnnnnnnnnnnnncagtcgacggtaccggacatatgcccgggaattcggccattacggccgggggggacaaagcctggggctgggcgggggccatggcgctgccatcccgaatcctgctttggaaacttgtgcttctgcagagctctgctgttctcctgcactcagggtcctcggtacccgccgctgctggcagctccgtggtgtccgagtccgcggtgagctgggaggcgggcgcccgggcggtgctgcgctgccagagcccgcgcatggtgtggacccaggaccggctgcacgaccgccagcgcgtgctccactgggacctgcgcggccccgggggtggccccgcgcggcgcctgctggacttgtactcggcgggcgagcagcgcgtgtacgaggcgcgggaccgcggccgcctggagctctcggcctcggccttcgacgacggcaacttctcgctgctcatccgcgcggtggaggagacggacgcggggctgtacacctgcaacctgcaccatcactactgccacctctacgagagcctggccgtccgcctggaggtcaccgacggccccccggccacccccgcctactgggacggcgagaaggaggtgctggcggtggcgcgcggcgcacccgcgcttctgacctgcgtgaaccgcgggcacgtgtggaccgaccggcacgtggaggaggctcaacaggtggtgcactgggaccggcagccgcccggggtcccgcacgaccgcgcggaccgcctgctggacctctacgcgtcgggcgagcgccgcgcctacgggcccctttttctgcgcgaccgcgtggctgtgggcgcggatgcctttgagcgcggtgacttctcactgcgtatcgagccgctggaggtcgccgacgagggcacctactcctgccacctgcaccaccattactgtggcctgcacgaacgccgcgtcttccacctgacggtcgccgaaccccacgcggagccgcccccccggggctctccgggcaacggctccagccacagcggcgccccaggcccagaccccacactggcgcgcggccacaacgtcatcaatgtcctcctcccccgagagccgagcccactttcttccagcacctgggcctacgtggtggcccccgctggtggctccctcatcccgctacggggcactggccctcctgggtcgccccgcaggcggcggaggtaggccgaagacgacctcgggaccaaaaacccgttgaaaagcctaagcggggaagggagccttgcctcccgccgccgacatgcccgccggcccgccgcgggcaccccgtatgcccgcgaccggacgcgcggggccatcccgcatggtatgccgccggacgcgcgtcgctccgccggacccggtgcggggtcccggctcgtcgctaccgccggcccccggggcgcgcccgtcgcggtcacaggcgagtccgcgctgtcggggcggcgctcgggggccagcaccccggccgggtggcgcgcccgcgttgccganccgttatggatggcacggcgctatgtcgcccgcgtcagcggggagcctatggggtgcacccgcgccgtgcc

SEQ ID NO: 89203 - DNA, 446 bp, Homo Sapiens
tttgatatgtatgaaatgtattcagatttgtcatcaggaaaatgtcctgataaccatatgagaccacctcacccacgtagtgaccgtgactgatgttctgtgctttgatgcttttgacacctgtggccttgccgagcctggagggaccacctctctcagggtccatcaatccatggagacaggaaatgactcaccctgggctctgagcttgccctcagctcaccctctgggagtcgccaccgctggactcgctgggctggctgccttgctgggggctgctcaggtaagacgggctccgccccagccgcatcgtctgcagaaacctccagggcttctttgtaccctgaccctctttggcccacatggagctcgccttgcccttgatccctggtcctttgtcccctggtgtggagttaacactgctctctttggaagcctcggagacc

SEQ ID NO: 89204 - DNA, 616 bp, Homo Sapiens
aacagcagagaccctcagccgctctctttcctcattccaactgccaattcttatcatcattgctcccatgctttaaaaggacaggaggaaacatacaacgaaggggaaatttaactctcagtaccttcactctgtacaaatttggtgtttatttggatcttgacattacactgatcagatctgcatagtcccattagccatctaccccatggctgcgtgctggagttggagatgcctggaaatgaccagcagttctcacctcccatgaaagtggcctccagaccccagattctaacatgctcaccttgaagatcccaagagcccatacctattcagatgctcctccactgcacaggtctgagaagaagggaaatggaggggagagtattatgaccacttctgggccacctttgtatccaggaaagacccttaccctaccccatcttctactggagagagtgggtaggatgcaggctgtcataggaagtgaattggagcagtttgagatcactcagcctcaggagtccataggacctagacatcaccctgcgatgcttccatcattgataaccactaagatctatcaataaacagggcatcttattcaacctaaaaa

SEQ ID NO: 89205 - DNA, 888 bp, Homo Sapiens
  misc_feature (777)..(782): n is a, c, g, or t
  misc_feature (797)..(798): n is a, c, g, or t
gggaccacccacccgcgacgccgacgcaaggctgctgctatggggccgggcggccgtgtggcgcggctgctcgccccactaatgtggcgcagggcggtttcctcggtggcggggtccgcggttggagccgagcccgggcttcggctgctggccgtgcagcggcttcccgtaggagcagcgttctgccgggcttgccagaccccaaactttgtccgcggcctgcacagcgagcctgggctggaggagcgggcggaggggacggtcaacgagggacgcccagaatcggacgcggcagatcatactggtcccaagtttgacatcgatatgatggtttcacttctgaggcaagaaaatgcaagagacatttgtgtgatccaggttcctccagaaatgagatatacagattactttgtgattgttagtggaacttctacccgacacttacatgccatggccttctacgttgtgaaaatgtacaaacacctgaaatgtaaacgtgaccctcatgttaagatagaagggaaggacactgatgactggctgtgcgtggattttggcagcatggtgattcatttgatgcttccagaaaccagagaaatctatgaattagagaaattatggaccctacgttcttatgatgaccagttagctcagatagcacctgagacagtacctgaagacttcattcttggaatagaagatgatacttcatctgtgactccagtggagttaaaatgtgaataaaatattttatgcactgcgttagtcatttcaaannnnnncacccaaaacacaannaaaatgtgcggccgcctccgccctcaagagcttttcaagaccattcctttgggcccgcgggcccccttaggtaaaggggaactggtcata

SEQ ID NO: 89206 - DNA, 480 bp, Homo Sapiens
tgtttttcttgcaacactttcaagggaacatgatggatttcttagctttcaaggagagactgtatggaccattacaagcatatcttaggcagaatgatttggacattgaagaagaggaagaggagcactttgaagtcattaatgatgaggtaaaggttgtggccagaaagcacgggcagcctgggactcctgttgccatagcaacccagctaccgccgaggacttctgcggcttttccagcccagcagcagccgctccaggtactttctgatggctccacagtgcagctccccagactttcctcactcggatttgaggactcgatgtgctgaggcaggacccagaggggtcccaagagcctgtcctcttttgttcaaaatacatcttgaaacgtctttgtgaaggctcttagttttaatgcatggatgctgttatttttccctactgttactgaaattaaaaagtgtttgtctctgaaaa

SEQ ID NO: 89207 - DNA, 232 bp, Homo Sapiens
gcaaaatatataagttatgactgtatgatcagatgaagtatgagttcttttggtttgcatccttaaatagttagagatctctgataaaaactttggaatctttgcaaaacaatacaaaaatgccaaaatgtgagcatgtcaatgaaaactaaagacaaatacttcactctttttcatactattataagttattctggtattaaatatgttaactaaaagtgtttttgttttg

SEQ ID NO: 89208 - DNA, 368 bp, Homo Sapiens
catattaatctttaaatcatgatcctaattagctgtccttactttaacttgagtctaattattgcttcctttcttattactttcctaatttttctatattttaaaaactacagtttccatgataaaaggaaaacgttttgatttatagtaccaagtgcttaaacacaaggatagtgttagattttcgagtgactttcctttttgcattttttggcagtaaaagccaaacgttgtatttgttcttttcagagttgtccagcccttttttcctttgtccaaaatgattctaaatagaatctaataaaccaatgtagcattatttttttctaaatgaagccccaaaaaagaaaagtgccttgcatcattta

SEQ ID NO: 89209 - DNA, 455 bp, Homo Sapiens
ccccttgggagtgtggcatcaagcagatgaattgggcgcattgcatctgattcagcctcttgaggagaaagacttcatactgatccaaatagactcccgagaggcagaaagaggaaaatgataaataaatgccagccaagctctaaaatggaacactctagctgtgtggccactgctttaatgaagacagctgccattctgtgagctgttctatgaaggagcccacttggcaaggaactgggggaggtctcagattaacagccagcaagaaactgaatcctgctaacaaccacctgaatgaacatgaaagcagacccttccccaattgagtcttcagatgagacccagtgctcacctgcacctaggttggagccctaagagaaaccttgaagcagaggaaccagcttaacctgatccatggaaactataaaataaaatgtgtgttgtttaaaaaa

SEQ ID NO: 89210 - DNA, 717 bp, Homo Sapiens
  misc_feature (545)..(545): n is a, c, g, or t
tgcggccgctgccctgtccggcccccgctggagcagcccggaggcagcgagcaaggagaaaggtgtgtgccctcttcctgattctggagaaaaatgccggtccggaagcaagatacccagagagcattgcaccttttggaggaatatcgttcaaaactaagccaaactgaagacagacagctcagaagttccatagaacgggttattaacatatttcagagcaacctctttcaggctttaatagatattcaagaattttatgaagtgaccttactggataatccaaaatgtatagatcgttcaaagccgtctgaaccaattcaacctgtgaatacttgggagatttccagccttccaagctctactgtgacttcagagacactgccaagcagccttagccctagtgtagagaaatacaggtatcaggatgaagatacacctcctcaagagcatatttccccacaaatcacaaatgaagtgataggtccagaattggttcatgtctcagagaagaacttatcagagattgagaatgtccatggatntgtttctcattctcatatttcaccaattaagccaacagaagctgttctttcccctcctaccactgtccctgtgatccatgtcctgccagtgcctgctgagaatactgtcatgctaccctacataccacaagcaaatcctgtcccagtacttgtcaacacagatagcgtggaa

SEQ ID NO: 89211 - DNA, 319 bp, Homo Sapiens
ggcacgagggttttagtagaagttttatttgaaaaagaaaaataagcataaatatattcccagtgctggagagggtgggctgagggactggggccagcacggaccacccaaggcctctgcttcccgccgccaccctcctcgctgccattctctgggctggaatgtgaagcctcagtcactctaaatgaagaattttcttttgaatgttttgtatgtaaaatagcaagtggctatttttaaagttaagtttgtataaatagttagatattctagatttacattaaattgtaaaataaatggacttattgaagcataaaaa

SEQ ID NO: 89212 - DNA, 454 bp, Homo Sapiens
cctgtttggagcggggcatccagtgcgtgcacatccccagcagtgggcaaagctaaatcaagtgaatttgcaagtattcctgcaaatagctcccggcctctgtcaaacatcagcaagtcaggcagaatgggacccgccatgctgcggccagctctgcctgcaggccctgtgggggcatcctcctggcaggccaagcgggtcgatgtttctgagctggcagcggagcagctcacggcacccccctcagcatcccccacccaaccccagactccggaaggtggcggccagtggctgaactccagttgcgcttggtcagaatcttctcaattgaataagactagaagtatcagacggcgagattcctgtctaaattccaagacaaaggttatgcctactcctacaaatcaatttaaaattcctaagttttctattggtgactccccggacagctcaa

SEQ ID NO: 89213 - DNA, 349 bp, Homo Sapiens
ctctctgctgggagcctttgtgcagtgcacaaactgcacgcgtgtatgtagtagccctgctaataaggattacttagaccgagccaggacaatgagattcaatcctgaaatttttttcaaacttggaaagaggatctcttttccatgggattgaaaatagagctcctgagaacctgcctgatggagagtgcaacatagagaaaagcagaacgaagacacagagagaaggagttccattttgacttctagatccaaccttgcctgcagctgagcttgttcactgagtaagattatcactatacttttcagttttatgagccaataaatccctcacttttcttcagctaaa

SEQ ID NO: 89214 - DNA, 1251 bp, Homo Sapiens
gcttgcggccgcgtgacggtggcgcacaagaaggctccgccggccctgatcgacgagtgcatcgagaagttcaatcacgtcagcggcagccgggggtccgagagcccccgccccaacccgccccatgccgcgcccacagggagccaggagcctgtgcgcaggcccatgcgcaagtccttctcccagcccggcctgcgctcgctggcctttaggaaggagctgcaggatgggggcctccgaagcagcggcttcttcagctccttcgaggagagcgacattgagaaccacctcattagcggacacaatattgtgcagcccacagatatcgaggaaaatcgaactatgctcttcacgattggccagtctgaagtttacctcatcagtcctgacaccaaaaaaatagcattggagaaaaattttaaggagatatccttttgctctcagggcatcagacacgtggaccactttgggtttatctgtcgggagtcttccggaggtggcggctttcattttgtctgttacgtgtttcagtgcacaaatgaggctctggttgatgaaattatgatgaccctgaaacaggccttcacggtggccgcagtgcagcagacagctaaggcgccagcccagctgtgtgagggctgccccctgcaaagcctgcacaagctctgtgagaggatagagggaatgaattcttccaaaacaaaactagaactgcaaaagcacctgacgacattaaccaatcaggagcaggcgactatttttgaagaggttcagaaattgagaccgagaaatgagcagcgagagaatgaattgattatttcttttctgagatgtttatatgaagagaaacagaaagaacacatccatattggggagatgaagcagacatcgcagatggcagcagagaatattggaagtgaattaccacccagtgccactcgatttaggctagatatgctgaaaaacaaagcaaagagatctttaacagagtctttagaaagtattttgtcccggggtaataaagccagaggcctgcaggaacactccatcagtgtggatctggatagctccctgtctagtacattaagtaacaccagcaaagagccatctgtgtgtgaaaaggaagccttgcccatctctgagagctcctttaagctcctcggctcctcggaggacctgtccagtgactcggagagtcatctcccagaagagccagctccgctgtcgccccagcatgccttcatgaggcga

SEQ ID NO: 89215 - DNA, 320 bp, Homo Sapiens
ctcaagacccaccccagtcatgaggactttcccctttctctttgccgtgctcttctttctgaccccagccaagaatgcattttttgatgagaaatgcaacaaacttaaagggacatgcaagaacaattgcgggaaaaacgaagaacttattgctctctgccagaagtctctgaaatgctgtcggaccatccagccatgtgggagcattatagattaatgcagaagatttaggtttccagagaagcatacataacctagcttctttttactcttgcctctgctgtaggcagacactttaataaaaataaatgactgtcaaa

SEQ ID NO: 89216 - DNA, 955 bp, Homo Sapiens
  misc_feature (285)..(354): n is a, c, g, or t
agctgaataaggggaatgagtttcatgggagagtattgattagggaatttctactagtagaaaacaggatgtccagagtcaaatatttattcttggagacattttttcccagattttctttaatgacagctctcctccattttatatccaaaagctagattggcttattcaaatgtgttaaccctaggatgtgtctgggagtcttctgagtcactactttaaggggatatctatttgaggaggcactatggtaatgaaagcaagtcaaataccaaatgtatggannnnnnnnnnnnnnnnnnnnnnnnnnnnnnnnnnnnnnnnnnnnnnnnnnnnnnnnnnnnnnnnnnnnnnaagagggttgaatcggatgatctctgataacctttttatagtaagagccctatgattttatgaccctgtgaatagcatgattatagctctaggattaacatcttcaggaaatttaacagcagacttccagttaaacttcgtgattgaacacatgtttttccatgttccttcctagtaagggactaaaaattttgagcaaaagactaaaaaatatataaatccacaggcataaggaagaggaagcaacatattaaagagacacaacttttggaagatgtaaaggaggaactggcagaaatgggaaagccgaatacatgtgactggagagtgttgtgtcaatgagaaacaagacagttcatactccagaacctgtttaagaattagaggcagtatgtcctgtagaaaacagtagctgaagtagaaataaagtataattaatatactcagagagatagcagaagatactgctactatgaaacatgacaagattatataaaaagaagaaataaccagagaataagcacttttataataactgaaataagcttttatatgatagaaattttcctgaaaatagagcaaccaaaagtcaaataaatgg

SEQ ID NO: 89217 - DNA, 789 bp, Homo Sapiens
cactcactggggccaccaaaacccagagatggcaggtgtgtgggacagactggaggatgaggacaaaccaaagcctttgttctttcttattgtggagcgtccccttccatcaagcagcctgccctcaagccaaggatcatcccctggaacccagtatgcacccagaggggactcagcttcaaagctgctccaccatgctgggtcccaggcagctttcctctgaaaagcaacctctcctgccacccagatcccatctcaagagctcgcccatgttacgagcatgtaaaggactgacttcctagtaactgttgcagtttacaacctgccctccagggacacgtctccatggtttttcctacacatgaatgcgagaaatggctgataagcacagtaatttaagattgcgtattcatgtagtgagatttagtcattaaccaacccggtctttgtgatgtgtgaagccttcccttcagttatgtcccatttttatgatgccaaaagctgccactgtgtggtattcgaggattattgcaacaaagccagtagttaaaccaaactacagtctcagcctgtcattctctagaacacatccaggtgtcggagctaaggtgttcagctcggctgtgactatacagaaccaggcctggcgttgcttccgcaccggtagcagttgtggatgtcagtgtgcataagcaagtatcagacctcagaatgtttgagttattttgtcttagatatctgtttttaaatggataatgtatttgtcctttaaacctcagttttgcaaaa

SEQ ID NO: 89218 - DNA, 547 bp, Homo Sapiens
  misc_feature (506)..(506): n is a, c, g, or t
tttccaagagaaaaagttaacactaggactttatatattaagtaattaagtaaaaataacgctgtctaaattattttgaaatgctgcctctcttccaagttccaaactatctcaattcacttagaaaaacgtttaatcaaaaaacaattctaggcttctgatatcctaatgtagaaaaaatgcagatactcaacacttaagattttgttagcgcaccaaatcattccatcttttactttcaatattccttaaataataaaaagacgggagagataattcagttgcaaagactggaggaaacttgcagaacttctagtggaagtttatgccataaacttaatagcccagccagaacaatcacattctactgcaagccaaatggagaaaagagtaccttggagtgcccctatttaataaaaacggaacgaggaaacagttaactgtaaatacagtctagaggtatccaggtgactgacagttctccagagaccccgagaacagcgtanaagaccccttgaggtcacctcacccctgcgagtccacggat

SEQ ID NO: 89219 - DNA, 648 bp, Homo Sapiens
ggccaagtgcacacagagcacctcactggaagaatctgagtcacctcatccttctgaaacaattctggaagtctaccaccatctgcacagctttcgtggcagcaaattaatccagggaaaaataagcaaataagactggctcagggaaacacagcaagtaagtgaaaaatccttgaattaaacaatttaagaagacattgagtgtgggaacttagaagagtgggtaaagtaaaaagaagaaagaaaacctcaaatacaaaatcaatgtaaacagacatcttgctcaggtggcttaccctgttgttacttatctagtatttaaatgtccaagtgtctgtttctttggagaaaaaactttatagaaagtacctccttcatagcgctgtttataagaaaatgcgcatctgacaggaagtctattttttgaggactgtgatctgcagagaaaacacttagaaggacacaatcaaagtcaaaagcctatacattttgtggataagtgatccaaacctaagacagttacaaagaaaatggctctcagctatttacagccagacttcaggccttctgtggatttctttggcattacctcactaagttaatatatcatcacttgacatttaataataaatacatattgaaattaaa

SEQ ID NO: 89220 - DNA, 429 bp, Homo Sapiens
atagagttttgatagctttattaaaaagagtgaaaataaaatgcatatgtaaataaagcagttctaaatagctatttcagagaaatgttaatagaagtgctgaaagaagggccaactaaattaggatggccagggaattggcctgggtttaggacctatgtatgaaggccaccaattttttaaaaatatctgtggtttattatgttattatcttcttgaggaaaacaatcaagaattgcttcatgaaaataaataaatagccatgaatatcataaagctgtttacataggattctttacaaatttcatagatctatgaatgctcaaaatgtttgagtttgccataaattatattgtagttatattgtagttatacttgagactgacacattgtaatataatctaagaataaaagaataccaaaataaaa

SEQ ID NO: 89221 - DNA, 545 bp, Homo Sapiens
cgcctctcggaagcttggcctcgcaggagcggctctctatcctgtggggatcttcggccagtgggcctcgtgagctggggtcccgcctggggaatccgcatggcaccggtggtctgggggagaggctgggcctggcgcgggacgaggcgaagcgccggtggccgacggcttctgaggaattatcttttacttggcgccacacggggcggggcctcctgctatgctgtggagcgcagtgtcttccatcgttgcctcacagacccgctgctccgggaagtcgccacacattctcagggaacacccacatctgtcgcctgcgccctccgccgctcagctgtttgcttttgtttacgcattccggagacctgacccaccggagcactgggctgagcacaggagaaggggctttggagcgctctttgtactcaactccaagagcgagtgggaaactcaggactgggttgggtggatccctgcgtctctccctagccttcgtcctcttcccccgtttttccactttatgaaagtattgcctagagatgaaa

SEQ ID NO: 89222 - DNA, 560 bp, Homo Sapiens
tttttctccagtgaaattaaagattctgcactaccaatgcttgatgtctgtgacatttccaccaccaaaactggaggaacccttgttttgctggaacatacacaaagtacatctttctgagaagcagatgaacagtcggggcattttgtggattttttatctaagccactatcagccatttgtttaactctgcaacaaaagcaactttaaaaatgtttccactgtttgaggaagaaaaccaggccaaaaaggataaggtagttgatggtgaaaactgtaatttcgaactggtgaagtcctcaggttaaggatgcactagacacatattcacacgtgagagctgcagaaagaaaagaaataaccatttagagaaattcttaacctattaccatcctggaaatcagagaaaagctagcaactagcactagaagcatcctgtatagacatgaaaaggacaaaataggaccacaaaactggtgaaaagcatggtctaaaacagcatcttatcaaactgcgtagtgggttatgaaatccattttgtgggttgataccacttttta

SEQ ID NO: 89223 - DNA, 538 bp, Homo Sapiens
aagctgctgtcagggaacagatgggagagcctgcaaggggaggtgagaggaaggtgctgagccccagtcatgagcgaggtgacagttattgtagtggctaaacaggtggcccctgagatcaggctgcctgggctggaatcctggtctaccactccttagcactgtgcgttcaggcaaaccattggtccgctctgagccttgacttccttatctgtaaaatgggcgtggtaataatatgccaccctcattaggttcctggaagggttaaatgagtgtgtagcccatggtacatgcaatggaagtgctgcctcttatttgtgtggcattctgcagtgactgtctcgtgtactctcaatagtgcttataactcttacgggttctggagctagccacctggcctctgctaccacttcctagcagggcggcagagcttagagggagatttaaggtgaggatggtgaggtttaagtcctgggtccctcattggcatggccttgtacttcattatttaaaaagacaccccacacagtttatgtaa

SEQ ID NO: 89224 - DNA, 1350 bp, Homo Sapiens
tttgttttaattaattttacgaatcgtgtgccggaccgcgggttgaacaagcttcatctaaaacttccaggaatctctagacaggatcattgcttcccctctgctccagctctggttacagaaagctgagagtgactaggtctaggtgtttgtgtggggtggggtggggagatgcctcctctatcggactcagaggacgcgcgccgggaacagccagtcggtgcctaacgcgagtgtatctcgagagagaagcgatcaacagctgccggtctgcgcctgcgcgcggcgggggcgtggcccggggcgagtggggccaaggaggcagccgggagcggcgggcgcaggtgttactggttgcgtcgggtcacgtgggcgcgcaggcgcagcgcggtgcagcccgttcgctcacacaaagcccagacgcggagaaaatggcggcaggggtcgaagcggcggcggaggtggcggcgacggagatcaaaatggaggaagagagcggcgcgcccggcgtgccgagcggcaacggggctccgggccctaagggtgaaggagaacgacctgctcagaatgagaagaggaaggagaaaaacataaaaagaggaggcaatcgctttgagccatatgccaatccaactaaaagatacagagccttcattacaaacataccttttgatgtgaaatggcagtcacttaaagacctggttaaagaaaaagttggtgaggtaacatacgtggagctcttaatggacgctgaaggaaagtcaaggggatgtgctgttgttgaattcaagatggaagagagcatgaaaaaagctgcggaagtcctaaacaagcatagtctgagcggaagaccactgaaagtcaaagaagatcctgatggtgaacatgccaggagagcaatgcaaaaggtgatggctacgactggtgggatgggtatgggaccaggtggcccaggaatgattactatcccacccagtatcctaaataatcccaacatcccaaatgagattatccatgcattacaggctggaagacttggaagcacagtatttgtagcaaatctggattataaagttggctggaagaaactgaaggaagtatttagtatgggctggtgtgggtggtccgagcagacattcttgaagaaaaagatggaaaaagtcgtggaataggcactgttacttttgaacagtccattgaagctgtgcaagctatatctatgttcaatggccagctgctatttgatagaacaatgcacgtcaagatggatgagagggccttaccaaaaggagatttcttccctccctgagcgtcacaacaacttcccatgggccttggtggaatggggca

SEQ ID NO: 89225 - DNA, 696 bp, Homo Sapiens
tgattcggctgatctggctggctaggtgggtgtccccttcctacctcaccgctccatgtgcgtccctcccgaagctgcgcgctccgtcgaagaggacgaccaaccccgatagaggaggaccggtcttcggtcaagggtatacgagtagctgcgctcccctgctggaacctccaaacaagctctcaagattgctgatctagggccactaagtgatgaagcaaaaaggatggctaaaaaggacctcaacccttttgactttaaaaggaaaatagcttaaccttcaacctgtgtgacatttaactttttgaacccaaccgtaaaagctatcttctaaccaacaaaaagttaataattacatttggaattatacagaattagaaaattggcatttaaaaatactcaataatttgtccctggtttttaattttcaaaatattttctttttgaagagccagattccagtgatcctgcctctcagaaatttccacatttcttatttttcattaggccttaagaagctgcatttgtaaacttgtgtttcattattaaagcttaatttattttttatataaatagtatgtgctttgtgtacatagagaattaagtgaatgagtcacacagatgttggctgttgttaatgtgaaaattaaacagctgtatcacattttgaaaaataaaaatttcatctgaatgaat

SEQ ID NO: 89226 - DNA, 494 bp, Homo Sapiens
cgggtttagacaggttcaattagctcaagtctacacagctgaagtagcagagaaagtgggatctagatggtctgatcctagtgatctaccatatgaaggacatagtttgtgtcctggtccaagtcaaatattgactcctcacaaacagtaagtatggcaattttgtgatgcctttgattccactttacatggagtactattatttgtgaaatgtctttaagatttttggtcttaaatttttgaagactgctttccccctttatctcccagaaaattgagaagaagtaaactcctgcccactaacaatctcagtccgtgaacaaaaccaacatgaacattcctaaacaagagtgtgtgttactctaagaagaaggctatagaatttatggaaatggcttatgtaacctacaagactggagaacagaatgtgactggccttttctaatggtcctttaagatttaatgattaaagcaagagttttttataattaaaa

SEQ ID NO: 89227 - DNA, 492 bp, Homo Sapiens
aagatctgccagttaacagctgtgtggtctctctccgattaacatctctcagcccttttttcacctttatgagatggggattataataccacatcccttgtagggccattgtgaggattgaatgagctaatgcatgcccacgtgcccacctcatggtgggagcaagccattgcctccccctcagaggacccagtggagagaaggttgacagcttggcattctctttggaatggctgttgacttcgcactgccatccacagaagagctccataaccccacccgagggcacggaatggcctttccttaaaggtgaagcacaacatcattctcaagtgcctttgcaaataacgaagaccagaactggtcatttacccaggccgagccagacctatatgatacatcaaaagcagaacagaaagaaagggaatgagagaatccaaatgagtttatttgtccattaaataaatatgcaaaattatgcagatgtggaaa

SEQ ID NO: 89228 - DNA, 438 bp, Homo Sapiens
ctgtcattcaagtatgacacccctgatgccacctgtgctgtcccccatctgacagaaatggactgaggcagctgccagaggggatatgaaaaagcaattaacattttcagaaggggtggccttctatggtgtaaccttgttgtactgagattgcagggaagagacacaaagtttccagtcatgatcacaagaatagtatttcctgctggagtgattttttggtttgtttttatgaacatcctggattagtttgcaaaacattttacatttgaagaaatccaaaactcattttgcctgaagagttatattctttcatcgttaaatctgtaaaattacaaatataagtgtgtgtctgctttacttactcttcacaaaatagtatgtgtctagatctgattgtcataggcttgttctctcagaattagaagccaaaagaaa

SEQ ID NO: 89229 - DNA, 484 bp, Homo Sapiens
acctgaggcacgaccttcgccacgcaaggaggctggggcccgggtcgagagtcgactgggcctccgctgggacccaggcgtgcgaccggctctgcctcctccgcagttctgcctcaggacctttgcatttgccatctcctctgtcagcttcagttcccgatgccgaaatggatctccatcaccttcatattgaagctcaactgtaacatcagcaaggcttcctgcatcccctactttactagttcagcacctcccaccaccacaccccctggaaaaatttcccctcacttccttaatttcttccatagcacaactcatcagcatctgaaattctacacgtatttatggtttatcccctccgagtagaatgtgagctcattgaggtcagggaattctgttttcttcatgatatcctcagcacctagcatatatttgaggttcacatactgaccaaacgaataaaggaatatgttaatttttaaaa

SEQ ID NO: 89230 - DNA, 1095 bp, Homo Sapiens
aaatatatcttcaggttattttcttactgttgcttcagatctaatgtaaaaggcagatgtcccctcctctccacccccgacgctgaccccggcctcagtcacggctctttgcatgatcacagctctgtgttctggcctgtggcagggccgggaagggccgctggcttccgaacagacgtggttgctctccacgaggcgcatggggagcccgcgggccctaagctttgtcgcagatgtcatcattggcagaattacttgtcttgaaaaataagtagcattgctgaaacacacaaccgaattctctacgatggccatttgctcattgtctttcctctgtgtgtagtgagtgaccctggcagtgtttgcctgctcagagtggcccctcagaacaacagggctggccttggaaaaaccccaaaacaggactgtggtgacaactctggtcaggtgtgatttgacatgagggccggaggcggttgctgacggcaggactggagaggctgcgtgcccggcactggcagcgaggctcgtgtgtcccccaggcagatatgggcactttcccaacccaggtttatgcgtctccagggaagcctcggtgccagagtggtgggcagatctgaccatccccacagaccagaaacaaggaatttctgggattacccagtcccccttcaacccagttgatgtaaccacctcattttttacaaatacagaatctattctactcaggctatgggcctcgtcctcactcagttattgcgagtgttgctgtccgcatgctccgggccccacgtggctcctgtgctctagatcatggtgactcccccgccctgtggttggaatcgatgccacggattgcaggccaaatttcagatcgtgtttccaaacacccttgctgtgccctttaatgggattgaaagcacttttaccacatggagaaatatatttttaatttgtgatgcttttctacaaggtccactatttctgagtttaatgtgtttccaacacttaaggagactctaatgaaagctgatgaattttcttttctgtccaaacaagtaaaataaaaataaaagtctatttagatgttgaaaa

SEQ ID NO: 89231 - DNA, 508 bp, Homo Sapiens
atttggtgatatatcttctgttgacagaataacagagatcaaagagtagaaaagggtctgacttcttactattgcatatgacttactgatataaaatatattttgctttccattgtagtagagaagagacaagctccgaaggcccctgaacatgcctgtatattattactgagtgtgccagactgcaagtcgtatccatctcctgatgctaagcagtttctgtagttagtcatataggcacctaagtaggtcaaggcaatcacagcattactaccatttaactgctgctccctgggggagagagactagcttgtttgttgtttgctcaaaaactgcttgattcttgatcctggattcttctgtaatgcaaccccccatgtgcacagacgtcatccggccctctgcatcacactgtgggaattgggctacgggaactgatgcaaatatgcggacactctggcttctattttgctgtaataaagctgttttgtcttccacccaggaaaaa

SEQ ID NO: 89232 - DNA, 383 bp, Homo Sapiens
ctcaaaggtgttcttggtcatgccagagaggccatagtaggacgtgcccgtcgcaactgcacacacacacagctccccgatctcatccgttctgcacagctgaggaaccccgtctggcttcactgaacacatgatggctaaaagcaaacaggaaagcacatgcagtgtgagagggggcaggtggggagaataaaggaaacagggaagacgcgaatatgaacgacaccagtgaacaggaatggggtctggagcaaaactgcacggatggtagtcagccaggcactcattttccctaaagagccatgagttttcctgttgcagcaacatgtcaaatttcatagttgaaacatcaataaatatttcaattgctttaatgttaaaaa

SEQ ID NO: 89233 - DNA, 439 bp, Homo Sapiens
acaagaataacataaaaatgaatgaggtagagcatacttgtcctatataaatccagactttctataaagctcaagtaactaggataatgtgaaattgggatggtgacagacaaatagactacccagagcccagaaacagattttctgtgactgatttgtgggaaaagaggaactcccatttatggtactggaatgatgggttaaccatgaggaaaaaatgaaattgaatttctatcttacacccaaagatttgggtgtcccctgcagatagatgatcacctaggagtagatacacaaaaaacatttcaagatgatttaaagacttaagggtttcacaccatatacaaaaattaactcacaatggatcaaagacctaaatgtaagacctaaaagtgcctgtaaaactcttagaataaaacttagatgaatcttgtcaaaa

SEQ ID NO: 89234 - DNA, 594 bp, Homo Sapiens
  misc_feature (87)..(95): n is a, c, g, or t
ctttgtactgaaacaaatgtaaaaatagattgtaaatataaaataaaccaaccataagagaaaacactttacaaagagattgaaacnnnnnnnnnaaaagaatattgttttcagtgcgggtgaggaggtaatgagacatgagctgagctatctgctgtgaaagtgaaaactaaattgccaatatggaacaaaattatgcagccgttggaaattatatttaaacaatatttaagtttaaaaaaaagactaccatttaatacacagacttaaaaatttacttacattgtgaaccaaattttaagtatctatttctagggaaaaaagtgaaataaaaaatacagtctgtgaagttaattttcctttgtttaaaccttgcttttccacttagctgtgtgacctgagaaaatttctgaagcttttggggcctatgttctcatctataagatgaggaaagtaaaacaacatgtgtatcttacgaaggactaaatatattaatattttctaagcactcagggcaatgtctagcactttgtaaagttgcagtatttgttttttgtttatcataactattggaataaaatgaaaaaatctaaa

SEQ ID NO: 89235 - DNA, 377 bp, Homo Sapiens
cagttttacatctaaaatactgtgtacctgaatttgaccactcctcatcattcccactcctaccaccatatatttcaggtcatcttccccttcctggactgttgcaatggtctcttccccccgtctctgcttccattcccatcccccaacaatatattctgcacagaactgtgagagatgatcatacgaaataatataaggtttgagatgtacttcaaaagaatttgagaaatagggggctagatgggtatagagatgaaaagattatccatacaatgataattattgaagctgactgaaaagggtacatggggttcatgatactattttctctactgtgtttgtttgaaattttccataataaaaaaagttgaagg

SEQ ID NO: 89236 - DNA, 430 bp, Homo Sapiens
cagacgttttacattgggaattaatgaaagcgtgtctgctagttttgggtaggagaactgggaagttgttgcttaaaattttatatcacctccacaaacaaaactcttcggaaatggtaaaataagaaaatgcatgattctagaggcattcctaagcacccacgtgtcaggctttgtggtgtctgtggtatcatccgaccgtttggaatggtggcttactgagagctccatttctggaaagccttacaagactgaggaatatcagactgcgaatcaccgggaacggttcctttgcagcacagaagcaatctctctccccatcttcgcatattctgatggcaaaacaagtggaagaaaagaggaagcatgactgcagatcagatcagttctctttgtggattatattttcagtaaaatgaatggatctaaa

SEQ ID NO: 89237 - DNA, 252 bp, Homo Sapiens
gtgtgagccactgcaccaggcctccgattactattaactctattatctagtgatagagcagccttagcttttcttctatatcccctcttcatactcaaatgtgaggtcaagggcaagtaaatgaacagttggaatgctttcagtcagagtagatgaaatatagtgctgaaagttaatttctgtacatatactaggacaaggtgtggcaaagattactttaggtgcttggagtagcccttgcacagtatgaat

SEQ ID NO: 89238 - DNA, 535 bp, Homo Sapiens
gggaccccctatataaggaggcgctgcaaatgctgcgggatgctggggcccaagtctccatcatgacctacgatgagtttgagtactgctgggacacctttgtggaccaccagggatgtcccttccagccctgggatggactagatgagcacagccaagacctgagtgggaggctgcgggccattctccagaatcaggaaaactgaaggatgggcctcagtctctaaggaaggcagagacctgggttgagcctcagaataaaagatcttcttccaagaaatgcaaacaggctgttcaccaccatctccagctgatcacagacaccagcaaagcaatgcactcctgaccaagtagattcttttaaaaattagagtgcattactttgaatcaaaaatttatttatatttcaagaataaagtactaagattgtgctcaatacacagaaaagtttcaaacctactaatccagcgacaatttgaatcggttttgtaggtagaggaataaaatgaaatactaaatctttctgtaaaaaaaa

SEQ ID NO: 89239 - DNA, 541 bp, Homo Sapiens
tcattcatcgcccagaccacggccagggacccagctcctcatgtcccataccctgctcccacctcatcaccagtgcaaccacagcaccgaggcctgcctggcgggggccgtggcttgatgcttgggatttcatgagaagtctctctcctcccgactgacgtggttgcacaagccacagtgtgcctggccacccccgctgggaccgcctgcagctcggccatttcccccagaggcgctctgatctgccctcctgcctcctctcctgttcttgttagcagagagccacactctgggagctgtgtagacccagggcctcagagagggctggaggatggcttgccagccaagcgggtcagtttggtgagcacttcagaatgagacgccttgatttgtttccctattccaagagtttaccatctggatttagccatgcccttgtaatgaccccaccaatttcatgaaaaatggaatctgtgaatttgctctttaaatcactagtcatctctgttcatttaaaaataaaattatagttccttaaaaa

SEQ ID NO: 89240 - DNA, 499 bp, Homo Sapiens
caagtattacagcagaatagactacccagaggaaagaatctcaacaggtgatcactggctctctgaaataagacagacaaaaataaagaaaaaagaatgaaagggatcaatcaaaacctctgaaaaatatcgaattttgcaaagaggccaaatctatgaatcattgtcatccctgaaagaggaggagagaaagcagcaacttagaaaacatatttcaggatatcatatattaacacttacccaacctcactagagagtccaaagttcaaatacaggaaatgcagagaacccctacaagatactacacaaaagatcatccccaaaacacataatcattagattttccaaggtcaaaatgaaaggcaaaatgttaaaggcggctagaaagaaagggcaggttgcctacaaatggaaaaccccatcaagctaacagcagacctctcagcagaaaccctacaatccagaagagattaggggcccatatttaccattctttaaa

SEQ ID NO: 89241 - DNA, 446 bp, Homo Sapiens
tgtgggtgaagcctgaggacaaaggcagtgctgcatcccctgatcccctgccccctacaacctcctgcccagcctcttgggtgctcctcagcttgtcgtcagggaggaagcagccatctcctccgatgactgacttcaagcctcaactctcccacagcttctcaaaagccaaggctgaggccaagtcctagctgctgccttgggacaggtcaagggcctcctgcaatctcatgcacaaactggtacccatgagcatgtggcctaagagatttattgacccctctccaagtccttgccagaggaatcctgcacacctatatccacaatgaagggagccatatccccagctgggtagccatatccctaatgatatcacttatgaaaggtgacaagtcctttctaccactcttatttaagtgaaaatatatttagtcaattatgaaaaa

SEQ ID NO: 89242 - DNA, 633 bp, Homo Sapiens
  misc_feature (524)..(524): n is a, c, g, or t
  misc_feature (618)..(618): n is a, c, g, or t
tttctagagctccgacgcctctcggtgcccctctgctccggcccttgccctttgacctcgctctcgcggcagggtgagaggtcgggtggccatcttgtggcggcggcgcgggcggctgttactgcggagacccatcccctcccccttctcgcacccctggcagtctgtcagtcggtaaaaagtcccgcagcctgtcaggtgaggccccggcctcgtgccgtcgctcttcccgccgcactgggcggcccaggccgctccctgccgggcctcactgccgccaccatgtcctccttctctgagtcggcgctggagaagaagctctcggagctgagcaactctcagcagagcgtgcagaccctgtccctttggctcatccaccaccgcaagcacgcgggacccatcgtctccgtgtggcaccgcgagctccgcaaagccaaatcaaatagaaagcttacttttctgtatttagcgaatgatgtcatccaaaacagtaaaaggaaaggacctgaattcactagagaatntgaatctgtccttgtggatgctttttctcatgttgccagagaggcagatgaagggctgtaaaaacctttagaaagattgctgaacatctggcangaacgaagtgtgtat

SEQ ID NO: 89243 - DNA, 455 bp, Homo Sapiens
gcggccgccgtgtatggaggattcgcagggtacatacctcaggccttccctgctgctgccattcatggtccccatccccgacgtctaccagacatactgaggctggtgaccagcacgaagacagaccacacaaacaccactgaaggaacgcttgactatttatgaagaaggaacatgttggattcacacatgcaacctgaaagtgaagaatgttagcagatttatttctgaattattttatatacatgaagttttcactagttttttaagactattttcaacttagcatgcctacgttcatacatttccaaaagacttgcaatggttcgtgccttcattccatcttttaaaaatttgtatgctgtactacatttgtatagaggtttttgttgttgtttttttaaggatatattttcagtatgaaggttattttcttaacttctgcactccagaga

SEQ ID NO: 89244 - DNA, 672 bp, Homo Sapiens
caaccatgtaagcagcttcgcttcctgccgcaaccgtccgcggcctgaggagcccaccgccgctctcgggggccgacttccgggggctgagccgttgaagcggaggctggggcggggggcagccggcgcggccggggcaggaggcgcagactcatgaaatggccacagatgataagacgtccccaacactggactctgctaatgatttgcctcgatctcctactagtccttctcatctcacacactttaaacctttgactcctgatcaagatgagcccccttttaaatcagcttatagttcttttgtaaatctctttcgttttaacaaagagagagcagaaggaggccagggagaacagcagcctttgagtggaagttggaccagccctcagctcccttcgaggacacagtctgttaggtcacccacaccttataaaaagcagcttaatgaggaactccagcggcgctcttcagcattaggagacctccgagcttgcacatattgtagaaaaatagccttaagttatgctcattccacagacagtaattctattggggaagacttgaatgctctttcagattctgcttgctctgtgtctgtgcttgatccaagtgaaccccgaacacctgttgggagtaggacagccagccgtaacatatgtgagaggatga

SEQ ID NO: 89245 - DNA, 672 bp, Homo Sapiens
caatgccaaggcaaatgatgtaaatagtaatggcatagaatggagtaatgaaaatgatcggctcttggtatgccaggtgtgcatcaaactggcagatataaatggcccagcaaaagttcgagacttgcatttgaaatggacagaaggcattgtcaatgaattttatgagcagggagatgaagaagcaaatcttggtctgcccatcagtccattcatggatcgttcttctcctcaactagcaaaactccaagaatcttttatcacccacatagtgggtcccctgtgtaactcctatgatgctgctggtttgctaccaggtcagtggttagaagcagaagaggataatgatactgaaagtggtgatgatgaagacggtgaagaattagatacagaagatgaagaaatggaaaacaatctaaatccaaaagcaccaagaaggaaaagcagacggcgaatattttgtcagctaatgcaccacctcactgaaaaccacaagatatggaaggaaatcgtagaggaagaagaaaaatgtaaagctgatgggaataaactgcaggtggagaatccctccttacctcaagcagatgagatccaggtaattgacagaggcagatgaagagggaatagcgacagtttgagtaaaagaaaagtcatattgaagaagcccagagg

SEQ ID NO: 89246 - DNA, 665 bp, Homo Sapiens
  misc_feature (75)..(144): n is a, c, g, or t
cctcagagctttatagcctttcagttgagaaatatgaaacactgaaaatcaaaaacaaatgctggaaatcttctnnnnnnnnnnnnnnnnnnnnnnnnnnnnnnnnnnnnnnnnnnnnnnnnnnnnnnnnnnnnnnnnnnnnnnaaaaaccatgcctttcctatgtggataatcagcaaagctgaggacatcgggaagcaactcaggattgccagtttacagctcttctggatgtgcactggttaatgcatggaattcagcaacagcagactttgttcctttgatggatccagaagatcgccacatcaaggaatatggagagatgtccaaatttctaccaaagcaatgctgttctgtccgcagtaggcagtttgtgtggaggtccaggggcccagccaggttgcagctgatgattctgtagaaaggcctaaaattaattttagaaaagcatactcaagacaatagactattattacacggataaaaaatataagaataaagagtgtaaacacgttaccaaagtgaattcttgaaatggaagagaaacttggccttctttagcttcaccatttgttcctgccttccacctccaataatagtatatgtctcaatccttgtctatactccaaatttgaattgtataattaaattggttaaaacttaaa

SEQ ID NO: 89247 - DNA, 297 bp, Homo Sapiens
cttctaagcaactcctctacatgatgagatttatttttgtaaatggcatgacagagcagtccaatttaattttcttctcatgcaaaggcagtgtgatagcatcattaaaataatatccctttttcactgagttgaaaaacctccattgtgatacactgaattcctctgtgggggagtccatttctggatcttactctatactgtcccccaattctctctgttttcaagcacagtgtctgcttaacagtaaccttacaaatccagcaaggaaagtgttccttctgtgttttcttttac

SEQ ID NO: 89248 - DNA, 658 bp, Homo Sapiens
  misc_feature (480)..(574): n is a, c, g, or t
aaggattctgcatgagatgcctccctaaattgctgaattcaaaaaagaagttgcatacaaagacatctgattgaaaaagggtatgttatatgcccctttcataggctgctagggagttttcctggttctactttcaggtggtgggatcaataagaccagaatttctcatatgttgtgagaggattcaaatgttacagggttgccagccaaactatcaatcatgtataaatccaacaaacactttgtaacatacaagaactcaggaaatgtgaaccattgttggagaatctactaaaatacggcttcccgcaaacgaagatgaatggaaaatgtaaataaaaagaactggcagtgtatatcagatgtttaactataggaccagaactaagatgtggagactattgccatagaccacaatgtaaatttttaagtgaggaaggaaaaatcaggaatcaaaaggggccaggtgcagtggctcannnnnnnnnnnnnnnnnnnnnnnnnnnnnnnnnnnnnnnnnnnnnnnnnnnnnnnnnnnnnnnnnnnnnnnnnnnnnnnnnnnnnnnnnnnnnnntgcgagaaatagattagctgggcacggtggtgcatgcctattgtcctacctactgtggaggctgaagtaggaaatcacttgagc

SEQ ID NO: 89249 - DNA, 474 bp, Homo Sapiens
actccttttctgaagtttactcatctccaaaaaggaaggcaagttttcctgcttccatgacgatggagagcaggcacctcctttcctgagtctcagcttgcctctgacagggaaggtgagtgtaagtttttcccagcttctaagatggcagagaacaatcaccagcctgagacttatttccaggtaagtagctgaattagagttttgtcttaaaatttttccttaatgaataaaatgtaagattacccaccagctgcttttaatttctccttaccattagaacactcagtaatcatatgaattgtgcatttgtttgttttgcttaactctttctgtttcgtttatgtttgggctattgattgatgttgtaccacttttctcccatctcttcctgacttggtcaaatccaaaggaatcctccaaattgtggggaacaaggcatctgaaatggctaaaactcatgtggctgcaaaa

SEQ ID NO: 89250 - DNA, 399 bp, Homo Sapiens
ctgattagtgtacgtgaaagagatgaggagaatggaaccaacttggaaaacatacttcagaataccattcatgaaaatatccccaacctatccagacagaccaacattccaattcaggaaatccagagaacctcagtaagataagccacgagaagatcatccccaagacatataatcatcagattctccaaggtcaaaatgaaagaaacaatgttaaaggcagctagggagaaaggcaacgtcacctgcaaagggaattccatcagacttagcagacttctcagctgaaaccctacaagccagaaaagatattcaacttcttaaagaaaagaaatttcacatagtatggcagagacagatataccatataataacatggtgttattaaaaatggttaaa

SEQ ID NO: 89251 - DNA, 906 bp, Homo Sapiens
aagggcttgtacctatgacccggggttaaaaaagcaggctggtacccgctccggatttcccgggatatcgtcgacccacgcgtcgcccacgcgtccggtaagtgccaggtctcaggtcaggtcgcggctggtcactgtgcaggcgcttgggtgacgcgacgatctcagcggatctggtcaccttcgtctccccgccatggagacctcagcactcaagcagcaggagcagcccgcggcgaccaagatcaggaacctgccctgagacagggtctcgctctgtcgcccatgctggagcgcagtggtgtgatcacagctcagtgtaacctcaaacattggggttcaagccattctcctgcctcagcctccgaagaactgggacttttagagggttgaaaaatacctggccacagaccctgaatgatctcatttctcatcaggacattctgagtaccattcagaagtttatcaatgaagaccgactgccacacttgcttctctacggtcccccagggacaggcaagacatctaccatacctagacctgtgcgaaacagctatataaagacaaagaatttggctccatggtcttggagctgaatgcttcagatgaccgaggaatagacatcattcgagggaccgatcctgagctttgctagcacaaggacaatatttaagaaaaggctttaaagctagtgatcttggatgaagcagacgccatgactcaggacgccccagaatgccttgagaagagtaattgagaaattcacagaaaataccagattcttgcctcatctgtaactatctgtcaaagatcatccctgccttgcagtcccgctgcacgaggtttcggttcggtcccctgactcctgaactcattggttccccggctggacatgtcgtggaagaa

SEQ ID NO: 89252 - DNA, 2094 bp, Homo Sapiens
ggggaactgtaagtgccagggtctcagggtcaggtcgcggctggtcactgtgcaggcgcttgggtgacgcgacgatctcagcggatctggtcaccttcgtctccccgccatggagacctcagcactcaagcagcaggagcagcccgcggcgaccaagatcaggaacctgccctgggttgaaaaataccggccacagaccctgaatgatctcatttctcatcaggacattctgagtaccattcagaagtttatcaatgaagaccgactgccacacttgcttctctacggtcccccagggacaggcaagacatctaccatcctagcctgtgcgaaacagctatataaagacaaagaatttggctccatggtcttggagctgaatgcttcagatgaccgaggaatagacatcattcgaggaccgatcctgagctttgctagcacaaggacaatatttaagaaaggctttaagctagtgatcttggatgaagcagacgccatgactcaggacgcccagaatgccttgagaagagtaattgagaaattcacagaaaataccagattctgcctcatctgtaactatctgtcaaagatcatccctgccttgcagtcccgctgcacgaggtttcggttcggtcccctgactcctgaactcatggttccccgcctggaacatgtcgtggaagaagagaaagttgatataagtgaagatggaatgaaagcactagtcactctttccagtggagacatgcgtagggctctgaacattttgcagagcaccaatatggcctttgggaaggtgacagaggagactgtctacacctgcaccgggcacccgctcaagtcagacattgccaacatcctggactggatgttgaatcaagatttcaccacagcctacagaaatattacagagttgaaaactctgaaggggttggcactgcatgatatcctgacagagatacacttgtttgtgcatagagttgactttccatcttcagttcgaatacatttattgaccaaaatggcagacattgagtacaggctttctgttggcaccaacgagaagatccagctgagctccctcattgctgcatttcaagtcaccagagacctgattgttgcagaggcctagatgctctgagggccattcacaattctcagggctcagcagtgatgggagaacagaggacagttccaggataaactgctgcctggggctgtgggatgaatcagtcaccccgaatcttggaaaaacccccttccaggagaggatgggcaggcatttaaaaagtaccatttttgtggttgtttggagcagggatgtacaaaataattttaatgtattaactcatactgcctgtcttttataggggaaaaaaataaccttttttattttaaagttataaggtttttaccttttagttgcttggatgacagggaattagcctaccccattttggtctggaacagaagactttcaaatttaatatggtccaagtgtcttcctactcaaggtaaacattatctccaaaattacatttatgattctaatatttggcattgtgtctgtatctaatttaaacagatgttaatggacgtctggccgaaactattatacttttataagatgagctgaatcctcttactttaaaaactggtctttttatttaccctctgtggtagaagagtcaccagcaggttccaaattgatgtgtatgataggaaaaaaaccttaattttaaatataatatagagccttaaactatgccactgggtggcagaggctgtataaaacgcacttgttttcatgcaggagcggggcaagtaaggttgagcctgactgtaaacctagaactgcggaaggactgggacttttgtacaaatttcacatttattttacagcaatcatgctgcatttgtgttagtgttctttataataaaaaacaaagcagcctcctggctggctgtgttacaagtgactcttccttagacagctagaaagatgctgactttgtcaaacttgcatttatatgaaaaccttctgtctctaatatcacagaataaactttctttagatgctgttctttaaaaaaa

SEQ ID NO: 89253 - DNA, 781 bp, Homo Sapiens
gcttttatctcagttttatttgcaaaaatagtatacgcaaaatacatcgagtgaatgcacatcaggcatatagaagatctggcagaaacatgttttctcctgctcatttccagtcagtatttgaacacagaggcttccacggttttgattctttccacaaaaggttagttttgtctgttttcaccatttatgtaagtgaaactataaattatataatttttatgttcactcactaaacatgcttgtgacacatcattttgctcctattgattattcattattttgtaatattcaattttatgactataccacaggtttgaggcctttgcttgttttgtttttaatccattccactattgatagacacaaaagcagtttctgatttgaggctatcatgaataaacctgctacgaacaaatcagatatacatatttttttctgtaataatattttcacttttcttgagtttaagtacataagagtggattttctgggttataaaataagtatatatttggcattgtatgaaatggggagacattttcctaagtggttatgccatcttaaactacaatgaaaatgtttgagagaattcagttccactttctaaccaatacttgatgatgtcagttgtttaagtattatccattcttatgggatataaatgcctgagtagctgtctgccttcccccacaacacagaaaattgagggcccagaggacagttttattttcatatttgacatcttctattattttttatagaaggatgatttcagtag

SEQ ID NO: 89254 - DNA, 146 bp, Homo Sapiens
cgtttttggttggactgtttgcagatatttaaattttatgaaatttccaaagattttggttgataacccccttttaccttctaaatgatttgagatgttcttatgttcttactgtgtgttttaaatatatataaaagagccacaaa

SEQ ID NO: 89255 - DNA, 691 bp, Homo Sapiens
gcggccgctgccgctgccgccgctgctgctgttgctcctggcggcgccttggggacgggcagttccctgtgtctctggtggtttgcctaaacctgcaaacatcaccttcttatccatcaacatgaagaatgtcctacaatggactccaccagagggtcttcaaggagttaaagttacttacactgtgcagtatttcatatatgggcaaaagaaatggctgaataaatcagaatgcagaaatatcaatagaacctactgtgatctttctgctgaaacttctgactacgaacaccagtattatgccaaagttaaggccatttggggaacaaagtgttccaaatgggctgaaagtggacggttctatccttttttagaaacacaaattggcccaccagaggtggcactgactacagatgagaagtccatttctgttgtcctgacagctccagagaagtggaagagaaatccagaagaccttcctgtttccatgcaacaaatatactccaatctgaagtataacgtgtctgtgttgaatactaaatcaaacagaacgtggtcccagtgtgtgaccaaccacacgctggtgctcacctggctggagccgaacactctttactgcgtacacgtggagtccttcgtaccaaggcccccctcccgtgctcaaccttctgagaagcagtgtgccaggact

SEQ ID NO: 89256 - DNA, 497 bp, Homo Sapiens
ttctcagaaggctgagcacggcgagggggccctgggacgaaggactccacgtgtacgcagtaaagagtgttcggctccagccaggtgagcaccagcgtgtggttggtcacacactgggaccacgttctgtttgatttagtattcaacacagacacgttatacttcagattggagtatatttgttgcatggaaacaggaaggtcttctggatttctcttccacttctctggagctgtcaggacaacagaaatggacttctcatctgtagtcagtgccacctctggtgggccaatttgtgatgaaatactgcacagtgtaagtaactttaactccttgaagaccctctggtggagtccattgtaggacattcttcatgttgatggataagaaggtgatgtttgcaggtttaggcaaaccaccagagacacagggaactgcccgtccccaaggcgccgccaggagcaacagcagcagcggcggcagcggcagcggccgca

SEQ ID NO: 89257 - DNA, 983 bp, Homo Sapiens
tgcggccgctgccgctgccgccgctgctgctgttgctcctggcggcgccttggggacgggcagttccctgtgtctctggtggtttgcctaaacctgcaaacatcaccttcttatccatcaacatgaagaatgtcctacaatggactccaccagagggtcttcaaggagttaaagttacttacactgtgcagtatttcatatatgggcaaaagaaatggctgaataaatcagaatgcagaaatatcaatagaacctactgtgatctttctgctgaaacttctgactacgaacaccagtattatgccaaagttaaggccatttggggaacaaagtgttccaaatgggctgaaagtggacggttctatccttttttagaaacacaaattggcccaccagaggtggcactgactacagatgagaagtccatttctgttgtcctgacagctccagagaagtggaagagaaatccagaagaccttcctgtttccatgcaacaaatatactccaatctgaagtataacgtgtctgtgttgaatactaaatcaaacagaacggtaagcctgaaatggaatggggcatacattcatgtaccactctgtagctaatgtgggaacaaacaaccctgatgcattgattctctgcatgtgaatctgggaagtcatgatgttcaaaagatacgccgcacaaaataaagttctatatacagaaattttacagaactaacttcagatcttctttacagaaactctgttgacaggatatggtgttgttattggagtgtagagagattgtacacttcactttgatgaagagctttcacttgcacagtctttctctgagaagaagaaaaaaatgtgagcaaggacccaggacaatgaataagaactctatccatgtgttgtttagaattgttctcagcattggtccagttcctgaccatgctctgctgagctaaaggaaaagagtatattgaaactgttgct

SEQ ID NO: 89258 - DNA, 1157 bp, Homo Sapiens
  misc_feature (399)..(399): n is a, c, g, or t
tttttttattaaaaatcattgggatttaataaacagtgtggtgtttctgtacaggcccctccctgtctgtcccacagccagcgggaacgctggatggatgtgggcctgggtccctggagcccacgaggttcctgcagctttcctaagaggaaaaactgatccggtgatggaaggctgcggcctcctaaaagtctcccctgacgaggagacacggcaggggccacagtcacaaccagatcgagatgattagggaaggtgccgcggagtgcggtccactacacatcttcagggtgcatctggactctcttggggctgcaacagtatttttcacatagtttgaggagctctgacaaaatgaagacggatgaggccaatccagttaaaaacagcaaatcaagncgctcccaggttctccgttctggaagaccctctgcagcggggggatgtaaatgaccgccagctgccccaggatggaccccaggacggagtagaggaacatgtggttcctgagaaagccgatctcaaatatcagcttggtctgagagcggcaggtcaaggcgttgaagagatcgaaaaacacaaaacaagtgaacgtcatcgtcgtggtgcggggagtgcttgctctgtcttcaggcatctccttccagaagataaagagggtcccgctgaagatgatggccgcggacatgaggatcttcaggatgagggctctgctgaggatggtgtcccgcacactccgtggtggctgcctgaaggcgtctttgtcaacgggctctacccccaaggtgctcagctggaatcggacaaagtttttgatgttgtaaaaaatacccttgccttcctccactgcattcatgatggctgagaagtcatcatccaccaggatcatgttggcggcctctttgctgacgtccgtccctgtctgccccatggcgatcccaatgtctgcagacttcagggccactgcgtcgttcaccccatccccagtcatggccacgatcgcccctgactcctgcagagccttgatgattttgagcttgtgctttgggctggtcctgaagaacacggacacctggacacggagacggggaagacgaagaatcagatttcaaagctgtgacccagccccaccgccagccaagcctccggggacccac

SEQ ID NO: 89259 - DNA, 543 bp, Homo Sapiens
tgcggccgcccgccaggcgtggtgcttaatgacactcggaatgctggcctctacttacgtgctcagctggaatcggacaaagtttttgatgttgtaaaaaatacccttgccttcctccactgcattcctgcaagagaagagagccatttactcacggagcgggcctgcgggagggctggaccagtgcatcggttgctgcaaggggcagtggtgactcgcccagattgatgttatacttgggcccctgctggttccccttgctggcattcttggggacacatttgtaggagacgttggtgttctaacaggtgcccctcggccactgggaactgatccttgagccatgttcgcccttctgtgccaagggtacacctgatgcctccaatcagaccatgaattactctccggccgagcccagggggccccatccctgcccagactcccgaagtgcgccgtgcatctccgcgatttaccaaagaggagagagagacgcagcaaaaccagttcggcctaaaaatgaggtccggaggacggtaaggaggg

SEQ ID NO: 89260 - DNA, 411 bp, Homo Sapiens
aacatcatcttcagcggtgggatgtaaatgaccgccagctgccccaggatggaccccaggacggagtagaggaacatgtggttcctgagaaagccgatctcaaatatcagcttggtctgcagggagaaggtcacacgggggattgtgtgctgtccacaccccaggtacaggcaggggagctctgactgcccacgctgagccagagccgctcaatgctgcgggcagggtcggggcgctgctgtcgagaacacagagcagctctgcagcgaggagggtcagcccgggtctcacctgagagcggcaggtcaaggcgttgaagagatcgaaaaacacaaaacaagtgaacgtcatcgtcgtggtgcggggagtgcttgctctgtcttcaggcatttccttccagaagataaagag

SEQ ID NO: 89261 - DNA, 516 bp, Homo Sapiens
ctctacgttcacctgtgtcatagcaacaggagaaaactgcagttgactttcgctttccaaatgtcttggaaacagggctttcaattctaaaccccaacttccactctacggtttcctgaaaattcagcatctgtacttcagagttccactggagaagtggctgacctcaaaatgtattagagatcccattgcagttaaaggtcgatggattcaacaatgtgcagcagcccttcaaagaatacagactgtggtttcctcctgggatgacttcaccaggacccttggcaacagtgctggtggaaagtggaaaaaaacagttacatgagccatagatggcagaaacagtagatagaactcacatttaggcagcaggtatatgaagccctgaaactccttgggatccctatgttcaaatgccaaagcaactgtgaccaacttttgccatatggcaaaaaaagacactctcttggcctcctttttcccccagcaatgggaaagaaaagaaataacaataat

SEQ ID NO: 89262 - DNA, 523 bp, Homo Sapiens
  misc_feature (102)..(102): n is a, c, g, or t
tggtcttttcccagcaggaactgagaaagcggctaacaccccctgcagtaccatgtcactcaggagaaagggaccgaaagtgcctttgaaggagaatacacnacatcacaaagatcctggaatatataaatgtgttgtttgtggaactccattgtttaagtcagaaaccaaatttgactccggttcaggttggccttcattccacgatgtgatcaattctgaggcaatcacattcacagatgacttttcctatgggatgcacagggtggaaacaagctgctctcagtgtggtgctcaccttgggcacatttttgatgatgggcctcgtccaactgggaaaagatactgcataaattcggctgccttgtcttttacacctgcggatagcagtggcaccgccgagggaggcagtggggtcgccagcccggcccaggcagacaaagcggagctctagagtaatggagagtgatggaaacaaagtgtacttaatgcacagcttattaaaaaaatcaaaattgttaaa

SEQ ID NO: 89263 - DNA, 1585 bp, Homo Sapiens
  misc_feature (17)..(17): n is a, c, g, or t
  misc_feature (1361)..(1361): n is a, c, g, or t
  misc_feature (1496)..(1496): n is a, c, g, or t
  misc_feature (1569)..(1569): n is a, c, g, or t
tctaggagcgagcctgngtggcgaattcggcacgagggcctcagcgccggcccgaagggaccaggccgccgtccccagcgagaggcatgcagcgctgaggagcggcgacccagcacggcggcgccatgaacctcctgccgtgtaaccctcacggcaacgggctgctctacgccggcttcaaccaggaccacggatgctttgcgtgtgggatggaaaatggattccgagtctataacactgatccactaaaagaaaaagagaaacaagaatttctagaaggaggagttggccatgttgaaatgttatttcgctgcaactatttagctttagttggtggtggaaaaaagccgaaataccctcccaacaaagtaatgatctgggatgacctgaagaagaagactgttattgaaatagaattttctacagaagtcaaggcagtcaagctgcggcgagatagaattgtggtggttttggactccatgattaaggtgttcacattcacacacaatccccatcagttgcacgtcttcgaaacctgctataaccccaaaggcctctgtgtcctttgtcccaatagtaacaactccctcctggcctttccgggcacgcacacgggccatgtgcagcttgtggacctggccagcacggagaagccacccgtggacattcctgcacacgagggtgtcctgagctgcattgcactcaacctgcagggaacaagaattgcaactgcatccgagaaagggacgcttataagaatatttgatacttcatcagggcatttaatccaggaactgcgaagaggatctcaagcagccaatatttactgcatcaacttcaatcaggatgcgtccctcatctgcgtatccagcgaccacggcacagtgcatatttttgcagctgaagatccaaaaaggaataaacagtccagtttggcctcagccagtttccttccaaaatacttcagttccaagtggagtttctccaagtttcaggttccctcaggctctccgtgcatttgtgcctttggaacagagccaaacgccgtcattgcaatttgtgcagacggcagctactacaaattcctgttcaaccccaagggggagtgcatccgagatgtctacgcgcagtttctagagatgaccgatgacaagctgtgactccagctgggggcgccacagcacccaccacctgccgccttcagactctcggggctggtgccagtgccccaggggcctcctgggccacgggctggaggggctgcccagggaccttggtctcgaagccatacgtggttgtctgctttcctaaggactcccatttccagtattaaagagagaatcatcatcaaggcaccgtangtaactcagtggctgtgaccagctcgactggcggccactggctgttcccatgagttcagctgtgacgttagcctcagtggctccgccgcatcctcacactgacgggggctccatacggacctggggactgggctnagagggtggacgagttcaggtttgtttttgcagcagattccgtcgttcttactgagtctgcagcgggggagtnaacaagtgtgcagatg

SEQ ID NO: 89264 - DNA, 878 bp, Homo Sapiens
ctggtaccggtccggaattcccgggatatcgtcgaccccgcgtccgggctgttttaaaggacaccttggaaaaaaagggggtattagggcatttaaaagcaaggatccgagctgaagttttcaatgccctagatgatgaccgtgaaccccgaccatcattgtctcatgaaaaccttctaattaatgaattaattcgagagtatttagaattcaacaaatataagtatacagcatctgtcctcatagcagaatctggtcaacctgtagttccgttggacagacagtttctcatccatgaactaaatgcatttgaagaatcaaaggataatacaatacctcttttatatgggattttagcccatttcttgcgtggaactaaggatggcatccagaatgcatttctgaaagggccttcacttcagccttcagacccaagtcttggcagacaacctagtagaagaaagccaatggatgaccacctaagaaaggaggaacagaaaagtactaacattgaagatcttcatgtttctcaggcagtcaacagataatgctttgtttggggtatcttttgtcttaaaattgtattattaattaaataacttatttattgtcccaatgttaccaaaatgcaccactaatgtttgtagaaattggagtttctacaaaacacccctcatgtttaactacatttgtgaataaaagctaactcttgtcatctaggcttatggatttggacttgaaacaaacggtatgtttacgaagaataatgattatagaaaaggagtctcgtctgtcaccagaatggagtgcgggaaaacctcggtcatgaaacttgctcccggacacagtgatcactgctcaacctccagtagtggaac

SEQ ID NO: 89265 - DNA, 561 bp, Homo Sapiens
gcggccgccgccaggcagcagaggcgactgttgacagccggcggggaccgggaaagaggaggcctggcgcctccggcagaggggcgaggaccgagcgcccaaggctgggagagacgccggcgctgagcttcccagcgccgcctcacctcgcttttcgaactccgcgacccgagcgcaaggcttaagcaggtaaagcagtcactgtgaagaaaataacattttaagaaacttttctgtcacaattgatagaggaaaagccagtagagaagtacatcttcttgtgtgtgtgtctcatcgtgccactttttgtaactcagcttagtaatgaagccaccattatgtcctcagtcagtgaagtaaatgtggatataaaagatttcctaatgagcattaatttggagcagtatctcttacatttccatgagtctggttttactactgtgaaggactgtgcagcaataaatgacagcctgctgcagaaaattggaatatcacctacaggtcaccgtaggaggatacttaaacatgtaacagatgatcttgtcaaaaatgcaagatatt

SEQ ID NO: 89266 - DNA, 1186 bp, Homo Sapiens
  misc_feature (289)..(289): n is a, c, g, or t
  misc_feature (1047)..(1047): n is a, c, g, or t
gcgcgccccctttaagagcagcgattgtaaggagaggcggtcccggtgtcctcgggtcccaggtgattgtgaagtgctgaccaattgccactggacatacttgaaacaaaataggaaaatggcagcaaactcttcaggacaaggttttcaaaacaaaaatagagttgcaatcttggcagaactggacaaagagaaaagaaaactacttatgcagaaccagtcttcaacaaatcatcctggagctagcattgcactctcgagaccctctcttaataaggacttccgggantcacgctgaagcagcagcatatttgcagcccaacagaaggcagctttgcagcatgctcatgcacattcatctggatacttcatcactcaagactctgcatttgggaaccttattcttcctgttttacctcgccttgacccagaatgaagaaaacatttgcgatggaaaagtgactttgtaatatcaaatgccaaagctactatcattcagtgctacatgaactgtgactttaagaattttggtgaactttgatattttttgtttgtctgaaagaaaggaatgtgtaagtgaaagctgaaagaagaataaccaggatgatgagagctgtggaagctgtatcgtccaaggaattgattatgtaccgtgactgtaacttttttgtaatgctgtttaactctcaatcagactgtgaactggatggtcacgaagtcattccccaactcctagcaagtttgactgaatatatcatgtccacagtagattttcaagaatcatttatagtacttaactttaaagaaacaaggctgcttttaaaaaatgaactaataggcttaaatcaattgcatccatatttgctgtttataggattgctatcagtataccttttgcgtttatagtcaacatgtatcatcctgaaatattctttctggacttataactacttccccctttttccctttaaaacaaacctcaagaataaattactaaccagtacttaaccatcttttattggggtggaacgcaataagcaaaaaatntactatgtcgggcccgcctccgggccctcgaagaaacttttccaaaaccctttcgttttggggcccccgggccccccgtaaggggaaaggggaaccatggggccataagcctgggttccccaaagggaaaaaccctggg

SEQ ID NO: 89267 - DNA, 437 bp, Homo Sapiens
gaagccttagcctgcagcgccaccatgcgttgtctttgcttcgaaacgaattgctacaattgatctattctctattctattaggagtttggaaattgggaggaaatgatgtaatcacaatatcacgcaatgaatcgcggtcttgaatgctgaaaagagctgcaacggtctcaggagaattttcgcggatggggcttgtgaatgaagccatggtcagttccggagcgttatcgttgatatctaccacctgtattatgacagtgcattttccagaaagacctgccccatcagaggctttaatatccacctgatatgacacaattttttcaaaatctagttttctgattattttaatttctccccttcgttcattaagtgcaaatgtcttagaaatctcttcatcaccataaaaaatgagtagaatatctcacaattaaa

SEQ ID NO: 89268 - DNA, 527 bp, Homo Sapiens
tttattctacacatggaagctttactatagttataaaatataaatgtgatcatgtaatttccctgcttaaaacactgtagtgttactccaatgtcatctggataaatccacacttgttatcatactttggacttcttagcatggttcaggaggtttatttccaagtatcaaacctctcctacacacacacacgcacaccacctgatgttcctcacagtgagtgtctatcatggctgtaaacgtgttcctgcccaaggaagaggatctctgtaacccctctcatacttcctattgcccaggacactggacctgcaatgcctcctatgagactacatacagtgggcgtgttatggatggctgaagcacagcacggtactgttgtaacaagaaacagcctcttctgtaagggacaaattgccgagagtgcagcttttggtttgagtaaaacagaaaaggagaaaattgacccacatgtgccaataaaaaagaacatcatttaaataaaagacccgtaccaccatttaaaa

SEQ ID NO: 89269 - DNA, 442 bp, Homo Sapiens
ttttctgtgaaacacgatttattatataaaacaaggtgcatccaaattcagtgtcagaagagctttgtatttcaagggctaaggactggaccttctcccttaaaacctccttacccaacccttgctaaggactcaggcctggggcagaggctgtcagtctctaaagaccccagccctggaccaggacggggagaacaagtttggtgcatagcgtggggctagggcagtgggtcaggcaccatcccttctgcaagtggccacaggtcaccacagtgggggaaggtggggagcttgaacctccaaagataggttcattgtaggaaaagctagaccaatgccttgggtagaaacacccaaatccctctacaacaactaaagcaagaatgtggaacccatcgaaatcttcccccaaaatgccaaccataaaatagattcgacagaa

SEQ ID NO: 89270 - DNA, 547 bp, Homo Sapiens
cacctattttttcctttgtttacaatctactcaccaggctcatacctacaatgtgaacatacagtatgcccttattagcagattcaatggctcacattctttcaaaaggtctaatttgacaaatacataagacccattatttcctagaatgtttgtaatatatctaattgcaaatggtgctgtggttggcaccatgcaaagataacttgcataggactttctgtcttttttcatttccctcagcacttggcatcttgtcatctacacaatggaccctcaataaatggcctatatgtgcaaagaaagaatgtgtagcaaatgaaaataccagaccaagaaatgagtgagctgggaagtgtttccaaatacagttagtgcctaaaatagtgtcctttgaaaaaacttttaaaagacttttttttaggccaggcataatgggttatccctgtaattccagggcttttgggagttgaagctggaggattacttgaggccagaagtttgagactagcctaggcaatataatgagaccctgtctctacaaaaa

SEQ ID NO: 89271 - DNA, 129 bp, Homo Sapiens
aatatttttaagtggcaactctagtgtgtgagaaaattaatgtgacagctgaatttgtagaaagctgctttgactctcttgggccccttcataagccctggaactaaataaaagtctagtgaatacaaa

SEQ ID NO: 89272 - DNA, 474 bp, Homo Sapiens
gatatgttggtgaaggagttgaattatttgaggaaaaaacatctgctctcttgtcaggacttttctgtctccaggagcttctcaactttgcagatactctagaatggtattgcatgcaaaataatgaccgccaagatgttcctgccctaatccccagaacctatgaatatgttatattgcaaagaaattaaggttcaaacagaattaaggttgccaatcagctaaacttaaaatagggagactctcctagataatctgggtgggtctatttcaatcagtggaaaggccataaaagcagagttgagtcttccgtgagatgaaaataaattttgtttaaggacagcagcttcagcttatgccccagaattccagcctgcccctcctaactgcctgctgtacagattttggacttgtccagccacgtttcaaaactgagtaagtcacttccttgcaataaattgattactacacaaa

SEQ ID NO: 89273 - DNA, 372 bp, Homo Sapiens
cccaggagagggggctggaagagagcgagctgccattgtattttggttgctgtggatctaaggagaagagatgtttaggagtctttccctggcatggttcctcctgccttcacccatcactcttttcctcgagggattccctgtggggtgcacagccccagggtgggccagactgagctcacaggagcatgggctgtgtttcagatgtggcctcagaatccttctcaacacagtgtactagcaccacttggtgctcctgatctactgtatcatctcttgaaaaactactaacatgaaaagacctgccaagtcaactttatattaactgaacccttgacacagaaatggataaaaattaattcaaacagcaaa

SEQ ID NO: 89274 - DNA, 476 bp, Homo Sapiens
ttgagatgaatgaacacctgggccatgctgtcctgagacgaatgaacacctgggccatgctgtcttgagatgaatgaacacatcagccatgctctcctgagagggatgaacacctgggccttgccgtcctgagatgaatgaacacattgaccatgctgtcctgagatgattgtcctggttatgcagacatttctttatattatttgcttaactttaatgccctcctaggaagatttcccatactttcctcccttcaatcaaaatatcccaagttcaacaggtctggctcactcctctctattcatctaaggtctactttgttcaggaatttctgtctaggactcaggcaggaccaaggaaatcttttcagtgacattttaaatatcactgtttatggaatgtgtatagataactgaataaccaaataagtgttgttttgaaagtatctttattaaaagaatataaagaacagaaaa

SEQ ID NO: 89275 - DNA, 644 bp, Homo Sapiens
  misc_feature (584)..(584): n is a, c, g, or t
aaccaaactacccatttcatccagcagagtgcaacacattcacaagtgcaaggaatactgggtagtttggtttaaaacaaaaacaaaaacacctcccatacaagggccaatttttcaccccatccccaacctctaatttttcaaaaaggttgtttactgctatacaatcccagaaacacatcaaccaggctcagtatttaaaagtcccaacccacttagacaataaaaaaatagaaatcactccccatgattttctgtataggcctcaatgtggacactgaggaacgaagggaaatactggacaagctgagaagcctcaggccaaactaaacccttcatagttgtcaagggcctgggtcagccgggcactcagaatctctttgctgctgtacttggggaggtcaagaaggttgtagcaagtgtgggccaccggcaagtactcctccccgctggctgtggactggatgacaatctgcagactggccatgccgtagatgggaaaccgatcgctgcctgtcaggaacaagaagaaactgcttcttcttttccaatggaaactcatgaaatgtttcccaaaatacttntacagtgggatgtgtggccgagtaatctcccttgtagatggcagtctcttccagttcttc

SEQ ID NO: 89276 - DNA, 374 bp, Homo Sapiens
tttaataaaaagtttattcagacagtattaggccaactgattttacgaattgtaattatacgaagcccactgaagccaggtttcagatgtttctgtagtcttcccagaacctagtgcaatccttatacccaaaaggtgtccaccaatactttatcgatgattaccaagactgtgagctctgcagaggcactaatattctcatttttatatgtgacaacacaggtatacattccactgtcatcatctgtcacattggagataagcaagttgcttccacccaataaagaatactttttagacctgagttggatgacttcctcgcctcgtaaccaggtaaaacttggtggaggatagccagaaacacaacatttcag

SEQ ID NO: 89277 - DNA, 464 bp, Homo Sapiens
ttttatttaggattgctgcatctttatttgttttatagattgcatttctctggaatgaccacagcaatatttccagcccttgatgatcttctagaactttgccacttccctgcatcaagaggtaaaatccatttctattctcttgaattgaacagcttcaatgaattgagtgctgaagaattaacactctgtgacttcatgacttgttggaaattgtgaggaatctcaggccacatggaggggccagtgaagatgttccagcttatagccccagctaaggtttcaactaatagccagactcaaccaccaggtatatgaatgaaccttcagatgattctagtctccagccttcaagcttccccagtcgatgctgagtggagcaaaaaaaggaattattctcactgagccctgtccaaattgcaaatacctgacaaaaataaatattgttgttttaagccactaaa

SEQ ID NO: 89278 - DNA, 683 bp, Homo Sapiens
aggttgaacaatttgctcccactcacacatctaggaaagagaggagatggaaaagtaaacaatccagaaaggtcaaggccctcattccatcaatgcacaattcaagtacacatacgtgggaaaccatctgaaaagttttgtaattacaatttcatctagccagcaattctccaactcattcacatgcatctcatgacatcgttgtcagaagccttgctagagtgaacgtgcacttcatcaaacacacccctgatccgtgggagatgggattcgtttgtgctgatctactctccaggaacacaagaaactcaccattctaacggttcataaatcatccatttaataccccagtttcagattttgcaggaattaacatcaatgcacggtttttgagacccgccaacttgctgaaacagtgcaagccacctgcagtcctcggataccactcagtgatggccctaggtctccctactctgggcctgagattcacttacagctgcaaaacacacctgtgcactctcctcataggcagaacgctttcacttctcagtcatttccaactgagactgttttccttggtagagaatacagaagtcaaatggactcagagtggttctgccttgtctctgccttctgttgttgagaataaaccaaaaaaatcccttcttctgtcattaacaaaa

SEQ ID NO: 89279 - DNA, 669 bp, Homo Sapiens
actggcagtgccaagctaaaattaaccctccactaaagggaataagcttgcggccgcatacgcggtctttttgtttttccatctgtgcctgttccttccacagcccaggcacacagaagcccaccttcttccccttaggaggagggatagtcaacacccctgctgtctctctgtcactcacacactgatttatggggtctgagctgggctgttcctgcaggatggacaggacccagcgccctcttctccccacaggctgtaaatagacttccaatcaccaggccagcccccacacaccctcactcattccagggaagcccaggtaggtggtgaacccactgccacgtctatcagtcctcttgttttatgcaaagatttactgtaaagtagatttctttccctccctcccccattcttttattgtaaatattgtctctaaatgtgtaacatattataaagaatttataaggatttttaaagatgttttgctcatttacaaaagtgttgtaacagtgttggacaaagccttccaccccatgtccgcatggctcctttcactgtgtccttgacacacctctctggcaacaactaaaatttcctgcttctgaaaagtcctgtcttaaaagtacagtctatatcttggaaataaatagctttcctcaaaaaaaa

SEQ ID NO: 89280 - DNA, 482 bp, Homo Sapiens
ctctgtgcctgatgtaagatgctaattctcatattatctcctctgcaataagcttctaattatatccagataatcaagaccaatgcctgtgcacgctttctctaactttctctaaaaggactgcatataaagacttcaaataactgaaatgctgcattagaatttatatgtttttgccttaaatacttttccaaaataaaagtggtagccagtagcaacctcagtgacaattaatgtacatgatgctctccagccgagtacaaaaatatgaatacttaacaatgaacaaaaatggtagaagtgtgggtggatttacaattatgaacaatcaccgcactgtttgttgctctgcaatctgggagctttgcagccagggataatcatgtgatcataaagagcagcccccaaaaagcctgggcacaggtgaaagaaactctttatatgatgtataagaatgaaactgaagcaaccaaaatgacaaa

SEQ ID NO: 89281 - DNA, 450 bp, Homo Sapiens
tttgggataagaaaccccaaaacgcatggaacaactatccatggctcttagccagaaatgtcttgcctctggtctctgaaaagctggggtgagtggttacctcaaagacaattgcctccagtttgggggctcctctcagggttcaccctgtcaccggggcgtgggaccgacctgggaaatttccactagagttttgccctcagctcctccctgccagcatcccagtcaccaccaggtggcgcttctgacacggtccacgtgcctggctctgaaggcccaactgtcagaccagacccctcactcatggtggggagacttgacttcctcgggctcttcaggagactgagacagagaagacaagtgaaagcgcagcctgtacatgactctctgtggtccacgtcctgcctctccctggggtttacacggccccaataaagcctgctctggcct

SEQ ID NO: 89282 - DNA, 506 bp, Homo Sapiens
agtgctatgcaatgtataattctttctagttaactgacaggttacagggacaaaggttatgactgacatgaatatgcagctctccgaaacgcaggagacatggatccaacgaaaagtagccatgttactaaactcactctgcaacaacagggctgagtaattcaagttggggtaagcttatgtcaacacgagttgagtgacttgatcatataaaacgatttcttgaagatattcaacgcttcatgtacttgtctgtcagcatacagtccacaggctattcacactctgctttatattcagaaacaaagcaagcatggaagctcatgaaaaaggcagagcaggaagaactgtgtgtctcttggcaggaagaaagcttaggtagaacacctgtatacaccgcataaaagtaaaatccgtggtattatacaaaggaaaacccacactgaaatttcaacaaagaaaatccttaagttaaatgtacggtttctaaaattgaaattttcttg

SEQ ID NO: 89283 - DNA, 472 bp, Homo Sapiens
ccctctgcccggagctctcccgcatcctccccagagctgcccctggcgacctcgagggtctccgcaaccttccccgaaagccgctcacagccttgtaatctggatgcccgcaaaactggggtcaagcggcgccacgaggaagacccccggcgtctgcggccttcgttggactttgacaagatgaatcagaaaccatactcaggaggtctttgtctccaagaaacagcccgggaaggcagcagcatctctccaccatggttcatggcctgtagccccccacccctctctgcttcctgcagccccactgggggttcctcccaggtgctgagtgaaagcgaagaggaggaggagggggctgtgcggtggggtcggcaggcgctgagcaagcggacactgtgccagcgggactttggggacctggacttgaatttgattgaggaaaactaaaactgagaggctacttcctgggaaa

SEQ ID NO: 89284 - DNA, 447 bp, Homo Sapiens
gcggccgcgtccggaactggatctctcctcttccgccctcttcgctaggacagtcgcttgcaattggccgcacgcccctagctcctccttaaggcacctttccccgcccccgggcgggctacttccggctgctgaccgccgggctcggagaagcaagcatcagctggctgtcgcttggggtcacgttgcctgtgtcgggcagggcagggcaagaactgggtgtggcttcctttggcccaggctctgccctgtccccgcactgccatctccttctttcctccttggcaccccaaaaattgccgctggatctaaactagattagactagtggattgtaaataaataaacaaactaggctctctctgttcattcattatttcctggagcagttctaaactgggatgacttgggagacagaaaacggcaggtttatagagggaaagggcct

SEQ ID NO: 89285 - DNA, 564 bp, Homo Sapiens
  misc_feature (31)..(31): n is a, c, g, or t
  misc_feature (47)..(47): n is a, c, g, or t
ctccaggtatcaagatctcatattaggattntctgtccttaattttntgagcaaaatctggaaaatgtgaaagcatatttagattttatatactatctgaaatgtgatttgttaagattcttaaatttgggcctcttagaataattttgaatgagatctaccgactcacttgtgagaatatttttcacagattatctttgggccttttcattagaaagctgtttgtttgtccccctgttggtacatttggttacctcattttgccgtttcagattgtgaaagctcacaggggtgttttttggaatcatttgctgagtcattttctcaaatcatattccattgtatcagttaacatatagttttaaatgtatgtattataaatatctgtaaccaaatcatttgaaggcttgataaatttttaacaaagtttgtacattttttatgaaagttactagtaatgctttactaagtagtgcaatgaatttttatttttaatccctgtgcccaattttggagttgagagggttgttggtaataaatgtatgatgtacacttaaaacaaaa

SEQ ID NO: 89286 - DNA, 375 bp, Homo Sapiens
  misc_feature (200)..(218): n is a, c, g, or t
ggggcagggcagtgtctaggaattctaggacttgggacaagaatgcgccttcagttcatcgctctccccaaggagattctgtccacgcagagtctagccctggtctttggcctgggcctgctggatgaatggcaggttatttccccttgaatctcagcctctgcacccctaaagccctccacctctggacattctccctnnnnnnnnnnnnnnnnnnnggaagtcaaaggaggggcagttgcaagaactgggctcctttgcagggctcccttctggggcgctggccgcaccgcagagcctacttggcctgcagatttgggatatgaatccagtacagcgtggggagcgaggagggaatggggagggagcggccgc

SEQ ID NO: 89287 - DNA, 495 bp, Homo Sapiens
aacaatcaaaaacatcaacggcataaaatgtttacacagtgatgttatgaacgagattgccaacagagcctctaatgaggccaggttacctgcagacaaaatgaaaacccagctccctcccaacacggtccgctactgggcccagaccgcagcaaccgcaacgcccactgccacctttccaactgcgcagccgcacactctccgggctctccggccccctcccatctgccgcagttaggaaaggccgagaagtgcgggcggagccgcccgcgccctccgcaaagccagcccaatggcggcctcgcgggcgcgtcacagcgggtggaagccagaatctcgcgacgcctcgaccgcgcctgcgccaacagcagcgggcgggcgctctgcggccacaaaatggcggcggtggaatcaaaggcagcagagcagcgcgtgccaaattccctcttcccttatcctcccagcaacccccttctcgggggtcactgcggccgc

SEQ ID NO: 89288 - DNA, 518 bp, Homo Sapiens
ggccaggcccacttgaagggttttttgtttcatcttggagaaggacagtgaggtcatggtataattgttatgagtaaagtcaagaacagcttctaggtaaaagtaattatgtacccaaaaggagttgaagggaaaatcaatttaggtttacattaaacatccttcaagttcttatctttaaatggagtttcagtgtctcccaaaggctggatgagttttacagttataaccactggattgtgagaccataggacatttgaacaatcttttcttctacccatctagaaaagcatcttttttatataccaaatttttacacatatatccacatctgtttttgaaatctagagcagaggtactcaaagtttggttcatggactagtgccagttcacaaattgttaatgttttataatgagataagtacggaagttgagagtaaccatttagaaactgtgtaggaatttaaaaagtaatatctgacaaatttaataataaaaatggaggcttgtaaaaaaaa

SEQ ID NO: 89289 - DNA, 499 bp, Homo Sapiens
taatatagagaactgattatgttcacttgtaacctgtcattccaaaattcttcaggatgtttaatgttcaagtgtccatattcccagtcccactggatgcctggcaggatgcaaccatctgaatgagtggaagtataatgtttgcaccaggtattatattaggagccttgaacccagaatatgtctgattaagtcttttagcccaataatttgccactgctgccaagtctggtaattttgaaggagaaagttcaaccataacggggtgatacagggcacccccgtactcaaaaaactttcaaagtgctttctaaacaagtttctctttctccttgaatacaacgtcagtcacaactgatggcagtacaatcgatccatccatacactgctctaagaacatcttgatggtataatatgctgtcattcatgctctacctgctactagtttaatttggtcaagtagctctttccctggagactcaaattctactagactcaa

SEQ ID NO: 89290 - DNA, 453 bp, Homo Sapiens
  misc_feature (44)..(60): n is a, c, g, or t
tgagattttgtttgcaatttttaattaagcaatctgggcaaacnnnnnnnnnnnnnnnnnctcttcaacattaggaggaaagaaaaagaccacacttgggggcctggtgggaaaacagaaaatgctttttctcatttcaaccagatttcaaagcagcagagtgcagagagacagtagccaggccctccctcagtattcctcaggattgcttgagtgtaagtctcgcagatatgaatcaattatgtttggaggtacgccttgcaagaggagtctgcagaaggagagcccaccttagatgatattataaattcaaaaatcctcattgtgcaatgactttcaccctcagtttgcattcaatctccactggcccaagggcattgactgctttgcgagaagtagtgcctccatcataagggcttggcttgcgaattttcagggacaaaactccctggt

SEQ ID NO: 89291 - DNA, 399 bp, Homo Sapiens
  misc_feature (68)..(68): n is a, c, g, or t
ggtgttacctgggccaggtggggaaggtttgtttgcagagcaaagaagtgaaggaagtattaaccctntgcatggcctcctgagaatccgacaagacgtaaatagccaagaatatctgtgaaacttcatcactgagttacaatatttatcactgcaagtgtgttgttcattgacactataaagccatgtggaattaagcagccttgaaacacaaaatggagaaaggctaagagctgagaattgttgccttcagggaaatacaatcaatgtcaagcaaacaaccaccccaaaatggttagctttatcagcattcaggcctacagtgaacgcaaatgttccagatctgagtttcaatttttaaagaataaacatatgcaaatgaccattaatcttagtaaa

SEQ ID NO: 89292 - DNA, 514 bp, Homo Sapiens
taatttggcctttaggggtactttggaaaagtgagctgctcatctgtcattggaattatttttaaacatgtaaggaaaagctactgattgagttcaaaccaaacaaaatacttaaatgtatgaagtggtttcattaaattttcagaccttcttagcagtagaaacaagagacacatcactgtctgtagagttgtgctgtgtcatgggttttcctcagccaaccgccatttgcaataagtcatcaatcaagtggatgcatcgttaacaaattcccttcattgctaatagagactttacacacgccaacattctttttccctgaaaattaaccctattgtaagggtccaaatgttaagggccttgggcaaaagcaaactaaaggcagaaagaaaacaaccatccccttgcaatggaaaacaaaagaaaatgagagaaacgtgatgaggaggaattaccagctgatttcataacatatccatgcctcccatacacatatatatgaaatcaaaatcta

SEQ ID NO: 89293 - DNA, 437 bp, Homo Sapiens
gtgtgcagggtagtaatggaggtgctgtgccatgaccagcagtgttggtggccacccagatccccaagggtctctggccagctctgtgtgcccaatcccaattaagtgctttgaggttaaaggctggcacctgtgacctggtattggagccagtcagcccatatggagagccagcagggtctgggagttctccgtcctcttggccaaggccgctgactgactgggctacgagtcaaaagcccagctcccttgcctcaaggaaggacattctctgaggagtaatttatgctctagcactccctttcctctagatcggcctgaggctgggacattacatgaaatcacacccttgctgggcttaatccctttccctaccctcccatttatttactggtgtctctgggagcctttccttaataaacctcttatatctgaaa

SEQ ID NO: 89294 - DNA, 581 bp, Homo Sapiens
cctctcagagacaacgtgaagacggataagcaggcatcaggagcagagtggcctctcaggtctttttggaagtggatatctactcagacagtaagaattataagagctgtaagagctcattttggaggaataatggatgaaccatctcccttggcccaacctctggagctgaaccagcactctcgattcataataggttctgtgtctgaagataactcagaggatgagatcagcaacctggtgaagttggacctactggaggagaaggagggctccttgtcacctgcttctgttggctcagatacactctctgatttggggatctctagcctacaggatggcttggccttgcacataaggtaagagagagttcaatggtctacttatttaatctgtcttgttagttttgctgattatgttctgaaaagagcaaggatgatttcagctaagactgctttgccttttcctatgtcactgaactcaaagctttgttgaggaagtcagaaatgatgtatttttcagaaatacatgtatgttcccacatttttcagtgtcctactagccaccgtgatatgtgggcg

SEQ ID NO: 89295 - DNA, 671 bp, Homo Sapiens
tcaagttgaccgaagcagagttgatgatgacaggcacggcatcataatcgaagcctttggaacaacccagtcttggagagctgaatttgtaacaaaacttcatggagaacctggttcacgagcgctgccaagctgctgagccacagccgcctgcgtgtgctcaacctggctaacaaccaggtgcgtgcacccggtgcccagtccctggctcacgctctggcacacaacaccaacctcatttccctcaacctacgtctcaactgcatcgaggatgagggtggccaggctcttgcccatgccttgcagaccaacaagtgcctcaccacgctgcacctcggtggcaatgagctgtctgagcccaccgccacactcctgtcacaggtgctcgccatcaacaccacactcaccagcatcaacctgtcctgcaaccacatcgggctggacggtgggaagcagctcctggaaggcatgtcagacaacaagaccctcctggaatttgacttgcgcctgtcagatgtggcccaggaaagcgagtacctcattggccaggccctctacgcaaaccgagaagcagcccgccagcgggccctgaatcccagccacttcatgtcaaccatcactgccaatggccctgagaactctgtgggataaaatgacctgaaatggaaaaa

SEQ ID NO: 89296 - DNA, 545 bp, Homo Sapiens
tggaaattggatctagatccagctggccacaggtcctcaatgagattaagcttggtgctggggattaccagtgaataaagcacgctgccagggcctttcctgagtgactgatgctgtgaggatgagcatgtggtgtttgcattggagggacaaggtgccaacttaagtcagcgcttctgagagcggatcaagcgaagttgtatctaccatgaccaaaatctcatctccaggatcacttggtcttggaactctgagccagcatattagaaatccagctgtttttctgggagaccatgtaagagactctgagactacatggagaggaagaggaaccaggtgagctgtcttccagcctctcctgtcaggcaaccagacacttgggtaagactgtctttgatcctttaaaccagaccatccagcaactcaataccaccaagtgacctccgtcaagctccatgtgtagcagaagaatctcccaactgagccctgcccatatacctgctacacaaaattatgatatagaataaagctgtggaattttaaaa

SEQ ID NO: 89297 - DNA, 480 bp, Homo Sapiens
cacccgaatacaagtgttctcttgagtgtggcatctggtcagatgttttatgggttggtttgtttttaaaaaacaaaaatttcctgttagatgggtggtaagaaccagtcagagtttgtaaacccaccaagcacgaggcggtcggaccgtccagattctggagtccagaagacaccaaacgttctcagaatgccgaacgcgggcgccacctggtgggactagaacgcttattgtcccaaatcagcatagcacacagttcccataaatcttaaaaattcccatccaaggctcatttccgtgtgactaaaagtcatattctctgttctcgtgactccaagtaaaaatgtccctaaagagccaaagtatcttcactgtataaactaataatctattggtttggggaattttattttttgtgatcaatgttactttagcctttctatgatatacatataaataaaaaagttttcttccatgaaa

SEQ ID NO: 89298 - DNA, 752 bp, Homo Sapiens
tagtaaaagagctactccttcagggctactcccactgaagcagaggagaggggccactcatcctcccccttgcccacccacagcaatcactgaagcaccttctgaaatgatagaatgcaagaagataacttctctgttagcgtagaacatagctaagaacctggtagaaagaaagaaaaggtcatgatgtaaccaggatcactctcacgaactctggggtcttcactcactgcctcctgacccattatttaagtacagtttttaaatgcttggtttcctgattcttcaacccaagatatatttgaaacagaaaattagaataggagaagggaaagaggataactagaatcaagtgcatggagagctgcaaaaaacagactacaccaccagactacaaaggtagtgaggagagtaagaaacactaagagaaaaaaaagacccagaagctctaaatgtactctagtgtgggagtaatttaggataatggcagtagtcccaatcccattaccagatttcagctgagattagtaatttattttagtagcatagactctatatgtacttatctagaaaactcatttatagggagcagctttcactgatggaaccagataaaacaatggcactgtacttctcatttttccttttctgtgtatgaaattttaaactctgtgtgttgtatatccatatattatacatgtaaaaaaaggataagtctcagacctgaataaacgtcagatctatcagaaaaa

SEQ ID NO: 89299 - DNA, 508 bp, Homo Sapiens
ctttgcatcctcggtaatttaaagttcgtcgatgaatatgtgtgtaaaacgcattcaagtctataacctttccaattacctgtggcccttagtcccacaggagtccctgttggaagcgggtaaacactggatattaatgttgctgagtgagtctttctagccaggacaagctgattggaatttttgaatggtagagaagaaacagcacaaaggcacttgccattttaagtgtttggagaaagagaaccttttaagtttggattgggtgagctttcttctaaaaggagcttctgaagtaattgcaaaggaatagaatcgactatttttatagtatatttaatatatttgtatataactataataggaaccctctacatgcctcccacttttctaatttacttccccttttgccatagcactagtatagcctcatccgcatgggtaatgtgcctattgtcagcctaccaaaagatagtgctgctgctttatgagacaggtgagaagaccc

SEQ ID NO: 89300 - DNA, 410 bp, Homo Sapiens
tttcactacctttttagattgtgcttgtgattttcaggcaagctaaatgtctgatgaagactgctcttcttttgttctgtgtctgacctactaattcctgcccatgcttcaaactcagttcagaaatcactgaaggaaccatccactgccggcctgcctgcaaccacagctgacagctgagttagttaggttttcctgtccctattatttaccagtttgtactgaaatgctttcatgggctgtgcttccagattatgagttctgtggaatcaggaagtatgtctctgtattcttgtattctttggcttttttgtgtagtaaagggactcaagtaatgtttgacagtgaaggatacaacttcattccttgcctgctttgataaattttagtaataaattcccaaaactaaa

SEQ ID NO: 89301 - DNA, 322 bp, Homo Sapiens
gcccaagcgatcctcccacctcggcctcagaagtagttggaacaagtgtgtgccacagacacccagctaattgtcatctacccacttcagcttcccaaactgttcagattacaggtatgagccactgtgcccagcagaaattacatttataaattaatatgaagacatggtgataacatatttataacatgaaatctgctcattcaggaacatagaatgcaaatctttcattcctctcagcaaaattttgtcatgtccttgataaaagccctgcacatctaagtttattcctaggtatttaatttttgctgaaatacctgaa

SEQ ID NO: 89302 - DNA, 532 bp, Homo Sapiens
gagggaaagggcacaagtacgaatggcatgggaagaaggcaggaggtccaggctatagagtcaggcactgggtgtggatggagcagctctaacctgggtactgcacatatgtgttgtgggtagaaaggtcagggaatgtttttgctcacaaattcacgtggttatgtgtatgtgcgtgcaatgagagggtgtatgaaagagtgtgagtacattgtccttccaaacctgattcatcccaaactctgtgaggtttttctccagtgccataattgcatttcatttactactgaattttattgctaagtaaatttgtacttgtttgaagagctctgcttgctcaacacttgctttatgtcatatagctctttttcatttcatatggattaattcattgtattgaaatattttatggttaccaattattattggttatcagtcttcacacttattaaccatcagcgtggaaacacatcttcacatttcccttatttaggaaactaatgctgtcacaaataaaatcttaaaatgcaaa

SEQ ID NO: 89303 - DNA, 1153 bp, Homo Sapiens
gagtatgaagtgacggcgcccgaattcggcacgaggcacactgtagctgcaggagcctggcggagctggtccctggggtggggggcatcgcttctctgcggtgcagcagcagcgggagcaccatcagcatcctccccagcaaggctgacaacagccctgattccaaaatctgcttctacgatgttgaaatggacacagtgaccgtctttgacttcaagactggacaaattgatcggagagagacgctgtcctttaatgagcaagagactaataagagccacctctttgtggatgagggactgaaaaattatgttcccgtgaaccacttctgggaccagagcgagccccggctgtttgtatgcgaagccgtgcaggagacgccgcgctcccagcctcagtctgcaaacgggcagccccaagatgggcgcgctggccctgcggcagatgttttgatcctgtccttcttcatttccgaagagcacggcttcctgcttcatgagagcttcccccggcctgccacctcccacagtctcctggggatggaagtgccttattactacttcacaagaaagcccgaagaagcagacagagaagacgaggtggagcctgggtgccaccacatccctcagatggtgtccaggagacccctgcgagactttgtggggctggaggactgcgacaaggccacccgggacgccatgctccacttcagcttctttgtcaccataggagacatggacgaagccttcaaatccatcaagctcatcaaaaggtgaggatcccgaccactgggatgttgggagatagcgcgtgctcacggctctttcctttctccctgtttgccttcttggttcgcctgttgaaatatttgactcctcatgactgcgtcatggtgtatttcatggtcttcccactcgatgaaatgctgcccagcttgcagatgccacgtgggaagctctcagcctctctggtgctgggagcctctcgggctgtttagctgcttcctagtggaaagttctgccgttcctaaacatctataatacccatccctctgggaataattgctcctaaacagaagtttggacaagtaaacactaaaaacagccaggtggaaacacaattaaaaatgctctgaaagagggtatcaatcaaa

SEQ ID NO: 89304 - DNA, 658 bp, Homo Sapiens
gcttatgcttactgttaccatggtgagactttattggctagtgataaatgcggtgaagcaatcaggtctctccaagaagcagaaaaattgtatgcaaaggcagaagcactgtgtaaagaatatggagaaaccaaaggacctggaccaacagtcaaaccttcaggacatctgtactttaggaaacttggaaaccttgtgaagaacaccctagaaaaatgtcagagagaaaatggatttatttactttcaaaaaattccaacagaagccccacagctggaactcaaagcaaattatggtctcgtagagcctatacctttcgaatttcctcctacaagtgttcagtggacaccagaaacattggctgcatttgatctcaccaaaagacccaaggatgacagtactaaacccaaaccagaagaagaagtgaaacctgtgaaagaaccagacatcaaacctcaaaaggacactgggtgctacatctcctaaaatacaacttgcacttagaatttctctagcagtaaataagataaaccacagaatttcagctcttatttctcaaaatgatttctctgaagcttgtaaaataactattattcagagggttatctgccttcagcttacttgttcttaatttttaatacagcggagatgtttcttg

SEQ ID NO: 89305 - DNA, 428 bp, Homo Sapiens
tttgcagcttttactaacagagatttattaaatttaaacagctccctttttcgtagcttctggaagggaattctcttcatttcaggattatagggagcttcagcaataacctgttccatcctacagcatatgtccttgtttctccttggtctttgcactaacacaattatctttttctcatgtgcttaacttttctgagatggcagtgggaatctatttctttaagcgccttctcgagttgctgaattaagacaacttttttaaacctgaaattaaagaggtattccattcaccagaggatacctacaggatctatgagatgtaagaggtagagtggatacaaaatagaatttaccatctacatgcaaacagaaaatgcatcctcattgaaagatacaaactagaaaaatacaaagtgagtcaactga

SEQ ID NO: 89306 - DNA, 459 bp, Homo Sapiens
  misc_feature (67)..(68): n is a, c, g, or t
gcatttgcagcatcaaatcacccaagtgccatgtttggttatgagattgtaaattattcggctcccnncaacctcccctcccctcattttcagtggcaatagaggacccttgttgtacttcttgtttaatttgcatattatgtgtaaaatgctttcgttgaaagaaaactgaagacactgaatgtgtatgtctgtgtgggtgctctgtccctgtggttgtcatagccagtcagacttgatcactgacaccccgtacaacatattgcataggtaagatcctcgatctggtgttctctgcgtggctgttagggactgtatatcttgtaaaagaacacttgtcacatgcttgatcagttacagcaatagctgaagaaacatttcctcaaatgtattattttaacaggaatcatgttctaatttcccatcctttaattttaataaaagctgaactgtgtgaaa

SEQ ID NO: 89307 - DNA, 800 bp, Homo Sapiens
aatcgtgtgattatctgtttttcaggaacaacatgccagaatttcacaaattaaaagcaaagttgataaagaagaaaggaacacgggcatatgcctgccagtgtagctggagaactattgaagaagtgactgaccttcagacagatcatcagcttcgctgggtttgtggtaaacattaagaatgcagactgcacattcggacagatgcatccatgagagtggtctccatgaatcatcatcatgtttagacaatagtccctagcaataccattccctgtgggaaaaggcagtgaattttattgatacaactacatacatttttgaagaccaaatggactaaggaagatcatgtattataacactttggaattattcctgatacatggatgtttcacttagtaacaggcatctacattctttactaatctgtcttctgtttaatagaggtttgattatggagttccatacaaatatctagtttttcattagcaactgcaatattgattgctaatacgtttagcaaatcattccccaacttgtagcagttaaagtggataaagccggccagggcaaagagatcatttaggggtgtctacaacacttcttccagtcagatcttttgttgccaaagatcataatttggacatggcagaaaccaggtgatcagtggctgactgaagggtgttcagaagtagttacaggtattttgcaaaaacactgcctcatagctgatcttacctcatcaactcaaagcaatgttatgcacaatattaaatacatgttaccagttttaaaaaaaa

SEQ ID NO: 89308 - DNA, 655 bp, Homo Sapiens
gggttcctaagggcgcctgcggcccggcaattaccccctgggtcctctcacacttagcagtgggtgtcagatggtggaagggaacgctcagggaggccccgggcggtgagttgtccctcgggcggggacgccctcgtgggcagtgcggcgtggacggcgcaaggaataacccggagagatcccaagccacgagggaccgcttccggcgcattgtgaggtcccacctttcccgccgcctgaggtcgcggcggctgctctttcccggagcagcgtccctggaggcgctgccagggggtgaggcacccacgcgtgcaccgtatgtaccccccagcgcggcgcttagaacgactcgcatgagtcgctgccttgggttggaaccggttactccgccgcttcgtactggactgcaaagtaacaagtacttcgccgggcagcggtgccgaccccgtgtgctacggcgagaggtgcttagcctagagccgacgaaaacatgtccccaggactccctttccctcccagactgcgtcccaccagatggagctttccgtctgttttaaccaccagtgtattcctgatgcctgacccaggcgctgaaatatttgttgaacgaataaatgtgtaggttaggactgacgacagtccaaaaattctgaaa

SEQ ID NO: 89309 - DNA, 427 bp, Homo Sapiens
gccgcgcttctccgctagacagggcgggaagagcgccgctctccgggcgcagctttgtctgggctgcggagcgcgcggggctcctctcctccgccgaacccggcccgggtttcctttcccttctccgcaggctcgggcacctcgaaaccccgagaggcgctgggagctcgggcggcggaggtcggggtctttcatccgtcagggatggtgaagtttgaaaacaggctgcgggctgagaagctcggaggctgagccaacagctgctttggaggggactgctcgagtttgtttttcagaccttttgggttgtccgaaaatgcgttgggattcccagttcctgtgttgtgaaacacttattagatttatataaggcctttgagtagcttaagcgttttaactcctgctggcccccttggaagccccagtg

SEQ ID NO: 89310 - DNA, 374 bp, Homo Sapiens
cctccacctggccaagcccctggcctccgggttctgggatgtgggctgggctgaggtccgcccaggtttctcgcttcttggagcccccgtcagttatctgcgttctccattcttctctggggcacagcctgcttgtagtgggtccctggcaagcaggaagaccaggctgcccttgctggcacattccaaacctttgcccatttcaaattctgctaccttcccactagccagagcacgtcactcgccaagcccaaagtcaagggaggagagcccacccaccacctacagaccacagcaagcagacggatgtaaaattctgctacgggggagtgaaaaaccaatgattaaattgctaattgaattgtaagttaaaa

SEQ ID NO: 89311 - DNA, 337 bp, Homo Sapiens
ctgtgtgccaagagctactcccacagcagccccaggagaaggggctttgtgaccagaaagcttcatccacagccttgcagcggctcctgcaaaaggaggtgaaatccctgcctcagcccaagggaccaggtttgcaggagcccccctagtggtatggggctgagccctcctgagggccggttctaaggctcagactgggcactggggcctcagcctgctttcctgcagcagtcgcccaagcagacagccctggcaaatgcctgactcagtgaccagtgcctgtgagcatggggccaggaaagtctggtaataaatgtgactcagcatcacccccctt

SEQ ID NO: 89312 - DNA, 396 bp, Homo Sapiens
ccattctgatgtcggagcggaaacagcacaggcagagtgaactatatatggacagcctcaagtgctgaggcaaagggcgttgccgaggacattccgtctgccccagagaaaagaggagggtaactgagaactttgcactgatttctcatgaccttttttcttttggaaaagtggcatgctccataatatgaaaaaatgtacatttgaaagactgagtgataagtgatatatcatatttattatatgttgtccaaaaagagtcacttatatacgttagtaaaaacatgatttttcttttcatgtcttttcgattcagtaaaataaatgcttagacaaaaatatagatttttttgtgattgaaaattacaaaaataaagtttatcttattttaacaaa

SEQ ID NO: 89313 - DNA, 717 bp, Homo Sapiens
ctacaggtatggtttcagcagggctcctgcagcagcccagggctgctggtgctcctgcaggcctgaatatacctggtgctgcttccagccgatggaacccccttccacaggccctgctgcctctgcttggactgctctctcccaggctttgcctgatgaactccaacctgaccccaaagctgggggaccgggggtgaaggaggcacctaacaagtgctgagcaccagccacatacaaaggacattacctttctcgggtattagctccagtatccacatggggatgccaagcaagtgacttgcctaaggtttacctgactgcagaaccctggctcagtctccagtggtgacacaactgctatcttgactatagctgaaaggaactttcccctatatttacattctgtaactttatcactcccttccaggatccctagagatcctaaagatcatggcttctgtaataagatgcaatattccaaacgacacttttcacagaataacccatcagttgtacagagtatcagagatggtccagtcctcaaaagcatctaagccagaggtttctcgctctgtcttgagaaactctagggctctgtggaggtgctacagggttttcacaagtgagaagaactgtatttattatttattattaaccatatactaacaattatatcaactatggatactattttaatattaaacatgtacaaaatgc

SEQ ID NO: 89314 - DNA, 360 bp, Homo Sapiens
tgcggccgcctcggcccagccctgaccccctggcagcgggcccggtccgttggctgctgcttagcacctctacagcacttttcgtcttcaaagccttctacggaccccgctaaagacccaaccttttttaccctctttgcaagcccgaaagaatgactgatcattgttcagacgattcgtttcccactcgcctgccctcattagccggtccttacaaggctctgggggcatgaggtccggattatccccattttacagaattgaaagagaggggagggaactgcctgtcacttaaagtcagagggcagaggagggtgactttaaaaagaagtggagtcaccaaagctgccttcggtctac

SEQ ID NO: 89315 - DNA, 480 bp, Homo Sapiens
tttcagaaatataaacaaagagcttgaattattttgaaataactgttggtagctggactgtgttctcttgaccgcaacattgctctgggactgaatcgcgtgggtctctgctcttcctaagtgttacataagaatagcgaacccatgaggtcagcttctaaaccagtttcttcccataacctcctggaccaagtcccaagcaaggcccagaggagctcaaggacccactctccccgggacactcctcactctctagttggaaggaggaaatgaatgtcccccagtaattgaaggctgctcatgtttgtgtagaaaagccaagcacaggcccatattctagagggttgcttgcggcaggcggaaggccatcgaaggcaaaacgaaacaaatgaaaaggcatcttttgaagctaatggaacagatcaggtggtcaaaaatggataaacaatggcatttggagcaaaactttcagcttcttcg

SEQ ID NO: 89316 - DNA, 557 bp, Homo Sapiens
acaaccattaaagccagttctgggaatggtccatatgcaccacgctcaaaagaaggattgtccctgaagatcatcaaagggggagctctgcgccaagaagaagtgtattatgacagctcactctggaccactcttttgatcagaaatccatgcaggaagatcctggaatttctctactcaacgagctataatatggacagattcataaacaagtaggaactccctgagggctgggcatgctgagggattttgggactgttctgtctcatgtttatctgagctcttatctatgaagacatcttcccagagtgtccccagagacatgcaagtcatgggtcacacctgacaaatggaaggagttcctctaacatttgcaaaatggaaatgtaataataatgaatgtcatgcaccgctgcagccagcagttgtaaaattgttagtaaacataggtataattaccagatagttatattaaatttatatcttatatataataatatgtgatgattaatacaatattaattataataaaggtcacataaactttataaattcac

SEQ ID NO: 89317 - DNA, 1178 bp, Homo Sapiens
  misc_feature (41)..(75): n is a, c, g, or t
  misc_feature (367)..(380): n is a, c, g, or t
aacgacgagcgcagcgagtcattgagcgaggaagcggccgnnnnnnnnnnnnnnnnnnnnnnnnnnnnnnnnnnncagtcgacggtaccggacatatgcccgggaattcggccattacggccgggtatcagtcatcgctcgaagacctgaccttcaatagcaagccgcacatcaatatgctgaccattctagccgaggagaacctgcccttcgccaaggagatcgtctctctcatcgaggcccaaaccgccaaggtttttatacaccccgcagcctcctattacttctaatactccctgattttagtgtcagcctcatcccaggtctcgcttccatcccaagggggacagtgttccttctctccaannnnnnnnnnnnnntccaactgttggtgggtgggaatagggatttggccccgagtggagcagccgcctgttaggagcccaacatggcgcctgaaaagcacatgatgcgaaagggaagagaggagaatccattccctgccagccaggcagctgctcactcccgtcagccccattttggggtgggggcggctagataaaaacttttattctcctattggagggtctaatttgtcccaaaataggggcaagtggggttgagggtggggtaagggtggggggaggagatcttatccaacctgtaggtggagaactggcccagagggtaacaagtacttgcagtttctctgaaaagttcagtccctcctcctcttccttttctctttttctcccttccctgatagcgaaggagtgtttttctttaccccttgacagaagtggtcctctgccaccttatatttccctgtagtcctcctcttctgtggattcatatgggagcgatatgtcatttaagtaaagttactgttcaacttagttacaatgagttttaatagcgtcccagtgctacattttatttttcaagcttgtactcacggtttagttttttctagttgttagtgattgcaattatcaggatgagcctccttttagcagagtgaacccctttttaaaggccactttaacaacaaccaccaatatattgtttagagacggtttctgtctagtgtaaaacttgagtggtctgactctaataaatggttttgaaatgtgtgactggtattcataaaatttgtgaataaaacatataaaatatga

SEQ ID NO: 89318 - DNA, 580 bp, Homo Sapiens
cagctgcagcggacttcgagggggggccgcggcgcaatgtcagagcagacgccggccgaggccggtgctgcgggggcccggaaggacgcctgtcgggattatcagtcatcgctcgaagacctgaccttcaatagcaagccgcacatccaatatgctgaccattctagccgaggagtgtttttctttaccccttgacagaagtggtcctctgccaccttatatttccctgtagtcctcctcttctgtggattcatatgggagcgatatgtcatttaagtaaagttactgttcaacttagttacaatgagttttaatagcgtcccagtgctacattttatttttcaagcttgtactcacggtttagttttttctagttgttagtgattgcaattatcaggatgagcctccttttagcagagtgaacccctttttaaaggccactttaacaacaaccaccaatatattgtttagagacggtttctgtctagtgtaaaacttgagtggtctgactctaataaatggttttgaaatgtgtgactggtattataaaatttgtgaataaaacatataaaatatgaaa

SEQ ID NO: 89319 - DNA, 531 bp, Homo Sapiens
gcaaagttaaagaagcaagtttattagaaatgactccattacagagttggacatcctcagaaaacaagagcaggaatgcattgtcttttgttagtgtctgtactctaactataaagagaaagagttataattaaacttggaaggtgcagatgtactcattaaagtcggggctattcgttttaacaatgaccattaacccgttgacctaagctagctcattaatattatcttttaagaaaaaatgctgcactcctaggacatttatacatttttcaggcttggtggaagtgtcttgtatggccataaatattctgcaattgtaatttgtggccagtaaaaaaatgtggctatttccagactataggtattaaccttctagatgccttgtgagtacctagctactcatattaagatagagaattctcgtcatgtttattaaactagaagcttgataaccatgagttcctctaacacaacaagtatactcctcaaggagaaaatgtatttctcaggaattttgtgcattttgtt

SEQ ID NO: 89320 - DNA, 392 bp, Homo Sapiens
aattgctaagaggaaatcaggagttaaagaccggcttaaaatgctgaatatttcatataaaacaaacctaaaatgattctgaaaggtggagagaaaaaagcagaccagctaaaagcctcagaacttaagtattgagtcacctgagacttttgcatttctgatgaccagatgacttcactcatgactgaactggtcctgtgttccccacccagaagcagactcagtcacaaaggaccattttccacactcctataattgcatccccaactaatcagcagcacccattgcctagccccctgcctgccaaactatttttttaaaaaccctagcctccaaattttgggagaggcagatttgagtagtaataaaactctggtcttccatttaacaaa

SEQ ID NO: 89321 - DNA, 1251 bp, Homo Sapiens
  misc_feature (80)..(114): n is a, c, g, or t
aaactgatacactcctatagggcctcgcgtttcacagccgaacgacgagcgcagcgagtctgtgagcgaggaagcggcgnnnnnnnnnnnnnnnnnnnnnnnnnnnnnnnnnnncagtcgacggtaccggacatatgcccgggaattcggccattacggccgggggctggggtgagcagcactgtaaagatgaagctggctaactggtactggctgagctcagctgttcttgccgcttacggtttttcggttgtggcaaacaatgaaacagaggaaattaaagatgaaagagcaaaggatgtctgcccagtgagactagaaagcagagggaaatgcgaagaggcaggggagtgcccctaccaggtaagcctgccccccttgactattcagctcccgaagcaattcagcaggatcgaggaggtgttcaaagaagtccaaaacctcaaggaaatcgtaaatagtctaaagaaatcttgccaagactgcaagctgcaggctgatgacaacggagacccaggcagaaacggactgttgttacccagtacaggagccccgggagaggttggtgataacagagttagagaattcagagagtgaggttaacaagctgtcctctgagctaaaattcatcttctgaccaagagtaaggaaatgattctgagaatagatcttgaaggactttaatggtgtcgaactatatgccttgtatgatcagttttatgtggctaatgagtttctcaaatatcgtttacacgttggtaactataatggcacagctggagatgcattacgtttcaacaaacattacaaccacgatctgaagtttttcaccactccagataaagacaatgatcgatatccttctgggaactgtgggctgtactacagttcaggctggtggtttgatgcatgtctttctgcaaacttaaatggcaaatattatcaccaaaaatacagaggtgtccgtaatgggattttctggggtacctggcctggtgtaagtgaggcacaccctggtggctacaagtcctccttcaaagaggctaagatgatgatcagacccaagcactttaagccataaatcactctgttcattcctccaggtattcgttatctaatagggcaattaattccttcagcactttagaatatgccttgtttcatatttttcatagctaaaaaatgatgtctgacggctaggttcttatgctacacagcatttgaaataaagctgaaaaacaatgcaaaaaa

SEQ ID NO: 89322 - DNA, 971 bp, Homo Sapiens
  misc_feature (524)..(524): n is a, c, g, or t
  misc_feature (922)..(930): n is a, c, g, or t
ccacaggctgctgggcaggaaagatattcctctttaatggcatgtaagttacctgtggaggatgtccaccctctgtctcaggcctttttcaaattaaaggcagtgaaacagaccttcaacctggaggaatacagcctctctcaggctaccttggagcaggtgttcttagaactctgtaaagagcaggcgctgggaaatgttgatgataaaattgatataacagttcgatggaaacttctcccacaggaagattcttaaaacgaagaacctcctaacattcaattttaagtcctactgcattattagtttccataattctacaagaatgtttccttttacttcagttaacaaaagaaaatattcaatagtttaaacatgcaacaatgattaaagttttcatttttaaaaattttaggatgaaggaaacaaggaaatatagggaaaagtagcagacaaaattaacaaactcagacatgttattcatccccaacatgggtctattttgtgcttaaaaataaatttanaatcacaaaatattaggtttgtttttggttatttatcaataaagttaacactgagcacattttacaaataaaaatgagtttttttgctaaaattcaaatatatcagctatttttaaacattagttactcagatctattttaatgtgacattgactataagaagatctgatgaaatggcacaacttacatttaatttatatgactttctgattacaaaataggggggaattttagtacctattggatttattgggaaaaagataacctaatctggaaaaaaagtccccaggttaaaaatttcctttacccacccaaattccaaggggattttttttggggcccttttcccaaggggggtaatccgaaaggggaagacccatttttcggggaaccttttnnnnnnnnnaggtttcccgaaaaattttcccccggggcccttaaaaaaca

SEQ ID NO: 89323 - DNA, 553 bp, Homo Sapiens
gggtacgatggcaggacttcacagagcagagccctaagcagatggcaaggccactgtaaggaagctcccggcagcatcccaggtctgctctccagagccacttcacagcactcagggatcgctggctcccggccctaggctgctgtccagtgaccaggtggacagggtcctccagtgactgcaggccaagggaaccccagccagcatgtgcaagctattaggaagatgtcccatcttgcccatatcaccccagtggctcttcaccttcagagtgaccacttcccagactctggaagtgggaagaccctctttgacgctttattacagtaatttgagctcctatcgacttggagcgaatgaatttctcttttgtggttaggtctccgaatgaacctccttacctggctcccctctggtctcctgtactgtcagtccccagctcccagtgttgttttctgatgccggctccctctctgtattgaacggcaatgggaacaagaatgactatcaaagcaaacaaatgcatggaattaaacaaaaagtgtacttcaca

SEQ ID NO: 89324 - DNA, 570 bp, Homo Sapiens
tgctgagaactggctggatcacactgtcagccaagaaaaggaaggacgaatgaggctgaagagactgcagggctgcagatgaaatatccagacctatgcatcctcatgtgggatgagtgggttccggcaaaatttaagaggctaatgatgggatggaggggttggcagcagcacagcatagcagaattttctgattcactaccactgctggtgttacagcgtgaacgtgacctgaagacaaaaaggcatgggtgaatccaactatgcaagttttctggatcagtcctaaacagctggctgagcagtgctggaaggagtcacacaaaagcggtgtattacactacaaatccatgttcattaacttcaagtggggccacaccacggttcagcaatcctgccacttttcacagatctaagtacaaagtggtttcaaactctccaccctgcaaccctctgacccacagtactcctgtttcagcaaatgattttgttttctccttccgaaggaaaaagcagcctccagatgtaactctttcatcttcctgctaccaaaaataaaaactaaccaac

SEQ ID NO: 89325 - DNA, 1309 bp, Homo Sapiens
  misc_feature (446)..(454): n is a, c, g, or t
  misc_feature (458)..(603): n is a, c, g, or t
  misc_feature (615)..(627): n is a, c, g, or t
  misc_feature (665)..(724): n is a, c, g, or t
  misc_feature (882)..(894): n is a, c, g, or t
ggggcttatgcggcggcgtggtgaaatagatatggcgaccgagggggatgtggagctggagttggagactgagaccagtggaccagagcggcctccggagaagccacggaaacatgacagcggtgcggcggacttggagcgggtcaccgactatgcagaggagaaggagatccagagttccaatctggagacggccatgtctgtgattggagacagaaggtcccgggagcagaaagccaaacaggagcgggagaaagaactggcaaaagtcactatcaagaaggaagatctggagctaataatgactgagatggagatatctcgagcagcagcagaacgcagtttgcgggaacacatgggcaacgtggtagaggcgcttattgccctaaccaactgatgcgtgctttctcaaatatacctactggattaatttatggcaataaaannnnnnnnngtcnnnnnnnnnnnnnnnnnnnnnnnnnnnnnnnnnnnnnnnnnnnnnnnnnnnnnnnnnnnnnnnnnnnnnnnnnnnnnnnnnnnnnnnnnnnnnnnnnnnnnnnnnnnnnnnnnnnnnnnnnnnnnnnnnnnnnnnnnnnnnnnnnnccctcgcggggnnnnnnnnnnnnntcaaaaatttataaaaccttccccgtgggggcccgggnnnnnnnnnnnnnnnnnnnnnnnnnnnnnnnnnnnnnnnnnnnnnnnnnnnnnnnnnnnnaacggggcggatcccccccaaataaaacacctcccggggggaaacaccggggcggtacgaaaaaaaactggcagcgcccacaacaaaagaaacccccccgggggcccccacccaggcggggcgatcacaaacactacccgaaagaagatggtatgctnnnnnnnnnnnnntcgggcctcctcgaaacaaaaaccagcggcgagaaatctcttttatataaaaactccggccccaccacgcccataccctcctaccacggggagggggggaacaccatgacaaaaaccactctcccccccaaaacagatgtgagccccctcaaaaaattaacttatttgccgccgcacgcccacaccccgggtacagaaacacatacccctcccccatcggcggcctaattgtcattacccaaggagagggagacaaccctcccccccaatatatggttaaacaagaaaaacctttatcctccacaaaacacttcgtcaacaaacaacccagcgggtggtttactaaccaacaaaacaccaatctctttctgtacccacacccgggagaaaaacacgctcccgaaacccccgcggg

SEQ ID NO: 89326 - DNA, 438 bp, Homo Sapiens
gtatcttgttcaccactcactcctacagtagccactttctcctagttctcgtggcgatttgttctacacatgtgcaacccagctctataccaaagatttatggagagcctccatgcagacagctgtctccctccatcacatcactcctttctctcttgcccacaaattccagtcacttcaactgtgttgaactctgctctgtcttctagcttgggaagaccaccattttctactggagctctacctcccagggtcaaagtctgaaaaatagtcctaggtagaaggatgaaataatttacataatgcatgtgcctgtgaagcacttagcatgatgtctgcacagagtaaatggccaataaatgttgatttttattatgaaatctgtatttgatacaaattttatctataatattttattaaagaaaaaagtcttataaa

SEQ ID NO: 89327 - DNA, 569 bp, Homo Sapiens
  misc_feature (242)..(252): n is a, c, g, or t
tagaatttctcccctctattcattataatattctttgtttttaaagccagtcaaatataatagtcttaataagatcagaaactctccaggagagtgagtctaccctcacgtccttgtaggatgatcttgattatagtcttattataggactataactgtattctcaacatttctccagaaaggaccttgtaaaaaggtcttttgtaccacagtattggttttttcccctctctcttcacttnnnnnnnnnnntagcaaggcagaaatagtgtattgaaaagttgttcatctattatgaagtccttgagtggtgaaaaatccgttgtacatgagaacatttctatgcatttaagccagaaacgaggtacatggctgtgtgctcttctgtcaaccaatgaaatgtgttttcacatgtgtggcagtgcaagtaaataacacattatttgactgaatcaggcatgatactgcaccaaagtgttggtacatattcacggtagtaaatcagtacccctgttaaaggatttatcccattgcttcatattaataaaatggttacaatatatcacaaa

SEQ ID NO: 89328 - DNA, 489 bp, Homo Sapiens
  misc_feature (50)..(50): n is a, c, g, or t
atatgtgttggatgaatgatcagagaaaagagagtgcagagagtggccanaacagatgctttcagcagtgtatctgccaataaacctaaaggcatgatttgccctggtgatccccccagaggtgcttagtctcttggctgaattccttctggaatccccagaatccccctccttggaagttttcccaggagtctgaggcaggcaggtctctcagtcacggccacatgacctcaagtgaaaacaaaccagtctggctgttcacagactcagctggtcagagctctggcccgaggggcccacgcaccacccgccactgcagaagacgcctccacgtctgtctctgggctgcctccaccttctgcaggcctcctggagcctctgctggctgcagaagtggggtgcatgctgcctggaggaggaacatctgtggtgggaccccaaatccatgtttgtgttaccatcgtgttccaataaaactatcgaaacaga

SEQ ID NO: 89329 - DNA, 514 bp, Homo Sapiens
cagcttcatctgtctccaaggttaacattctgaagctggagagtccttggagaaactctgctcagcttttttgtgacatttagaaaaatgcatttggtattctccaaaccagaatgatacattgtctcaaaatctgttagacagctgatgggtgtttttgagcaacgtcttaataattcagttgtttctgttttaattataccattaaaaatcagctttagctttttaattctagaatttaagcatcagtctgttcttataaaagttaggtttgaagtttataagaatataaaatcttaactcacatttgttgtttaatatttctgtcaaggaaaaaagcccccaaaaattgctatcactctataatcctaagtatttttcttttcaattttgtaagtaaaattatatgactatgttcatacttctctaattttttatataatatttttgttaattttactagtttgtgttttatgcctttagtcattaaaataaaaagcaaatgtgttaaaaa

SEQ ID NO: 89330 - DNA, 407 bp, Homo Sapiens
tttgatgaagtgaccaatttaatcccaaaattgaatgtcctagaaggaactcagagagttgcaggaccctggggactttaagcactagaaccaaggacgtgatcaccatcaagatccttttcttctcctcccaacccagctctctttctccactcctctcagtctctgtgtgctggcctcattttttccgacagtaggcttctacacaggggaaaccttggtcacaggcagctccagacttccattatgtcagcttagcatcctcttccccttccttccgtttgagagggagcggtgtcacttggtgagagggaggagacgggaggaaaaggaggtgagactcgacgtccagtgccctcttggcctggcttgctcggccttccctgcagcgaggcggggcgcacatg

SEQ ID NO: 89331 - DNA, 453 bp, Homo Sapiens
caaagaaaagattcaccattgcccgcctgaagaagccctcaggggaaggaacttagcagtgtgcaggtgagctgatgccgcaaacccgctaaccactgcatgtgctgttatgcctttcccaggctggacacctagctgggtgttcatcataactttccacagctttaatccacgccaagtttgtatataactgaaattcactcttgacaccctccacagtctttccaagttggactcttcctctcatcagtactagttgtcaaatttaaaatgtgacagttaaagaatattctagtttgacaattagtaagcaatgagtatatcatcagtacactagctttttattaatccatgtacactgtatagtatcttgcatctattttaataaattaattctttgctctagtaatagattttatataatgaaataaaggtgttgtccttgaactgaaa

SEQ ID NO: 89332 - DNA, 608 bp, Homo Sapiens
  misc_feature (307)..(339): n is a, c, g, or t
  misc_feature (429)..(444): n is a, c, g, or t
ttttaactagtggatgtgtttaatttatttatacaaatgtgttgggtacaagtataatttagttacatgcatagattgcatagtggtaaagtcagggcttttagggtatccatcactcgaataatgtacattataactattaagtaatctctcaccatacaccaccatcctaccttctcacccttttacgtcaggagtgctggccctcaatgaccaacacaaaatagataaattattttctgagacttagaattaaaaatcaacctaagagaaaagatgactcctaagccagtaaaacattggtttnnnnnnnnnnnnnnnnnnnnnnnnnnnnnnnnnctcgagaaacttacacagagtctttcctatgcacaaacccaaaagtaaagccaaatggctctatgcaataaacatcatggtaataacgtnnnnnnnnnnnnnnnngctttctcaaatgaacgtaaattcaaaaataaaatgaaggaactgtttctctagatgtacagaaatcaacaaaaagacacacaaagacacaggaaacacagaaaagcacggtttatgacactttcaaaggaacacaataatcctccagtattctaagaaaaaaa

SEQ ID NO: 89333 - DNA, 363 bp, Homo Sapiens
ttttatatgcagcatatttattggataagttatttcaaaggatagaatttttggagaaaaaaagtattacatggatcactggtagggaagagatcctacaaccctggcccctgtttggcattatgaagtgtctcctagataacagaataaatggagaggggatgctggctttgcttccactgcaaatcctcctgagagttagcctgatgactgagtttgctagcatagcgacaccttaaattgtgcaacttttctcagtccagtctctgccagtgggtccatcctcccctgccccacagtgagacacgaaaatgtcaaggacagtttcctttaaatcaatagaacaatactttttcctcgtgc

SEQ ID NO: 89334 - DNA, 467 bp, Homo Sapiens
  misc_feature (37)..(37): n is a, c, g, or t
agcaatgatgaagtctcacatttaaaattttcaagtncactcatcacatcccaagtcactcccttcattaccttttatttatactggagtcatcctgtgtgcctcagtcagaccattttgtatgtacaatgaccatctgaggcactgcctataaagtggaagatataattataatactacagacgtcattccagctttccagttgcttatggtccagcagagaggatgcacatgggaaaaataataactaatgacaaatgtgatgagtcttaacaaagaagaagagcatattgcaagggaatgtaattcactccagggacaatgagatttaacatgcagtttgcagatcctcccttctctgggtcacctgaaaataagccacaaacaaaggaatgaaattgttgatgaaaagggaagaggcaagactccatatgaagaatacaactgactcaccagtatgtaaaaaa

SEQ ID NO: 89335 - DNA, 491 bp, Homo Sapiens
ttttttttaagcatcagcataaagaactatcttcaccagcaccaatataaaacacacacacagaggcatgtacagacaggtgagtcagttgtattcttcatatggagtcttgcctcttcccttttcatcaacaatttcattcctttgtttgtggcttattttcaggtgacccaaagaagggaggatctgcaaactgcatgttaaatctcattgtcggtcattgtacatacaaaatggtctgactgaggcacacaggatgactccagtataaataaaaggtaatgaagggagtgacttgggatgtgatgagtgacttgaaaattttaaatgtgagacttcatcattgctggtatcatcattactgttaccatcactgtcatgacattcaggacgcaaagcggctgctgccagccccatgatagggggaattgggagaagtgtcagagtgttttgtgtgatttggaagaatttcttttataatggaaaatggt

SEQ ID NO: 89336 - DNA, 491 bp, Homo Sapiens
aaagctcaacttactacttctaggaagttttttattgctactgttatcaattcataccatcttacccttgtttttgcaaccctttgttaataacatatttatttaactatagttattagcagtctgagatcattttacttggttacataaggagcacatatatctacccagcatcattgtaaggcatgtgagacctttgtttgattgctgtcctaacctagtaccgagtcctaaaaactcattagtagaagatgaagtgtccttgccttttgctgaacatatatatacacactgaatatttagtggcaattcatagttgcatttggccattttttgtttataatttcccctttctcattaaaaaaactttgttttctagactttaggatttagagaagctcattttgttccatacacatgctgctgttggattatttaggtattttgtgactgtattttatctttgaaataaaaagcctttcaagaaatgc

SEQ ID NO: 89337 - DNA, 581 bp, Homo Sapiens
agcatcagtttatcccagtcagctgaaaatgttcctgccagtaaattcagtttacagaaaacactaagtatgccatctggtccctctggaaaaagatggagcaaagacagtgactgtgctgagaacatgtatattgacatgatgctctggagacatgctcggcgcctcttagaagatgtgaggttaaaggaccttggctgctttgcagcccagctgggctttgaactaattagttggctatgcaaggaacgtacccgagccgcccgggtagacaactttgtaatagccctgaagagactccacaaagatttcctgtggccacttccaatcatcccagcctcttctatcagttctcctttcaaaaatggaaaataccgaactggtaatgtagacttcatgtcacttgtacaaggagaattgtattttactccgtgtatttacacattttgctattagttgatattcaaggaattattttcattccaaacttaggaatggataaaagccaactttttgtacatgagttggaatgcccactgtttgaccaaagatgtaaataaagtagaacctatgtctctaaa

SEQ ID NO: 89338 - DNA, 369 bp, Homo Sapiens
ctcacaatcatggtagaaggcaaagaagtaagacacatcttatatggcagcaggcaagagagcttgtgagcttctgcaggggaactcccatttataaaaccaacagatcttgtgagacttattcactaccaggaaaacattatggggaaaactatctctgtgattcaattacctctaactggccccacccttgacacatggagattattacaattcaagaggagatttgggtggggacacagacaaaccatatcagccaccaaaaaggaatgtagcctgccaacatcttggtttcagtccagtggtatctgaattagatttctgacatacagaaatgtaaaataaaattttgtgttgctttaagcccct

SEQ ID NO: 89339 - DNA, 582 bp, Homo Sapiens
catcagatttgctgtggtatgggagaaaaggttatgtacttattattttagctctttctgtaatatttacattttttaccatatgtacatttgtacttttattttacacataagggaaaaaataagaccactttgagcagttgcctggaaggctgggcatttccatcatatagacctctgcccttcagagtagcctcaccattagtggcagcatcatgtaactgagtggactgtgcttgtcaacggatgtgtagcttttcagaaacttaattggggatgaatagaaaacctgtaagctttgatgttctggttacttctagtaaattcctgtcaaaatcaattcagaaattctaacttggagaatttaacattttactcttgtaaatcatagaagatgtatcataacagttcagaattttaaagtacattttcgatgcttttatgggtatttttgtagtttctttgtagagagataataaaaatcaaaatatttaatgaaaatggacttactgttacagcatagagattatactgtaccccttgtgtgttaaaaataagttctttattagtttgcaaaaaaaa

SEQ ID NO: 89340 - DNA, 534 bp, Homo Sapiens
  misc_feature (29)..(29): n is a, c, g, or t
ctatagggaatttggccctcgaggccagnaattcggcacgaggcggcacgagggcatggctgcaccacatcattttgacacagcatcttttccacagtggctcctgacttgataatgagccagttggatatgaaccctttttgacatccattggtatgcagatgccagctgtggagtctcccacaagtgaagagaaggacttgagtaggtcttacataatttcttcaaaagcagaagaaagatcacaggaattagcaggctgcatggtggtccaattgagaaaaaaatgtgactgcaccactcttctgtcaagagtctatgagtggctgcaatataaaaagaagaaaacgcacctcaaagactttaaaaagcaacagaaataatggtagggtcattgtgggggtcaacatggattcacgtcaatatttgttactttcctagtcaaatctatataactatttaattataattgtcatcagataatgactataaaataggaacattttcaaccacaaaataaaaattaagacaaaa

SEQ ID NO: 89341 - DNA, 595 bp, Homo Sapiens
tcagcatgtccaaggatgatatgtcttccacattactgacattcagaagtttacattataatgaccccaagggaaacagttcgggtaatgacaaagagtgttgcaatgacatgacagtctggagaaaagtttcagaagcaaacggatcgtgcaagtggagcaataacttcatccgcagctccacagaagtgatgcgcagggtccacagggcccccagctgcaagtttgtacagaatcctggcataagctgctgtgagagcctagaactggaaaatacagtgtgccagttcactacaggcaaacaattccccaggtgccaataccatagtgttacctcattagagaagatattgacagtgctgacaggtcattctctgatgagctggttagtttgtggctctaagttgtaaatcccacagagctttaggactagggtcttactaaagaaggacctcttcttgttcattcttgtttaaacctttccttaatatctactctttagcactatagtgaactcctgattatttattctaactggaggagtgaaaaatccaaaattgtggataattcaattaaaagttatgactgataaaaa

SEQ ID NO: 89342 - DNA, 355 bp, Homo Sapiens
  misc_feature (94)..(102): n is a, c, g, or t
cctttctccctttaagagcacattggtaagagtgtaaatcccagttctaccacttagtaggtttatttcatttgtaacctctatctcatttgtnnnnnnnnngaatcatagtactctcttctcaataaaactgttctaaggaaataattaatactaataaagcactgagaacaatgcctagcacatagaaaatgcccaaaaaaggttattattgttatccaaaccctatcctgcctcaccctacagactacttgtacttttataagtatttattctacagatttattgagtccttatgactaggagatgaagatacaaatatccattaaaaaatgtaccgcattatctagccaaa

SEQ ID NO: 89343 - DNA, 422 bp, Homo Sapiens
agtctctctccgtttggagtgagatgtgggaggggcatctcattgagaagcgcgagaagggagaagggccctcaagtccccacgtggccttggcaagtcactctgcttgctaaacgatgttgacctcgcctggaaaatgggaggacccactcctaggagagtatgggtctcaaggcatttttacaagcacagcctgagtggggatggggctccagcctcagtcccctagtccatcacgctcccaaatccctctcccgacagctctcagggctgaaggcctgtgttgcctcctccccctctcatcagcacagctgagggtctcaccctcctcacatcccttcaaaacataagccaaaacaaaaaaccgccaagggtgctgcttataacaaggttttaataaaataaaaagttcaagtgctaaa

SEQ ID NO: 89344 - DNA, 869 bp, Homo Sapiens
aggaactgtcatagttactgggataacaaccattatacatccagggaggctgttctcagaatctttcataattaaatctctaaagctgggaaaacaatctcctatcactttctttgtcatcataccacttccttttaatttccaagcctcatttgcacttcttcccacagtgtctctctgagcgacagcaaatctctgcgttggccaggaataacagtgcaaagcagtgtgggtggcagggccctaacacccaagcctgagcctccatttcccgccattgttccctcagtcaggctggggctgtcctggggagagtttttccagataaaactgtcctggttggctgccagtgattcagacaggttcacagcctcaaacctcctgatgggtaagcagtgattcagactccaatcctgcttcatctctcaggcttatcgcttatctccagctgccaggagacagacgatgggggcagagaggcattttggctgagccaggcctcaggtagccccaagggatttgagaggcctccagacaagcagactcaggcactctcaccaggtcactctctatttaaaaaacaccaagtctatgagttcccttgagaatatagcatttcctgcgacctatgacagcaaaaatggacatttctatatctgttgattcattccttcttcagagctgctgtttcaagtaacccaggactttgggtgaaagtatttagggcagtcgggactccaaaggaccttgcaaaaggtgaattcttgtcccgccccttcccaacttcatttgactttaaaagtaaccctaatactctcatagtaaaactggcgaaatctaaataaactctggattgtaccaatgtcaaa

SEQ ID NO: 89345 - DNA, 522 bp, Homo Sapiens
aacactactcatctttgaatctccacagcccaggtcccaggcctgtgaatgaatgagccttcagatgattctagcctccagctgccaagctactcctaagcttcaagtcttcctgaaaccagtaaaggacagccactgcatttttgtctaaattcctgacccccagaatctctccttccaacaataagtggagtccatcgtccaccccttaaatctaggccaagaatgagacagaagtgaaggtgtgcctgttctgagcctaggcctgaagaggccttgtgcacttctgctcttgcctcctccttgagcttgggctaggctgatggagaattattgacctacacatgcttatcgctaattagtcatgtgaaagagatctgcctggattatcagaggtacctacttaatctgcagctgaccacaggtgtatgactgagtgagcccatctaagaccccacacacccaaaacactcagatgacttacagattcatgcaaaataataaatgcaaattgttttaaaa

SEQ ID NO: 89346 - DNA, 513 bp, Homo Sapiens
tactcagtcaatgaggaactggggaagggacctgcgcactagggaataaattgcttgttgaaatctgctgggggtggctgcatgcagccagacaccagttcttgcaagactgtcattgaaaatctccgttttgctgttctccgggtctctgcgtccagtctttgtgtttggacggacctgccgggccatctttctgcaagaagataaaggaagaccaggagtgcctgccgaactcctatggaggaagtctaggagaggaaggggacagggaggaagatggtgtctgcaaaccaggaagcagccttgccagacacaggattggccacaaccttgaccccagacttccagcctccaaaacttgtaaaaaataaaggtcaatattgactaagggcacaagggaatggggaaactggtttccagacctgcctcctgggaaagttgggagggggcattttcaacctgttaatttctcaaattatgtagtcattcaaaaagaaatagaaacacttcatt

SEQ ID NO: 89347 - DNA, 534 bp, Homo Sapiens
tgtcccgctggaacccatggtccactgaagttccttatgctactttcactgagcatcctatgaaatacaccagtgagaaattccttgaaatttgcaagttgtctgggttcatgtctaagcttgttccagctatccagaatgcccacaagaattcaactggatctggaagaggaaagaaactgatggtgttaactgaacccattttgattgagacctacacagggctgatgtcattcattggaaaccgcaacaaacttggctattcccttgcccgtgggagtattggtttttgagagtctttttggtaccataagcatatcatccacagatacgtcactttgaaaattccagtttgacccacgctatttttggactgaaacaattaattatttttaaatgacgctttatgatttagaaatttagtatttccgaaaatttaaaagcttgattggactgatagatacacactttagacctcatacaagaataatcaaattttcttaaaactagaaaataaatgctgctgagcctatc

SEQ ID NO: 89348 - DNA, 517 bp, Homo Sapiens
gagtgagagcagctttgcccaagtcttagtttctgaaaccgtgatcttagactcatcatttaactagccgtttaaatgtccacttgttaaactgtaaaatggggtttctgacctacccaccttacaggctcattctaaagaatttgtctttaaataaaaataccatgaactgtattcagaacagctgaagcttattttaaatgtattagacgtgtccttctatagacattaaagtggttttggcttctgtttgatttttttaaaaatgtaccataatagccgttcactgcttttttacactaaaagagggaggcggacccatctgtggatcccacagcaaacaagattttctgcaaaagaaggttccagtaagtgaacaaaaaaccagggggtccggctgagccgatcattcagggcgtgcatgagccgcggatgtgtacgtggcggtggaggagcccctgttgaggggcagagcaagtcgggtgacggactaggcgaacgtgtgtctggcggccgc

SEQ ID NO: 89349 - DNA, 937 bp, Homo Sapiens
  misc_feature (95)..(121): n is a, c, g, or t
tttttggtggtttttgctttgaggaggtaagtatgaaaagtctgtagatctatttatacacagtgggagtatctacctgagacaagaaaaactgnnnnnnnnnnnnnnnnnnnnnnnnnnntaccctttcttcaactaaagaaaggattcaggctgtaattttagcaaagtgtcttaacccaagcaacgtaactgaaaagacctagtatagtgttcaaggtgcaaatcgaatcaaatgagtgtccggcaaataaatacaacagaatctatggatctagagtcagaaaattttctaaaatgtagataatatactcacaacttctttgttatctgtactgccttctactctaagagggatgctaagctcttaattatctcttcccggatttttgtgaaagcttaggaaatttaactagattgaggagggaagaaaggagtggggagagataaggtacctttaaaaagaaatcaaggaaaaagggagagatttctccagacctatgtatgtctacagccaagatggcggattccttgactggtgaagacaggctgctgggcaccttggtcaggggtggaggaacaaaggatggcaccagaacacaagcagggagacaactccgggagtccacagaggcagccaagactgctgatgttcaggaaccaatactcaaaaggtactccagaatactgtgaaacagccccttgcttcctctttctgtcatgtgagaacacagcaagaaggctgtcatccaccagccaggaagagagccttcactaaggaaccaaatcgtccagcatcttgatcttgaacttcccagccagtccggatcagctgctgttcgcgagctgccggccacgcaccagccccggaggcgctcccggggcacagccggcggcgactacgcctcctcaggcccccggcgccgccgacgcgcac

SEQ ID NO: 89350 - DNA, 567 bp, Homo Sapiens
tttaattctgccttagctcccgtctttgaagtattttatatttgctaagtataaattcttaagatattctacttgaaatagctgaagaatcccctctctgggacaggtgcagattaaaagagcgccactccatgattttcataaaggagaaaatacggaaggcagcccctgtgggcagccccgggcctacatgagttgatagagttgaaggtataaatgtagagtattaagttcccagtgaccggaatgacctggtgaacaaagaggacaactttgccagttttcccctctattcagcacattttgtttctcaggtaaacatggcttgaagcacgagtgagatgaagcctcaatgttggtgtctacgtggaggcttcccggatagccaggatgttcatagcccggatgttcatagcccttcagaacagatggaaatactgcatttatcttcatctgtaccgaaaaggtacagatagaatgataataacctgaacaaggctcccctttcaatccaattattcagacgcttaggaccagaaactgcgaaacataaaaactgcaacccgg

SEQ ID NO: 89351 - DNA, 655 bp, Homo Sapiens
tgttagtgactctttagtgaaccaatgaatgaatacatttgagtgaagatggctaaccccaggctctccaattgggttaggactttcttaagggcatgaccaaccacttcaatccctaccacgatacttgcttgtcagaaattgagtgttaatgaatgtttgttgagtgaccaaacgactgaattgatgagtggagatggttgatctctgaatctcctctgaattatgagtttcttgagggcagggtatgagtctaattaatcctcatgtctacagtgcctcccatgtttgccacatggggtctgcaagcttgttctgtccggctgcatttcctcttatatactacagaggccaataagattccgtggaacacacatggcaaataccaacattttcagtgagttgaaccaccagatagactgaagactgcaggtctcaccataaccatgaacactctggaccacaagggggcaggaaccaacctgtcaagtcccggggcttacatagcaggagtgttctcaggaggaaaggagcaaggcaggtcattaaggataaccagccaggcacagcctcacctgcccttaaatgtcagccagtaggaagaggaaaccggcatgggtccttcttttaaaaatgcacattaaaaatgaaaaaa

SEQ ID NO: 89352 - DNA, 407 bp, Homo Sapiens
aagttggagtactgactcatagagataaaattctttgaaagaaatgtactgttttaagatactgtaaaatgtggaggcagggcaaacgtttataagggctgttatgtatgaaatgtgcctctgacccaaatccacggactttgcgaaaatcaccaaggagactttgcattaagttcagagtacaatacaaactgggcctagctctgtatttagtcagtatgtgcacgtgggaaactttagtaaaatatcacctccttattgagacaagtttggacatctggccttaagcctctgttgaacaggagaagtgaagctgtttgcaattatataattttctaatttgaaatcatgacaagcagtcttagaacaaagttaaaattaaaaagtctttatccaagtccccaatg

SEQ ID NO: 89353 - DNA, 496 bp, Homo Sapiens
agtcaaacagtcttaaaagcaagctatcctgttgcaaaatagaaattagttgataacgtcttccaggagacctacggccatcctactgatatgaaccagatcatacctgccctgatgggatgccagagaaagactgctgcaagtagggatcctctggaaacagaacagagggaagaagataccttccctgaagcccagatgttccagaagcctgcgcctcattcacaaagtcaccccaaaaatgccctagagtttggagttttgaagaagcgggaagaaggcctgagtaagggcctgggaaccaagttagatcctacttcagcatcagcacatgccagcgatggtgcacacaggtggagagcggcctgcccgtcttttccatggtgcccacagacccatttaggatgaaagatcagaaaattctctccatgtcaccgcttctgaaacatgtgaatattaatatttggtgactaaaaggccatggcaaattttaaaa

SEQ ID NO: 89354 - DNA, 988 bp, Homo Sapiens
tgggccatgaccagatataattggtgattacaactttcctctataaattaactcttgacactccttgggatttgaagaaaaaaatgcctggtgtcatacctagtgaaagtaatggactttcaagaggtagcccttcaaagaaaaacagactttccttaaagttttttcagaaaaaggaaactaagagagctttggatttcacagattctcaagaaaatgaagaaaaagcttctgaaaatagagcatctgaaattgatcaagttgttcctgcagcacagtcttcacctataaactgtgagaagagagaaaacttgttaccatttgtgggactgaataatctcggcaatacttgctatcttaatagtatacttcaggtattatatttttgtcccggttttaaatctggagtaaagcacttatttaatattatttcaaggaagaaagaagctctaaaggatgaagccaatcaaaaagacaagggaaattgcaaagaagattctttggcaagttatgaattgatatgcagtttacagtccttaatcatttcggttgaacagctccaggctagttttctcttaaatccagagaaatatactgatgaacttgccactcagccaaggcgactgcttaacacactgagggaactcaaccctatgtatgaaggatatctacagcatgatgcacaggaagtattacaatgtattttgggaaacattcaagaaacatgccaactcctaaaaaaagaagaagtaaaaaatgtggcagaattacctactaaggtagaagaaatacctcatccgaaagaggaaatgaatggtattaacagcatagagatggacagtatgaggcattctgaagactttaaagagaaactcccaaaaggaaatgggaaaagaaaaagtgacactgaatttggtaacatgaagaaaaaagttaaattatccaaggaacaccagtcattggaagagaaccagagacaaactagatc

SEQ ID NO: 89355 - DNA, 551 bp, Homo Sapiens
ttttgcttaaatgacagaaatttatttctcacagtcctgggggctgggaattccaatatcaaagtgccagcaaatccattttctggcgagggcactcttcctggtttgtagacggctgtcttgctgttgcattcagatgctatgttccatgggggtggatattagaggccaagtttaggaaaatcagggttccaagtggtttgaggccatagccattctccttttctcttttcataatcagttccaccgaaggagaagctcgaattcggtgaggcttcaatgggctactgctggtaccttagctccagttttgggcaactccttcagggtcctgagtcttctccgaggcccaatgttgggcaccagattattgtcggtgaaaagagtcaaacccttgatcagtgtgcctgtcctttacgcaggtgtaatacaaagcagttacttgtcttatttctgagatctcaacatcagagtcctacaggaaatgatggcgtatttaaaatgaataatttttagaattcaaagaaagagcggttactgggggattccgg

SEQ ID NO: 89356 - DNA, 347 bp, Homo Sapiens
gagggggtattccccctctatcctggagaataaagttgctgtgaaacctcttatggctgcaaggaattcagttacagagtttatgactcccagaggcaagatgtttggaggcagcctgggaggaggctcacaggacttctgccagaagaggagtatttacagtgaacctgcctgggatcaggaaacagagactacagaaaaagccaccggcccagccccatagcccagggcagaagtgccaggattcaagttcagatctgcctccctccaatgcccctgttgtttccacctcatcatgctgactctgtgaaggctgacactgcagaaataaaagtaacaaggtgaaa

SEQ ID NO: 89357 - DNA, 733 bp, Homo Sapiens
aatcttaacatggtattctctcctactctctcaccctcccccccaaaaaaggccacaaagtgctttcacgaagcgtcattcttttagataaagccattgcacaaaatgtacagttcaggtatactgaaatgagtaccacaccggcgtccaattgcggcagtttttatacaccagtatggcataggcgaagtcttttaacagaattacagcaaacacctttataagggccatacaaataacacatttaaagtattaaaaggtacagctgactcaatagcagaatttaaaagctacatcctattagcacatttaacccaaatgaacttgaatctttctatgatttaccacgcaggaaactaggacagaataaatttcttgtcaaaagcagtttgttcatttacacaaaactataagtcaattaatgtcactacctgctaaagcagacagcaagggggcccttgtctataatatttatactgtcccaaatattgtcaccttaaaatggcaaaactttaaattactattttctttacaaaataaatgtaatctattatatatagacctggaaaaaactcaaaagttcaaattcttaatgtgaaagcaagtaggtaaagattcaaaagtgaaaaaatcttttacactttatgtaaatgatacttaagtatgacaaagaggtgataattcaagttcgtaactagtaagtcactaaaaagataaatgcaaacattcatgt

SEQ ID NO: 89358 - DNA, 561 bp, Homo Sapiens
caactaatcatcgtgtacactgccgaatgacagtgtttgcagaacctctagcatgcatgctggcctcggctatctctgccaatactttacttacacaagccagagtcaccttcatcggaagacttgagaacttggcttctctatcccacgaatgttatgcagtcatcttcccagcatcctgcaggacagacctgcttatgccatttgcagtacaaacaaagtactatctatctgaaattgagcagcaagtactttaacttcacgtacctctccttctgaaaatgccatcaggatagctcagcccataccaagcttctggtacttctctagtaccccaaagcaagtaattcatgccctaaggcattagcatccttgaagggaatgttgccaagacaaggccacttctgcagagcagataccttccccagaggggaggcgtccaaagtcttgcctcaaacgtaggaatgttcaggaagcagtcatggacagcgagatcatcaagtcccttaggaataagtaaactcaaataaaataaaaataaagtgattttccctttttatc

SEQ ID NO: 89359 - DNA, 653 bp, Homo Sapiens
ctcatactcttcatctacaaaatgggaatagtatcacttatcctttcaggtttattgtgcaggtgagatacaaaacatctagctcaatgcctaatatagattaagcacacaataattggtagtttcttttaatagtaataaagtacatgtctttgaatatcattcttttttctctgctgcctaccaacaagtccaaaatcttggtatttagtactctctacaccctaacccaaaacattttctaaaatttgtctctagctatgacctgtcacataacatgccctccaccaatgtgggtcacttcattttctacttgtacatctatgattcttctcctccaggcttttgttcaaagtccttttcatctctagttactctgctcatgtttgaaagtcaaattcaagtgccactttctccagaaaactgcttagtaatttctcctttatcttctattttgttagtattaacatttattctgcttttaattgtagccagtttgtgtattgggttttttatatagtggctttctccctagattataaattccttaagagcacagcttgcctctcatttacctttcaaacccctgagagactgaaaatgtgctttgtacccaatgagcatgcaataaatgttccatgaataaacacaag

SEQ ID NO: 89360 - DNA, 923 bp, Homo Sapiens
  misc_feature (635)..(691): n is a, c, g, or t
aggcaccgcaccggggacgcccctccctctgtgcccacccccctgtcccccgagctgaccagcgtcatggctgctacgtgtgcgggaagagctttgcctggcgctccacactggtggagcacgtctacagtcacactggcgagaagcccttccactgcactgactgcggcaagggcttcggccacgcttcctccctgagcaaacaccgggccatccatcgtggggagcggccccaccgctgtctggagtgtggccgggccttcacgcagcgctcggcgctgacttcgcacctgcgcgtccacaccggcgagaaaccctatggctgcgccgactgtggccgccgcttcagccagagctctgccctctaccagcaccggcgcgtgcacagcggcgagacccccttcccctgcccggactgtggccgcgccttcgcctacccctcggacctgcggcgccacgtgcgcacccacaccggcgagaagccctacccgtgcccggactgcgggcgctgcttccgccagagctcggagatggcagcccacaggcgcacccacagcggcggagaaaccctacccctgcccgcagtgcggccgccgcctttggccagaaatccagccgtggcccaaacaccaagnnnnnnnnnnnnnnnnnnnnnnnnnnnnnnnnnnnnnnnnnnnnnnnnnnnnnnnnnggcggtctggccttgtgaacccctgaaccccctgggcccacgggaagaaaccggggaaccccgcccggtggggcctttccaagcctgataacccccggagaaaaatttcccaggaaatggggggggtggaacgggccccttaaaaaagggggaccttatcttaaaaacacttttaccggggaaaggcccccccaaaaaagggggcttccacgggggcccctcgaaacccctc

SEQ ID NO: 89361 - DNA, 420 bp, Homo Sapiens
aacttgctactgactggacttctctcatcttttagcatgtgaagttttgcaaatataatccactttgctctgaatgtcctgacacctgcttcagagctcaagattcagactccagcctgaatgttatttcctgagaaaatccctccttgacccactgtgctggttaggtccacctgctaatcacatccacaaaaccctctgcttctccttcaaaacactcatctcctctgtaatgatcagatgaactcatgtctttctcagaggacaataaatttgatgaatggggaccatggaagtttatttccatctgtatccctacatctaactcatctgctggtacctatttgtcatgtatttaataagtacaactacctatgccaccctgcaataaaatgatattgttactttctaaactataaa

SEQ ID NO: 89362 - DNA, 975 bp, Homo Sapiens
  misc_feature (740)..(778): n is a, c, g, or t
  misc_feature (785)..(785): n is a, c, g, or t
  misc_feature (846)..(886): n is a, c, g, or t
taggtagcgaggcctgggtggcgtattcggcacgaggcactgctacaggactctactatggagatgtcatctgggtgattctcagtgtggaggtgggtggacttttaggagtaacgcagcagctgtcatcttttgaaacggagttcaacacacagccgcatcgtaaggtagaaggaaacttcaacccttttgcctctccccaaaagaaccgacaatcagatgaaaacaacttaaaagaccctgggggctccgagttcgactcgatcagcaaaaacacatggggctcctggctcctgacacatgggctcctgctccctgaccaaactgagcaagaccagaatagactgtcacagaactctgtaaatctgtctcccagcagtcacgcaaacaacttatcagtagtgacttacagtaaggggctccatgggccttaccccttcggccagtcttaaacgggtgtcagcaagaagaaaaattaacaaaagacagaaggcctgactttggggggttagggcaaggggttcctctggattgcagaccacatcgcacagacccctggctctgaccccctctcatcccggaagaagaggaagaagcagaacagactagttttgagtaaactcagtatgcatgtgtgaatgctgaatcacaggaatggtgttgaggctaccaagaagaaatccatgcagccactttgggttttgttataggcatcagtctaacaagtcattaggtcactnnnnnnnnnnnnnnnnnnnnnnnnnnnnnnnnnnnnnnngccatcntttttaacaaaaattatttttgcctacagaaaaggttggtagttttgagccccatggtaannnnnnnnnnnnnnnnnnnnnnnnnnnnnnnnnnnnnnnnnaaaataagggggataaacaataatttcctttttaataagaaataagcgggccttgtggttcctggggaaaaaagaaattctcacgggga

SEQ ID NO: 89363 - DNA, 609 bp, Homo Sapiens
atcatcccatgtatagaagtacttgcttagaaatcatggtgaattagtacgtaggctatgctgagaataataattggaaactgaaaaacaaagattgactatagtaattaaatggaaactttaaaaaccatcatttaaaatgtaaatctcttctccaataagtgtattcggtcctttgaaagaaactcctttgcaatcactctctgaaaaatatagattgtaaagaatcctggctgtgagaaaggaagctgaaaagggtttgtttttccctctgacactttccagcagagacatctcagaattgcctaagtgtgaatatctaaaattacaaactagtgttctctagaaatcttaggatacatgtgtgatgataaagagagctacagctgtactcattaccagtgaaataactcatgaaaaagttttgggccaactttcgatagcatgttgaaagccactgcgttttctttgtctctacttgcttattgttcatttttgcttcattacctatggtggcttctctgtatcccatagtgagagtagggcctggacaaggtttgtaatcctatcacacttccaaaattattgaataaaataatagatgcattc

SEQ ID NO: 89364 - DNA, 490 bp, Homo Sapiens
ctgtggggctggagtctcacctgttgcatggagaaatgggctggccccacagcctcacaggagcagtttggggctggtttcccgggaatccagaccctaacccgtgagaatctggattttggcttgtgagccctgcttatttggagccgggtctagagggaaccctctatcagcctcaggaaaacaagacctctgtgcacctcacttttggctcactgcagcccttgtccttcacctccacacaggaccagctggaagcagaaagaagaaaggccaatttcacagggcaccaaacaagtatgaaatgtaaatcagaaatgcagacaccccagacgagagcctcacaggagggagggggccccacaggctccccaggaggctcgtgtctttggcccagagccagccttagtttgtccctgccatctactgtctgaggccatcgctgctacactttgtttttatttgtatttcatactgaagtttcaaaaaa

SEQ ID NO: 89365 - DNA, 518 bp, Homo Sapiens
  misc_feature (32)..(32): n is a, c, g, or t
gacctaccaaaccagaatcagcattttagcanaatccacaagtggctcgtgctcgcattcaggtttgagaagcacttctctagagcacccgggagcttctcttacctttaactggggcttccactggtctggtcttcccaagacacccccggccactggtggccctgtaaacatggtgccaccatggatgagttgatgcctgagtatcgatgggggcaagccagagcgtccttcctaaacgctatcgaagtctctgacataggtacagcctgggggtgatggtgggtgagctgctgcttaagggccacagccccgaccctggagggagcaggaaaaaaatgaagcctaccagattcactctgggaccactatcccacccccaacttcagcctttcaagatctttttattaatacccacaattactctgatgtgattacattacacattgcatgtctgtttcaaaacatcacatggaccctataaatatatacactattacgcacccataataatgaaa

SEQ ID NO: 89366 - DNA, 781 bp, Homo Sapiens
  misc_feature (480)..(491): n is a, c, g, or t
accatcacctccattagccactttaatggacagctgccatcctgggcagcttttgagtgctaagaactggaaatctacccaaagcagtcaatttgctgccatgggaggcagtggagcagggggaggggaggagggtgaaagggggaagatggatacagagctgcagggaatatagagctggtcagggtagccacctggagattattttgaaacatctgattcctgcaatgcatgatgacacatgcccataatcacttagcacctactcagcttttttctttcttcaggcatcttattttaccagatacatgatgccaagcattcatttggtgagacagggttattcaactgggaagccaaagcactgggatagtattaggcagatccccaaatgtctttctatgagcaagcatccctaatatgcagtttgggagagacatttattgttccagtggcctaaatagattggttatttattgnnnnnnnnnnnnctttttaagacctgttgaggttatagtttacaccagatctggtgctcataatcaatcctgttactctataattccagaatgaaggagaaatgctgagccttgcccttgcatttcctaccactatcccaaggctgtaactgtaacattcacatagaattttaagcaatacctgcttatatctcaaacattttaaatcttccaagttgattcaagcagcaagaaatagaaataataaataattgattctccatgagagtggtagaccaggtatgcccaagcacctaaaaaaa

SEQ ID NO: 89367 - DNA, 955 bp, Homo Sapiens
  misc_feature (440)..(728): n is a, c, g, or t
agctaattatgatgtcttggcaaatgaaatttgaaatcttctagaaagtagactcccatagactcaaagctgaattgagatcagggtttcttttccaggttgcattttaatatacgtatgaaatgaaatatttggttaggatttttaaatggcatattctgtaagcttattttgttctttacccgacctgccaatttacataaccatctgttaaaattacctgtttattcttacacagttttgtggtagctccgatcgcttctgtataattataatttcttactaagctaagttgtatacaaccccactgtattattttctttagattctgatttcaggatctgtgctttgattccttgtctgttttatcgtatatttgcttgctttttaattaaagcacatcagttttaaagtgttaactatatgttaacaatatggannnnnnnnnnnnnnnnnnnnnnnnnnnnnnnnnnnnnnnnnnnnnnnnnnnnnnnnnnnnnnnnnnnnnnnnnnnnnnnnnnnnnnnnnnnnnnnnnnnnnnnnnnnnnnnnnnnnnnnnnnnnnnnnnnnnnnnnnnnnnnnnnnnnnnnnnnnnnnnnnnnnnnnnnnnnnnnnnnnnnnnnnnnnnnnnnnnnnnnnnnnnnnnnnnnnnnnnnnnnnnnnnnnnnnnnnnnnnnnnnnnnnnnnnnnnnnnnnnnnnnnnnnnnnnnnnnnnnnnnnnnnnnnnnggaattccctcttggcagatattgaagtttatttgaaaatttaattcgtcccttttttcattgtaatatttcatggtttactattttccttttagtattcatgaaaatcgtattttcctgggttgaataaagggtgctcctaagttttatggtaaaatgaatttccaaaaatgtggaaagggtgggttttggccctggccagtcccatgggaaaaattccccctgga

SEQ ID NO: 89368 - DNA, 449 bp, Homo Sapiens
agatgtggcccacaatcccagaccccggaggattgcccagtgaggccggaacaccagcaggatggcagaggacacctccccaaacatgaatgacaacatcctgttgcctgtccgcaacaatgaccaagccctaggcctgactcagtgcatgctgggatgtgtgtatgcaagctgctgtgccagaagctcatggagaagacaggcattctgctcctctgtgctttcggtgtgtcccagggccctgcccagtcccaggtggaggtatccctgggccctggcactgattataggacactgggcaagacactgcaccgccacgtgactcagtttccccatctgcctgatgggtgttgctgtgagaattatgaaatgaaatgatgaccatgaaaatattgtagaagccaagaaatgcttcagaagttataaagctctccaaaaaccgtgttaaa

SEQ ID NO: 89369 - DNA, 409 bp, Homo Sapiens
tttaacacggtttggggagagctttataacttctgaagcatttcttggcttctacaatattttcatggtcatcatttcatttcataattctcacagcaacacccatcaggcagatggggaaactgagtcacgtggcagtgcagtgtcttgcccagtgtcctataatcagtgccagggcccagggatacctccacctgggactgggcagggccatgggacacaccgaaagcacagaggagcagaatgcctgtcttctccatgagcttctggcacagcagcttgcatctgcacgtgttaaacagaacctgctgggcctgagttctcagggagcaggcaaaacaggtgaaccaggacacacatcccagcatgcactgagtcaggcctaaggcttggtcattgttgcggacag

SEQ ID NO: 89370 - DNA, 563 bp, Homo Sapiens
gttgtctcctttaagctttcctgggtctaacctacataggtaatttaagaacatcctcagaaaggacagctgaaggcaataggaggcagattatctctttagggcgtcctcaagtttttttggtctgttctcccacttgattgacctcaccagttgagacacctagtgtatggctcatgcccagccttccacctgggattctccagcctccacccagcagccctggattgctttctccaattaaggcctttccatcagctctctgctttttcaaagcgaaaaaactaatggattagtgggttatcttttccaaggaacaggtttgcacttcttggaaaaagtgcctaaagtgtgcccattaatatgaggatagatttaggctcataagccttttggtaacactgaaagtagtatcatataggcaagctctccttataagtaaggctttcaatttttaaaacagacatcctgctttaacaatttgtaagatgactgtgcagtaataaaagtcctttgtatttctccaccgtgttttcattaaagaaaaatggagcttgtgggcc

SEQ ID NO: 89371 - DNA, 440 bp, Homo Sapiens
tgatgagtcccagtacccagcacagagcacagtacactctgtctaaaccactaaggccacatgttggacggaggcactttcctgctggaatccgataaatcaccacacccaaatatagaaagaaaaagggacacagatcatccacaccgtggccgaatgtgtgacatctttgctgaactctctccgttccaccttgtggtggaggcctccagtccaccagacacagccctaggcgtgtgaaccctgccacaaacatcggtgctcttcctgcacagggcctgggaccaaccgtggccaggacatcagctgctggaagccgagagagttcatctgagtggcgattttatgatctgcagagtggaaagtaatcataatcccttgagaagtttgcagaatcgaaccgaatgttgaatgccaaagatcttcacaaagcaaaaaaa

SEQ ID NO: 89372 - DNA, 320 bp, Homo Sapiens
tttgcttatgctctgctttttttggttcagcataacttggaacatttgaaagcttttcaacctaaatgtggggaaaaaacaggtaaggcattatttttgcacaaaactagcattcctaatagtgcaaatgaatctgatacctcttaaaatggtgagaggtcatacacttactagattaatttagattttctttctatggcttgacaaattatccctctataaattctactctcacccagagctgttgctgtaatcaaaagataactgtagataaagtccaaccttctcctgtatccagcaaaaggtttttgctcatatgc

SEQ ID NO: 89373 - DNA, 760 bp, Homo Sapiens
  misc_feature (448)..(448): n is a, c, g, or t
gaattagaaaaacgcttagagaagcaacgggaattggagagacaacgagaggaagaaaggagaaaagacatagaaagacgagaggcagcaaaacaggaacttgaacgacaacgtcgcttagaatgggagagaattcggcgacaggagcttctcaatcaaaagaatagagaacaagaagaaattgtcaggttaaactctaaaaagaagaatcttcatcttgagttggaagcactgaatggcaaacatcagcagatctcaggcagacttcaggatgtccgactcaaaaagcaaactcaaaagactgagctggaagttctggataagcagtgtgacttggaaattatggaaatcaagcaacttcaacaggaacttcaggaatatcagaataagcttatctatctggtacctgagaagcaattattaaatgaaagaattaaaaacatgcagnttcagtaacacacctgattcaaggggtcagttttacttcataaaaaatcattagaaaaggaaagaattatgccaaagacttaaagaacagttagatgctcttgaaaaagaaactgcatctaagctgtcagaaatggattcttttaacaatcaactaaaggaactgagagaaacctacaacacacagcagttagcccttgaacagctttataagatcaaacgtgacaagttgaaggaaattgaaaggaaaagattagaactaatgcagaaaaagaaactagaagatgaggctgcaaggaaagcaaagcaagga

SEQ ID NO: 89374 - DNA, 610 bp, Homo Sapiens
  misc_feature (23)..(23): n is a, c, g, or t
agcctccttcgatgctgactctngcagaagcgtttcctcccgagtctctccatcttcagcaacctccgggtggatggagaaggactgcccaaatgcctctttgagctgctccagctcctgtttgaggctgtcgtactcagcctccagttcatcatactgctgtttgagggtcagcttctcctccagcaccaccagcccgtactcggcagcctggatcttctcgtgggtggtctccgtgagctccttggttagcctctctatctcagtcttataatggtccaccgtctgcaatacctcttctgcggccatagccccggtggatggaggcaggagggggttacggggtgggggagatggatgcgaagctggcggggaaagggagaaggaaatgggaagggatgggtggaaacggaaaagaaagtgcggccggatgaatgagcagcgcgatgccccgccggctctggtggcagcggcagctacaccgcccgagaaactgacgagaaatgcaacatggagaacagggcagagggtcaggggcgaggcggcaaaggccgccgcatgtgtcctcggggccggcccctgcgtgcggtcagcagccgtgcggcatggc

SEQ ID NO: 89375 - DNA, 562 bp, Homo Sapiens
ggggtctaaagccccaggaaaaatggtggaaaattcaccgtcgccattgccagaaagagcgatttatggctttgttcttttcttaagctcccaatttggcttcaatattgggcagttgcattacctgtctacctccttattgctatagtaattggctacgtgctcttgtttgggattaacatgatgagtacctctccactcgactccatccatacaatcacagataactatgcaaaaaatcaacagcagaagaaataccaagaggaggccattccagccttaagagatatttctattagtgaagtaaaccaaatgttctttcttgcagccaaagaactttacaccaaaaactgaactgtgtgtaaccatagtaacaccaagcacgtatttatttataagtttttgccattataattttgaccataaattaatttgaccatctctcttattaatagagaagtaaaaaatgtaagttgaccttctcttagattatgttcaatgaatattgtaaatgttcaagtattgttaatgaatagaataaatacaatattgcattcccaaa

SEQ ID NO: 89376 - DNA, 954 bp, Homo Sapiens
cagtcgacggtaccggacatatgcccgggaattcggccattacggccggggggccagggtgggggttgccgtcgcgcctaggcctttccctcaggttttcctcttccccactgcggctccccagtcggcgcttgcgcggagaactcagcgctgagattgtctaaagccccaggaacaaatggtggaaaattcaccgtcgccattgccagaacagagcgatttatggctttgttcttttcttaagctcccaatttggcttcaaaaatctgaagggatctcgtgtttgctgagtgttccgtgtgccagcactagcctaggaggttttagtctctacaaatatttatacagcaccagacgcgatggcaaagtggataaagcctggtccctgcccttaaggaggtcgtggtcttggggaggagacagatggtactttacctcgtgtgggcctttaattcctgaatcttggcctaaactctttagggtttaaccctattggcctcaaaacatattgggcagtttgcattcacctgtctacctccttattgctatagtaattggctacgtgctcttgtctgggattcaacatgatgagtacctctccactcgactccatccatacaatcaccagataactatgccaaaaatcaccagcagaagacataccaagaggaggccattccaggccttacgagatatttctattagctgaacgtaaacccaaatgttctctcttgcagccaaagaaccttacccaacaaactgcaactgtgtgtcaaccaatacgtaaccccacagaccgtatttctttcactaaattcttgccattcatcatctttcgaccattcaactaatttggaccatcccctctaatcacatacacacgctacccatcttaattgaacctccctaaacttacgctcccagcatcatccaacggtccccactttccatcaa

SEQ ID NO: 89377 - DNA, 790 bp, Homo Sapiens
cagtcgacggtaccggacatatgcccgggaattcggccattacggccgggggagggtgggggttgccgtcgcgcctaggcctttccctcaggttttcctcttccccactgcggctccccagtcggcgcttgcgcggagaactcagcgctgagattgtctaaagccccaggaaaaatggtggaaaattcaccgtcgccattgccagaaagagcgatttatggctttgttcttttcttaagctcccaatttggcttcatactttacctcgtgtgggcctttattcctgaatcttggctaaactctttaggtttaacctattggcctcaaaaatattgggcagttgcattacctgtctacctccttattgctatagtaattggctacgtgctcttgtttgggattaacatgatgagtacctctccactcgactccatccatacaatcacagataactatgcaaaaaatcaacagcagaagaaataccaagaggaggccattccagccttaagagatatttctattagtgaagtaaaccaaatgttctttcttgcagccaaagaactttacaccaaaaactgaactgtgtgtaaccatagtaacaccaagcacgtatttatttataagtttttgccattataattttgaccataaattaatttgaccatctctcttattaatagagaagtaaaaaatgtaacttgaccttctcttagattatgttcaatgaatattgtaaatgttcaagtattgttaatgaatagaataaatacaatattgcattcccataaaa

SEQ ID NO: 89378 - DNA, 636 bp, Homo Sapiens
  misc_feature (152)..(245): n is a, c, g, or t
  misc_feature (317)..(339): n is a, c, g, or t
cttgccctccgcccttcctgcctgaaacagataagcgccctctgtgtaccaaaaaggaatgtactgttatagagacttcaaatcagcagaaaattcaaatagttataacttttctttataatccatcatgaaaaagagtaacgacaaataannnnnnnnnnnnnnnnnnnnnnnnnnnnnnnnnnnnnnnnnnnnnnnnnnnnnnnnnnnnnnnnnnnnnnnnnnnnnnnnnnnnnnnnnnnnnnagttgtgctctcctgcagcgttttgcggacggctggctatcttacccagaatcaatcacactgggaccctgnnnnnnnnnnnnnnnnnnnnnnngagcaagggagtaattctagcctgtttttacaagaacacagtggctatagacagtgccagtgtgaagatgactcagcaaacgtggagaaccaaagattctagggcagcaccaaaactgggaaagcaattacagcagaagttgccttccccatggtagcttagcaacttcgtgtctctccaaggcagagaggaaaatcaagtctaacaggccttcccgaaggctaggtgtgaaataccagaagccatctttgtttctggcgatgtcactaaataaatatttgttgatataaagtaaaa

SEQ ID NO: 89379 - DNA, 465 bp, Homo Sapiens
caaaaaggaatgtactgtttatagagacttcaaatcagcagaaaactcaaatagttataacttttctttataatccatcatgaaaaagagtaacgacaagaagctgattcctgccaactgcatttcctgggctcatttaaccatgcccagaaggaattaggacaatgaaagataaaaagataaaggagccaacatatcctctcccctttgattcagacgacttctccaccatcgccttcttcacaatggccacttttcctctgcagttggggttcttcttccccagcaatggctccaggactctgttaactcagctcctccccagttctagaggtagacggtagaggcttcctgctattgttactctggggttccccttcttctccagttgtgctttccagcccttccaactcctttgtaactagttcctggtatcaaattcacttaactgaactacctgaaaaa

SEQ ID NO: 89380 - DNA, 560 bp, Homo Sapiens
agttaataatatatcatatagtttcaaatatcgaatgttcccaacacaaagaaatgataaacgtttgagagaatggatatgctgcatgctattatgtgaccactatacatttaatgtagcacaacatcactatgtaccccataaatatgtacaattctgatgtgttaatttaacaaatgctgttacaaagataaagccctgcattatgcataccaggcagacattggtgctactggaattccatcagtccaggcattggatcccagagaggattcaattctgctgttcccctttcttatctgggcccacggagcccttgcccttcaggagaaaagtctctccttgtcccagacttcaaagccacaggcacagaccagagcctgaggcaggagggtgtgtgtgcagcccagtggtgcaagggcagacagggctctgagactctgcctgctcctcagtgatcactccctcatctttgtcatcctccaattgggtctaaaggcaacacactttggatacctaaaaactgacaacaaccaataaatgtctttatgagaagtgaa

SEQ ID NO: 89381 - DNA, 470 bp, Homo Sapiens
cctagtcagattggaattcttcatatgtaaaaagagaagagaaagacattcttgattttggtgactagagttgtagatgctggaagctttgccactaacattgatgaaccagatgcatgtcaccagcccatcacggtgattcttaatgccggcaccatgggcccggcactgccacgttttccaaggaacctgccggagctcctgcggaagctgctcctcgggcgatggagtccctttgctgctaggcccttcttcagtcaccacaggatgcctgccattcatgaacaggaaggagaggacgggctttgaataaaaaacaggatccaggaaatatttgtgaggccatttggacttcagtgtgaaatggtgttaaaagatgaagtcatttattcaagaagtaaacctctgccacctggactgtgctcagacatttcattgattttgtttaataaacattttctggctttggg

SEQ ID NO: 89382 - DNA, 420 bp, Homo Sapiens
tgcggccgctctcagcggagggggcggccccggggcccaggcgccgcggcccggcaccccgtggaagagccgcgcgtacagcccgggcatccagggactacatgaggaaataattgacttttataacttcatgtccccttgtcctgaagaagcagctatgagaagagaggtggtgaaacggatcgaaactgtggtgaaagacctttggccgacggctgatgtacagatatttggcagctttagtacaggtctttatcttccaactagcgacatagacctggtggtcttcgggaaatgggagcgtcctcctttacagctgctggagcaagccctgcggaagcacaacgtggctgagccgtgttccatcaaagtccttgacaaggctacggtaccaataataaagctcacagatcaggagac

SEQ ID NO: 89383 - DNA, 1314 bp, Homo Sapiens
ccctctgggaatatcgtggtcccaccccctgcccggtccccttcctccaggtgtgaagaggtacagctgcagcccccagaggtctggtcccctgacccgtgccaaccccatagccatgacttcctgacagatgccagcgtgaggaaaatgagccggatgttctgtcaggctgcgagagtggacctgacgctggaccctgacacggctcacccggccctgatgctgtcccctgaccgccggggggtccgcctggcagagcggcggcaggaggttgctgaccatcccaagcgcttctcggccgactgctgcgtactgggggcccagggcttccgctccggccggcactactgggaggtagaggtgggcgggcggcggggctgggcggtgggtgctgcccgtgaatcaacccatcataaggaaaaggtgggccctgggggttcctccgtgggcagcggggatgccagctcctcgcgccatcaccatcgccgccgccggctccacctgccccagcagcccctgctccagcgggaagtgtggtgcgtgggcaccaacggcaaacgctatcaggcccagagctccacagaacagacgctgctgagccccagtgagaaaccaaggcgctttggtgtgtacctggactatgaagctgggcgcctgggcttctacaacgcagagactctagcccacgtgcacaccttctcggctgccttcctgggcgagcgtgtctttcctttcttccgggtgctctccaagggcacccgcatcaagctctgcccttgattatcctgccacccgcaggggcccctctgtcagcacttggggggtgggtggtggagggtggcccgtaagtttgagggctcaaaggctcttcccactgcttgttactgtgttgcttcccactcccccttgaccccaggcccctgcttctccctctaggagcctaaagaaccctcctggcctccagctcagccttctctcacctactatgtctgtccaacaggtctgcatgggtccctgataatgagaacagctgcctggtcttctctcccagtctgcctagcccagccctgggactggaatttgaataggggatgagggggaaattgtaatttcattccttaacttccttttccccacccctgctcttcaacctctttatcagttctgaagctggaagggtttgggcaaaggaacatccccattccaattcccattttctgatgcagattttacctgagggatttggaagcccttttggggaggcaggttggccccaagggtaaaagctgggtaataaaaggctattctcctggg

SEQ ID NO: 89384 - DNA, 928 bp, Homo Sapiens
ccggaattcccgggatatcgtcgacccacgcgtccgctctgagaatttgtgagcagcccctaacaggctgttacttcactacaactgacgatatgatcatcttaatttacttatttctcttgctatgggaagacactcaaggatggggattcaaggatggaattttacataactccatatggcttgaacgagcagccggtgtgtaccacagagaagcacggtctggcaaatacaagctcacctacgcagaagctaaggcggtgtgtgaactttgaaggcggccatctcgcaacttacaagcagctagaggcagccagaaaaattggatttcatgtctgtgctgctggatggatggctaagggcagagttggataccccattgtgaagccagggcccaactgtggatttggaaaaactggcattattgattatggaatccgtctcaataggagtgaaagatgggatgcctattgctacaacccacacgcaaaggagtgtggtggcgtctttacagatccaaagcgaatttttaaatctccaggcttcccaaatgagtacgaagataaccaaatctgctactggcacattagactcaagtatggtcagcgtattcacctgagttttttagattttgaccttgaagatgacccaggttgcttggctgattatgttgaaatatatgacagttacgatgatgtccatggctttgtgggaagatactgtggagatgagcttccagatgacatcatcagtacaggaaatgtcatgaccttgaagtttctaagtgatgcttcagtgacagctggaggtttccaaatcaaatatgttgcaatggatcctgtatccaaatccagtcaaggaaaaaatacaagtactacttctactggaaataaaaactttttagctggaagatttagccacttataaa

SEQ ID NO: 89385 - DNA, 578 bp, Homo Sapiens
aaatgaggtttttaggattatttattgattccaggtccccatgctttttgttagagcttattagtacaggttctcaagagatgaccacataaaagtgctctgtttataaataagcaggtttctgtagtactgactggttcatcacaaggcaagtcagaaaccagtatccttctagctctccagtcaggacttccttatgcctctagttttatgaccggttaaggagaagccagagttagagtaggagaggactaattctcagcagcagtggaggtgagttctttcttttgcggaagctttacatatgttttgtgtagtaggaataactagatattttagctagtgtgcggtgtgtgttcacccctgggattggacagtgtatcctaacaagtcccatgtctggttctgtgtctaaaggcctgctccatgacacaggatgctacatgcactcctgctagcacatcttgatctgttgaatgttcattctttctttttgctcatactgctgtaggctataattcccccctgtttttccatcttgttgacagcttgtagagaataaagcaggaattcttttt

SEQ ID NO: 89386 - DNA, 401 bp, Homo Sapiens
aaggttctgacagagtaggaagtgggctgtggggtcacgttgttcccacttcaccacagtgaaagcctgccaggaaacacatcccggaaatgagatctactctagaaaatacaaggaaggtactgggaaggtaacaaaccaggcagacacctgtcctccatgatctcatatggacgtgggagctgatcactgcatatgtgtagacacaaagggaacaaggactgccgcgcctacctgagggcagaagatggagcatgaggattaaaaactacccatggggtattgtgcttattccttattaaagacaaagtaatctgtacgtcaaacccccacaacacgcaatttacccgtgtaaaaaacctgcacttgtaccccttgagccgaaaataaaagttgtaaag

SEQ ID NO: 89387 - DNA, 636 bp, Homo Sapiens
  misc_feature (597)..(597): n is a, c, g, or t
aattcccgccttgagccaggccgctccatgagtgctagcagtggcttgtcagcaagggtcatccgcacagaatggcagcgcattaaagagggaattctctggaggaagctacagtgccaagcggcagcccatgccctccccgtcagagggctctttgtcctccggaggcatggaccaaggaagtgatgccccagcgagggactttgacggagaggactctgactctccgaggcattccacagcttccaacagttccaacctaagcagccccccaagcccagtttcaccccgaaaaaccaagagcctctccctggagagcactgaccgcgggagctgggacccgtgagctgcctcagcactgggacctctcgctctccgctccctgccactcacctcctctcactttcatctcttccctccacctcgcctgctcggcctgaaagccaccaggggctggcagcagtagcaggacagggcttcaggagttctgacgacacgactctcagatccacgcccccagcctaacagcaacaacaaagacagacttttccgtagcagctttagataaaacgttggatttcattccctgccaactanaagttgcttttcagtaaacattttaccccctactcccac

SEQ ID NO: 89388 - DNA, 568 bp, Homo Sapiens
ttagactatgtgtttgcgcacttcagtggcatctttcttacaagtactgtctacttttctggcctactgcatagccatgaaaaatagtcctaaactatatcctgaagcagtcctaccaggattcctgtcaggagtactttgggctatagctacctgctgttggttcatagcaaatcactctctgagtgctgtggtcagttttccaataatcactgctggtccaggatttatagctgcaatgtggggtatcttcatgtttaaggaaataaagggtctacaaaactacctattaatgatacttgcattttgcatcatcttgactggagccttatgcactgctttttctaaaatctaacaatgacaaaaccagcaggtggcagcagtagttaagagaacgcgtctatcggacagcggagagatcatgctgagaaaagagtgcattttcatatagcaaatggatctcagccactgttggagtgggtaaatgatttttttccccaaaaatgtgagaatgaaggaagattgagtttcattcaagtataaaaatgaaaatttcttctgaaaaaaa

SEQ ID NO: 89389 - DNA, 435 bp, Homo Sapiens
  misc_feature (100)..(100): n is a, c, g, or t
ccagaaatcattacatgaagtgagaaagaaagcaaacatctgtgggatacaggccaaggaaggagtttgttgtgggaagaaccagtaattgtaccagaanacataagcatcattcatctgatgtgttgcttgctaccttatattctcctttcaaatatagtgttttatatattcttttatcccaaactcctgaaggactcttcagatgttctacttacttaaatctcatattgtcatacagtccatttatctgatgaaaagggaactaaatatcccacaggtgttttgtattagtagttgataaatttataatgtaggttgtttctataatgtatgtataagagacaaaaagaggggcatcagacttgatggagacaaaatgaagtgataatgtaattacttaatgtaataaataaccccaacacatctcctaaa

SEQ ID NO: 89390 - DNA, 707 bp, Homo Sapiens
gtgaaggaatgcgggaaaccggccggtgagggaacccgcttattcctagggacggatggaggtgaagaacccacatcatgcgatttcttgaccatgcgacgaatgctggtgcagacacacctgcaggacctgaaagaggtgacgcacgatctgctctacgagggctaccgggcccgctgcctacagagcctggcccggcctggggctcgcgatcgagccagccgcagtaagctttcccgccagagcgccacagagatcccgctgcccatgctgcctctggcggacaccgagaagctgatccgcgagaaagacgaagagctgcgccgcatgcaagagatgctggagaagatgcaggcccaaatgcagcagagccaggcccagggcgagcagtcagacgccctctgaggccacgccccgcccggccttacctcggctccgccttcagtcggcctcttgtccaatccccgcgccccacactgcccagcgccccccgggacctccgcgggtgccgccctcgcgcgggctagggggaggttctcccagcctgagtccgtagccccgccccggcgctggtcccgcccacccagacaccgcccacttcccggcccggggcctgcacaatctccgaccgcatcactgtcttccggagtcccccttcttctcccagactctgtcttcaataaaaactgagcttcccgcggcaaaaa

SEQ ID NO: 89391 - DNA, 643 bp, Homo Sapiens
attaaagatactctcggtctaccagttgctgggcaaacctcagaatttgttaaccaagtgttagagaagactgcagaagggaatcccactggaggccttgtaggattaaggataccaacatcaaagggtgtaatcagcctcattggaccactggtcagaaatgtctgcgttttgtcacgttatccattgtaaattttcattctgttttgcatgtcagttagcattatgtaaacatttacaattaggttacattgttttaagaactaagtagcataagtgaagcatgatccaaaatacttgattattgcattttcagagcataaaccatgattaaaactgctactggcatcagaattgaaaatcatatgtttaagtaaatgttaggtacagattacaaaaatctgttaaagcaaaacattttggaggagtgaaatagtaaaatgccaagtattgtggcagatttatgctctgaaccacacaaaaaaattgaggaagcatttttttaaacagtcggtttaaattgtttttagaattattgctttttgttctaattttccacaaccattaatctcacttgtatatggcacacccagcacttgtgcctgtgggccatattagatgttcattgtcagagctcaagatg

SEQ ID NO: 89392 - DNA, 1142 bp, Homo Sapiens
aacctagggctaggtagcgaggcatggcgtgtgttaattcggcacgaggggtgggcggggcccttgccccctcagactctgaggacccctttctggatgagtgcccctccgacgtcctgcccgagcaagagggtgtttgcctgcccctgagcaggcacacagtggacatgctgcagtgtctgcgcttccctggcctggccccgccacacacacgggccccctccccactcggccccacccgagaccctgtggccacttttctggaaacttgtcgggagcctggcagccagccagcaggacccgcctccctgcgggccgagtacctgcccccatctgtggcttccatcaaggtgtcggcggagctgctcagagctgccttgaaggacggccactcaggcgtgcccctgtgctgtgccaccctgcagtggctccttgctgagaatgctgctgtggacgtcgtgagggcccgagcactatcttccatccagggagtggcccctgatggcgccaacgttcacctcatcgtccgagaggtggccatgaccgacctgtgcccagcagggcccatccaggccgtggagattcaagtggaaagctcctctctggccgacatttgcagggcgcaccatgccgttgtcgggcgcatgcagacgatggtgacagagcaggccgcccagggctccagcgctcctgatctccgtgtgcagtacctccgccagatccacgccaaccacgagacactgctgcgggaggtgcagaccctgcgcgaccggctctgcacggaggatgaggccagctcctgtgccaccgcccagaggctgctacaggtgtaccggcagctgcgccaccccagcctcatcctgctgtgaccaggcgggcctgcccctgggctctggccacgcttccagcctctgtcacagcccccccaggcctcatgggttagagggaaaccgagctggcctggccagagccgtcagggaaggtaggacctggccacgtaggagcagaacgctcatgaaagtgcttggaggccgtggagcacaaagcagattctgattgggagcaaccgaggcgggctctgaacctggccggtccagcttcgcgtcctctgctggtgtctctccttctctgaccgcggccgc

SEQ ID NO: 89393 - DNA, 1281 bp, Homo Sapiens
  misc_feature (11)..(11): n is a, c, g, or t
  misc_feature (30)..(31): n is a, c, g, or t
gaataataccncccatccccaagaacactnntatacatattaaatggatatatgattactgtgcaaaaattcattctggaaatgaacatatatttgagcactaatatgtaatggacacctgccctaaggagaaaaataaataataaaacttttcacattcaaaattactttcccaagcatgtcttagaataatctatgtgttgatgcatgtaaattgtactttaggtaggcaaagaaatctggttatttatgtaaaaactagtctaaataaagttagttagtggctttatcactttaaatctttagtgtccaaaagtggtgtttaaagtaatagcacatcagaaaaccttgtctggacaaaactagttcactcactgcttctgcacctgcagttgctccctttagggttataaaataatgacccaaatgttacatgtgttgatattataacttgtcagttactgatgtctgtggtatcctaccctcatctctgaaagggataatactgaataattattagaaaactataaaacttcacactttgtaccattaaaacctaaaattttaatcttgtccttttttactatggatcagtcggcactcgggaacagcagcaaggaaaaaaagcaaatttcattcacatgttctgtgttcatacctcttctctacctaatgttcatttaaatttcagccttattccttgataagggattttaccacatgaagtcatccagtgaccctagctcttattgtgaagttagtggagtatacttagaaatgttacaactttaaaatgttacaaaacattcattaaagctcatatttaaagtagagcatctagtttgagaaatagaaatcaattattaaagatgtcttttttctacccatttaactagttaaaaccatgacatgtaaatgtagaagtagaataatcatagaattccctaaaatatttctgtttactaacatatattgaccaagtacatcaagcaggagagatcttccttcattctgttatagtccacatcattctaattttgctcagttgttattaacgagcatattcctaaaccatacactttttgtttcaataaagttttattttgttgagatgaataaaataacaaagttataagctgcataagacaaaagttcaattgttcaaaaaaaatttactgggatagctttctattacaggtattgttagattatattgtgctgataagattactttctaaaaaatttgtacttttctgtaaattaaaaaaatatggagtcata

SEQ ID NO: 89394 - DNA, 722 bp, Homo Sapiens
ttaagtaacgacttccccctttgggggaccccaaaatttggaggccccattctaggactctggggatcccaaaccctagagtacacacgtcccaaactcccctgtgccctcaagtcctacagcccctagaagaccccaatgccgtaactcctaggacccccaaatcatggaatcccaaatccccagggaatcccaaatttgaaaatccaatcccaagtccccaggaaacccaatcatgaggtccttgtgcctggtatggaggagactgcagtcaggatatgcattccaggctcccagacacctcaagccctattcacaggcaccaggaaaccccacacaggaattcccatccctggaaactggagaatttcaatgccccgagtccatgggtttcaagacaccaaattccaagagccccagccctaagggaaccccaaatcctaaagcctccatctctaataaatggaaggccccaaggccctgaggggatctcaaatcctggaaccccgatttcaatctacgttctagtcactggcctcaaaggaccccacagcacctgggccagaccaacagctcgagggagaacctgaaggcccagggggtccagggcggacctggggccccgaccaccaaggacagctcacgactgccccttcactgcatgtccccaaactcagcatgactcctgtcctcttcaataaagacgtttctatggccaaaaa

SEQ ID NO: 89395 - DNA, 559 bp, Homo Sapiens
tttgtatataactgacatttaatgacatttccagaactcacattcttggattgggtgtcttctcagaagcgacagggtttcttcggtcgtcatccagtttgcttgcacaaaccctattcaagggttgcatttgtcgggctggatccagagcggagcctgactgggtgctttggccatgatggatgggggttactctcttctctgtagcagaactcctggaagactgaaccatgccactgaatcaggaaaataattatgttagatgtccccagtaacataagtctcctcttccattatttcctttattatgatttttatcattctctggcacagatatcaggtgaaggacgaaattaaaaggcagccagaatctgcccctcatctttgtaggcgccgtgacttgattttgtcagttccaataggttctgggctcttttgccatccggcttttctttggagcaaggaggagcatgaaaaagagatcagaaagagggaggtgaaagaccatccccaggcccttgaagctggcggaggcctgaataactcctcccttctcccc

SEQ ID NO: 89396 - DNA, 848 bp, Homo Sapiens; identical to SEQ ID NO: 15346
  misc_feature (597)..(639): n is a, c, g, or t
  misc_feature (665)..(665): n is a, c, g, or t
  misc_feature (782)..(782): n is a, c, g, or t

SEQ ID NO: 89397 - DNA, 783 bp, Homo Sapiens
ggggacgtcacgccgcacgccccagcgagggcgtgcggagtttggctgctccggggttagcaggtgagcctgcgatgcgcgggaagacgttccgctttgaaatgcagcgggatttggtgagtttcccgctgtctccagcggtgcgggtgaagctggtgtctgcggggttccagactgctgaggaactcctagaggtgaaaccctccgagcttagcaaagaagttgggatatctaaagcagaagccttagaaactctgcaaattatcagaagagaatgtctcacaaataaaccaagatatgctggtacatctgagtcacacaagaagtgtacagcactggaacttcttgagcaggagcatacccagggcttcataatcaccttctgttcagcactagatgatattcttgggggtggagtgcccttaatgaaaacaacagaaatttgtggtgcaccaggtgttggaaaaacacaattatgtatgcagttggcagtagatgtgcagataccagaatgttttggaggagtggcaggtgaagcagtttttattgatacagagggaagttttatgggtgatagagtggtagaccttgctactgcctgcattcagcaccttcagcttatagcagaaaaacacaagggagaggaacaccgaaaagcttttggaggatttcactcttgataaatattctttctcatatttaataattttcgctgtccgtgactacacagagttactgggcaccagtttatctttcttccagaatttcctttcagaaacactc

SEQ ID NO: 89398 - DNA, 567 bp, Homo Sapiens
aatattctttattatgatgttcattatgttactaaaaccagtagcatcaacaatgtgtcagaattcacatttattaccagattggtaataggattattaaagctacagagtgtcaggacaaggatttgtattaaagagtttttattaatatgataagctagttaataagttagccagttcaccccccaaccctaacaaatgaccatcgggtcagctcgcacactcagcctgctggcctccagcctaagctgaactgcttctatggcctctataggttagatatggctgaaccacactgggctgacagtcttggttgggaactcacacggaatgaaataaccagcaaaacgttctctgactgctttcttaccaccaaaaataaattggtagagattccagtatatcatcagtattgcagatgtcgagataaaaatcatcaggcccaattaagtggagaggcattggattaagtaattatgtgcataaaaaatacaaatacacatctcatgtttttcctggcacaccgtttacaatagagaaatattttgtaacattcaaaataaagaa

SEQ ID NO: 89399 - DNA, 465 bp, Homo Sapiens
cagtgaaagggcagccttcattttgagaaggtggaaggtgttagggtttgggagacagctcatccaatctcccaagtctcatggtggatttgtgactgtgagagtttccggtttaaaatctgaaaagccagatatgcctgtttccttttcccagcaccatgcctgtggaggggacagtcagacccagaggtcctttacgtgtggatggagttcacaggcgaatagaggagaggaccaggggacgtggcttgtcccttttgtccaacaaagcattatatttttaagaatggcagtcctgtttgctgaagtgttcataagataacaataggcttgaatctccaattcaaatgaatgtcaaagcacatatctttaatatgctgaatgaatatttatttttgtatccattaaaacagtatattgatctcttttattctttattaaaataaaatgctcttttttaaaaaa

SEQ ID NO: 89400 - DNA, 454 bp, Homo Sapiens
tttgtggcctcctgatgtcctagacagtagtttaagtgatggatggattggaatcaattgtatgcactctaactatccctgctattgcttccgtgcaattgtgctggagcagcaaatgaaggattagagggtaactctctgggggcagtgaaaatacccatcaatctgttcctgctgcagggtaatatggatgatgtaaagcttgagtagccaaagatcacagcgcattgttcttctggaaggaagggtcatagtattttatgatgactggcacacaatgggcttggcaggaaaggctctcattcttagttctcaggagttgatattttgcaaaatcccctggctctttcatttctgttggttgctgttgcagaagaaaagtgaagatttcctcccagtctttttcctctgcaactcacagcaattgtggcggatacgtggggtctgttaccat

SEQ ID NO: 89401 - DNA, 715 bp, Homo Sapiens
cccccttcgggaagtggacactgtccagcgcggctcagacccaccagctgcggcgactgcggggcccagccaagtgccgcgagtgcgaagccttcatggtcagcgggacggagtgtgaggagtgctttctgaccgtgccacaagcgctgcctggagactctcctgatcctctgtggacacaggcggctcccagcccggacacccctttttgggttgacttcctgcagctacccagggacttcccggaggaggtaccctttgtggtcacgaagtgcacggctgagatagaacaccgtgccctggatgtgcagggcatttaccgggtcagcgggtcccgggtccgtgtggagcggctgtgccaggctttcgagaatggccgagcgttggtggagctgtcggggaactcgcctcatgacgtctcgagtgtcctcaagcgatttcttcaggagctcaccgagcccgtgatccccttccacctctacgacgccttcatctctctggctaagaccttgcatgcagaccctggggacgaccctgggacccccagccccagccctgaggttatccgctcgctgaagaccctcttggtacagctgcctgactctaactacaacaccctgcggcacctggtggcccatctgttcagggtggctgcacgatttatggaaaacaagatgtctgccacaacctgggcattgtgtttggccgacactgc

SEQ ID NO: 89402 - DNA, 467 bp, Homo Sapiens
atgtggtaatctaggatgaggaccaaatttcaaacttggataagcagagctatgaggataatgaggccagtcttggtcctgctgggtttgagccacctgtggaatacttagttcatatagtatttggaagactaattactgcacttcttgttatagactgatttaccctcctccctgctgcatatgttgaagtccttgaaaatatgactgcatttagagttagggtcgttaaagatataaaatgaagttattgaggtgggtctgaatccaatctgactggtgtccttataagtaaagaagactggacacacacacagagaaaagataatgtgaagacacagggagaagacagttatcgacacaccatggagagagacctcagaagaaatcaaccttgcccacagggttaatcttaagagtcgtagcctccagaattgtgaaaaaataaatgtttaagccactcaaaa

SEQ ID NO: 89403 - DNA, 440 bp, Homo Sapiens
gaatcagcttcatctccacttggcagcatgtggtaaatgaaggaaatcccatcttcccagaattcagctaggatccagaagtgatgctgttacgtgacgtcttcaacctccctccctctgcccatctcagggacctctccagaagccagtcccaagagtggcattggttagcatatctcaaatacagtgggagaagcctcttagctcagctccagttatttctctattgtagaaaaccaagagagagatgaataaggaatgaaaacatactccacatggactcaataaatcttgggtgaaatgatgctgtctgacaaggtaaataaaaaatgcagcactcaagcaccagcactggggatgagatgaggacacaccaattaccagcacttctgcctgctttgctttgttgacaataaatatcaagttatgtcatcaaaaaa

SEQ ID NO: 89404 - DNA, 388 bp, Homo Sapiens
gtcccctcacaacccagtgacacctttctgctttcctctagactggaacattgattagggagtgcctcagacatgacattcttgtgctgtccttggaattaatctggcagcaggagggagcagactatgtaaacagagataaaaattaattttcaatattgaaggaaaaaagaaataagagagagagaaagaaagcatcacacaaagattttcttaaaagaaacaattttgcttgaaatctctttagatggggcttatttctcacggtggcacttggcctccactgggcagcaggaccagctccaagcgctagtgttctgttctctttttgtaatcttggaatcttttgttgctctaaatacaattaaaaatggcagaaacttgaaaa

SEQ ID NO: 89405 - DNA, 449 bp, Homo Sapiens
tttgatcacggttacaagagccagacctgtaatgacagaaagaggacaggaacaaaatttacatctctcttaaaataagtgtgaaagaagcatgattcaacatgtttttaaatattagtgcaaattccaactattattcttacatataaagttattagagattcaaacgcctaggttagcaatgttaattcagaggaaaaaagttgacagcttccctcaaaatgttcagaaaacaccctattttagtcttcatttgctaatgtctcagtagacaaccatattttggccccacttaaaaatttgcttaatggtgttcctaaaatgcttcgtctgcacagattccctacaggagaaaatggaaatgaggaggagagaaactccggtgtccccgaggtgtcggggtggtgagggccgctggcgttgaagtacatcctgctctggcccagctc

SEQ ID NO: 89406 - DNA, 1258 bp, Homo Sapiens
  misc_feature (214)..(226): n is a, c, g, or t
gaaggattattcccaaactcagatactttataatttgtaatgatgactagtgactttccaccaaataatcaacataccttgttgctccagatcatactgggacactgtgtccctgatcccaatacccctgaatctatttatcttaaacttcatggcatgtaactaaattaaaaacctaaacaggaacagaatgtcaagattattttgatgtaannnnnnnnnnnnnaggccaagagtaaacacacttcatactggggaagaagaataaaccaaaataactcaaaacagtaactgaaaacaccaatcccaaaatacttacacagcgaccagctggattttgaatttgattgacgttgggttaaattctggcttgctcaaattatgttcacatttacggcagcgcagggaccgtttgatcagaagatgtttgtggcgaggatagagctgtgaagcacagactggctggaagtcaggctgtaacagacgctgctgaagggttgttacctctgttaaatttactggtcttgtataatagtcttcaggtagaggttccacttcatccacagcctgagctggctcaatctttatctctttctgatcctctccttctttaagggaaagtccggcaagggtactgatggatgcaccagctcgtggtcgctgaagcctggttccaagaccatatttgtccgaaaaagccagaggcatatagtttctacgtcgtgccagtttcttgcgatctcgctcaaccttctctttctgagcaagctgctggtaatattcaatcaatttgttcatccgttgtgtgtgaggattttcaggttcctgccaaccgccactagctacagatttgtctgccatgcccacatctctagacgtccagcgacaaaatccacatgccaggtaataggctttcttcatggtggtcttggctgggtcatctggaagctgtgtggagatgctcgtggcccgagtagagagggtgtgcatgcagccaggacagtcaaaacaattggcacatctattcttttttagtttggcttcagccgatggcatattttctaaacaactgggacaataatgggagtccacctcgtgagacacacattccagcgaccgcagttcgctacaatagcggcagaagtagagttgcgagagcggggcccgaaccttcttttctacctggactagatagagaacccggtccgactgcagcaaggacgccatcttggggagggaggaggcgatgacgctcccc

SEQ ID NO: 89407 - DNA, 514 bp, Homo Sapiens
caactggagggtttttctgagagagaagtgagcatcaaatacattcctcatcttgccctctctagatgaaggttgcttgagcaggaaatccacccatggcccaaagaggaaagatccgctttaaatgcctgggcatatacttccaagaaccagatgtggcctgttccttacacctccctgggcttagatgacagcttgaactctgcggctgatggaattgagcagatgggaatgacctggaatctaacactctacaattcagacacaccactgtccacttgtccctcccttcctgccactggccctgccagcgtaccttgtgtacttcgcaaaggtcactggctcctgttttatgtaatgactgacagacgatctcgcccagctcagcaatgtgaacagacaccttgcatggtgccggtggtgggtgcggttgtttctggatgtcatggaagaggctggggcataccagggctttccccaattgtgcctaaaataaattggctcttgggaggtt

SEQ ID NO: 89408 - DNA, 584 bp, Homo Sapiens
ggcggcgccgcgcgtgaggggccgtctaaggccgagcgggcgcggcgagcggccgggcgagcgcagccaacatgtcggataccaaggtaaaagttgccgtccgggtccggcccatgaaccgacgagaactggaactgaacaccaagtgcgtggtggagatggaagggaatcaaacggtcctgcaccctcctccttctaacaccaaacagggagaaaggaaacctcccaaggtatttgcctttgattattgcttttggtccatggatgaatctaacactacaaaatacgctggtcaagaagtggttttcaagtgccttggggaaggaattcttgaaaaagcctttcaggggtataatgcgtgtatttttgcatatggacagacaggttcgggaaaatccttttccatgatgggccatgctgagcagctgggccttattccaaggctctgctgtgctttatttaaaaggatctctttggagcaaaatgagtcacagacctttaaagttgaagtgccctatatgaaaattttaatggagaaagtcgggatctttaaaccccaaaggagtagacagtctttactgtta

SEQ ID NO: 89409 - DNA, 1041 bp, Homo Sapiens
tgccacctgggttgggaaaataattgaagatgttttctcaagtccttcaagaatctcttcttaatgttcagaatagtttaagagcgttgttgaggtaaagtgatagctgattattttctgagatttagatctaaacaaactcagcatgacgaggaagcacacttcacagctccagggtgcaatactgatgtaaagttgcctcgtgaggatacatttttcgctcatgtatgcaaaattcctatcagttcatttgcacagccagttccaatcatgtatgtgatcaccagattaaaagcttcatccagaaagacaagactcctcagaacgaatagtagacaagtaagactgctacccacagaagccagtacgcttcaggtgtgaggcggggtaactactcatctcttcacagagccaaggaaagaaaaagaacgtctctaacatgatttaccattttaaacagccttataagttttgtctcttaaaatcatgctgcagaaggagggggtaaaagtcgtgttctgccctgtctgtggcattggagtgccccgctaggtaagaagcaatgcttagatcttgcttccaggcagcagcttgaattcccgaatcttcctgcaaggtgcatacaaatgcagcgtgagaatccatacacgtaatccatattcaccttcccatccatcccgcagaagaggcatggtgacacccaggctactgtccatgcttgagaggacgtatttgaaggttctgttactacaagttgggaatattcacggacatgcctgaataccccggctgtaactcacacgtggtctgtgtaagtggattaacctcggggcggccttgtttaatcctgaataatatctgaaagactgagtttacttgggaatgtgtagtttttctaatgcacattaaaatttattttagctgttaaaaataaaatcatttttattatcagcagactcttttatactttatggggcatctacataccacttcccccactcttcataataaaattatttgtaaaattttaaaaaaacaaaa

SEQ ID NO: 89410 - DNA, 364 bp, Homo Sapiens
gcaggaagacaggtctattgacactgaaatctaaaaatcaaggtccacaggcgaatggaggcatcttcagccctgaggaggccaggctgtgtctcctgacccccctgagggtgggcacagcagccagctctgtgtgggcggagtccagtggtcctcattctcttccctggggacagggcagcacagtcagatgctgagactgaggccacacacatgggggcgccttcctgccttggcccggcccagctgcctctggagccaggaggccgtggcagccacaccacagtgtgattccagacacgattctgtggaggggttccgggattccagacagactgaatctccatggaatgatgaaaattaa

SEQ ID NO: 89411 - DNA, 331 bp, Homo Sapiens
ttgaatactttttccgtataccaagagcttcctttgcactagcatctgaaactatatccagaatgacactggttttcataaaagtgttgatcctcacacctctttatagtcttgcacctagcacagtggagtgaaacactttaaatagcacttgttccttgagtatatatggaaaaaagtgaagtattgataagtgctcagctaatatgagcagcatctcaaggagtctccaattcttgaattaccagggagtatttttaccattttcccctagtgaaaggcctattttgagagacttaccctccaaaatgaatgtattaagtcatgttcc

SEQ ID NO: 89412 - DNA, 532 bp, Homo Sapiens
tctttcacattaagagcttatgcttaaagcatgccccccttttctaacttgctggtttaccataaactcccctaagtaataaaattcctaacccagtactgagagtcctccttctctgccacttgggcattattttactagtttttaagccatcatcgcacaagaatccaaaaacccttaaattttttaaccactggcaaatatgtacagcaaattaggttaagcatttaatctggctcatgctctatcatactaaatattcaggtttatcataaactccctaaaaaccatcaaaggtcaacccagaaactgataactcttgaaaggagcaaacacgttaagatctttggagtttaagcttttctgagatgtgttgtgaaaaatctaacgtgtttatcgtatattcaatgtaacaacctggagaatcacaactatatttaaagagcctctggaaaatgaggccagtacagtgtgactacatgtttaattttcaatgtaatttattccaaataaactggttcgtactaaaaaa

SEQ ID NO: 89413 - DNA, 533 bp, Homo Sapiens
agacatcaaaggctagaggattcattttatgcagtgcgaacatctaataacactctctgtgtcaaatatatattgtacattaccttaaactattgtaatagctaggtaaaaatccttgtataaaagaatgttttcccccacacaaagggcagagtattgagcactaatttcctattaaaagtatatatatgtatctgtgggtcactggtgtccagacttgtatttgcatttgtgtttacttgaggaacttgaacactaacaactggtaaaatcccattgtaattcttacagcattttgactttattttcctgcagtgaattgtgttgtgtaaagattagggctttaaaatcttattagcaagctttgttttgttttaattattgttgctgttgtaactagatttaatttatttttagttggaggtttgacctaagtctggaccaattgattgcttttcaatacaactttgcaaagaacttcctttttccacaggtggctttgttcgattaaagtctacactaataaaaataaa

SEQ ID NO: 89414 - DNA, 427 bp, Homo Sapiens
acctccccctcaaggctgtgaggagggaagaaaggaaacaacttctactttctttaaagtaggaaacctcctcatctgccacctctcctgcagtgagaagtagagactagacgtggatactcccacataggatactggggcctaatggatgactgtgggcctccaccaggcgcaggtgaccctgcagatatgattcagaggcagcctctcgctgctgttcatcagcagcctgattccatgtggactatactgttgctttcagaaatcatggtctgcctggacctagccaggctcactgttgaagtcttgttgtgtgctcttccttccaggcccagagagctgcccagtagatcaacttgggctttctatcaggctctaagtacaggcaggtccttaggacaaattagaataaaacaatctcagagtg

SEQ ID NO: 89415 - DNA, 519 bp, Homo Sapiens
gcggccgctcacaacatgcacagcctggcgacggctgcggtgagtggctgggcccccaggcttggaaccagaatcctttctcagacccacgtttcggccttctctcctaattcccggtgtcgggtccctagtctgatttttttctgccctcaatctccaaggccccggttcccctcctcggcacgctttggttgtggtggagccggcccctatttccttgccggacgcctctcgcggccttcagcgcgacccatcgcgttctttgcgggcgccggggcctggtcccacgcccgtagcaggccattcattgatttattgcgctgaccaacagtttcagggcgccagttgtgttctgggcgccggcgtcgatgaggggaattccatggtcaatctgacgcggcccctgctcttagaactcaccacgtcgcagcgggaaggaaatggcttctagttcaaaccacttgctttatttatggaaaacctgaggcccggaaaagtgcataatttttgcatctgact

SEQ ID NO: 89416 - DNA, 360 bp, Homo Sapiens
gctttgtcccctagtgaatattcaaataagtaatcaataagctttttgcctaattgtgttcccagtgagtattattgccctatctttatatataatgcagtattcatgaatgtaatttaaagtgaagaaacaagattagagccaacctagtaatgatttatggaatcattctctgctcagagtatatttttgattgacaatattaatgagcttttttaaatgaaattgactttttcccaggaatgttgcgtcatcctgtgatttgagcttttcacagattatgtatttttacctcatcatctaatttggttgctgaagagttgtcaaaaacaggaattttacaccaagaagaaaggaatg

SEQ ID NO: 89417 - DNA, 474 bp, Homo Sapiens
  misc_feature (216)..(313): n is a, c, g, or t
tatctatgtcacttagcctgaatcctatggaaagccgagcctgaagcaatgattatgattctaatagtttattttccagatacaatcacatcacaggatgttgagcctcctcaccccatgtggaggtgaggctttcctcaggtggtcccctgccaaagtggggaagtcagctggattccttatcctactcagtaagaaggtatcaagtgcctacannnnnnnnnnnnnnnnnnnnnnnnnnnnnnnnnnnnnnnnnnnnnnnnnnnnnnnnnnnnnnnnnnnnnnnnnnnnnnnnnnnnnnnnnnnnnnnnnnaaaggaaatacgtagatgtcactgctacacgtgttgagaaagaagatcatgctccttgaatcctttcttgtgcaagacctttgattccctcggtaccatccgttctatcccattccctggaccaaatgtttgcaatatataacccttctttaaactttaaa

SEQ ID NO: 89418 - DNA, 443 bp, Homo Sapiens
  misc_feature (43)..(43): n is a, c, g, or t
gagctttcaaaaaatgaagttgctcagccgttgagaactctgngaaagcccagcttaacaagttgtttgcttgggtggactctgcttgggggtgcagcggggggttctttccagtcctggtgtgttgctgggatgaagcagagagccctagaactgttctctccatcccacttacggcaagggctgttcctctgtcaggccagtccttgggggcaatgacagcagcaggaacattctggtaagtgtgtggtttccctcccagtgagcaggctaaccctgagtataggaacttaggggaggttaggtggctgatgcatgttttccagaccggtttgtatctgcttgtcattgatcttagaagttcatattatggtggaattatctatttgcatgtgtaaactttgaatatgtttttaacttttaataaaaagttatttttaaaa

SEQ ID NO: 89419 - DNA, 512 bp, Homo Sapiens
  misc_feature (40)..(40): n is a, c, g, or t
  misc_feature (46)..(47): n is a, c, g, or t
  misc_feature (49)..(142): n is a, c, g, or t
  misc_feature (254)..(385): n is a, c, g, or t
gagggttgtcttggtccattttatgctgctataacagaancacccnncnnnnnnnnnnnnnnnnnnnnnnnnnnnnnnnnnnnnnnnnnnnnnnnnnnnnnnnnnnnnnnnnnnnnnnnnnnnnnnnnnnnnnnnnnnnnnnttttgctgactcataacgtggaaagagagtgcactgcatagaagaaaggaggccaaactcattcttttatcatgagcctactcctgaaataactcactctcaagataatggnnnnnnnnnnnnnnnnnnnnnnnnnnnnnnnnnnnnnnnnnnnnnnnnnnnnnnnnnnnnnnnnnnnnnnnnnnnnnnnnnnnnnnnnnnnnnnnnnnnnnnnnnnnnnnnnnnnnnnnnnnnnnnnnnnnnagagttctttgtctttgtgactcggtgtggttcagcaaattgcgattggtctgctatagcggactttcccctcacctcccaaatgtttattatgaaaaatttcattttaaagaaaggtggaaggaaa

SEQ ID NO: 89420 - DNA, 1083 bp, Homo Sapiens
  misc_feature (630)..(642): n is a, c, g, or t
tttgacatgataaattcagcctcactgtagtccagagtgagaattagaacataccaacttccaatctgcctaaatgtgacagcctctgcccaagactggctcactgaggcgtcttggctactggatgtaaacaaaaaatgcaatatccgtgcctcccagttctttgaaggaatcaattcatccttggttatatctatgctggaaaactgtgggtgtcctttggataaagcatacaggagttacctaccaggatttagatttggtcccttctgtaaatattagcctgaacgttgagttctgtgaacatgaattcttttcgaattccattacaatgcaggcagggttttggtgtcaattttttaaaatcaaaatcacctactaaattagttattttggggggaggatctagacacttgatgattctcagtgaccagatccaggctcagggctgaagtcagcataattcttgagcaagaaaaaggtgattccttcttccacaaagccattccttctcctgagatgccatcttctagagaggtgactaacaggctctgagtgggggttttattatatgggtttttgtttcctggaatgagtaacaaatgtttcaagaatacatcatttctcttnnnnnnnnnnnnntcaacctatgtgtaaaaagagacacttaaaaagatttctgaccatttataaatataaatctaattccaacaggggtgtaatattttgaggacaggtaaaaagcataaaaatacaggtaagaaaataaaatttaataacatactaatctggattgctatacatattatcaagcagcagcatctttgtacaatacaggaagacttgcaaactttggaaatatactacattcagcaacacggtagacctgtcagagtgctacatatttacattaacttagatgtagcagtgcaaaccttcactcaactgagatccttctaacacacgtgcaacacacccatctttaccatttagacacccctactttctcattctcttagaggatcttattgcctcttcccgtactggaaatatttcatgagccatccttcttggcaaaatttc

SEQ ID NO: 89421 - DNA, 516 bp, Homo Sapiens
ccgttcaacgtcaggctcagtcccctctaccagtcatgattcacattactactaggctgtatcctttttgaggctgggaaacagtcaggctttcgtcattggaagtgattctgcagacttctgactcaccttatcaggtgactctggttaaggaaagcttttgagtggtgaactcaaagactccagttgaatcaggaggcaaaggcaaaaattagcataattatatttaaaagcctcaggaagtgggaagagaatactgcctcccagcctcaattgctgatatgttattggagacaggcttttgaaactgctccagctatttctctgtaacctttagttaaaatataagtagaaaggagacaggaggctcaggaaattttctaaattgctagtataatatctatatgtatacacacatatacacccgtggagagagaggaagagtatacagtcctgtttgaatcatttggaggatttttttgctgaataaagttctcaagaaaattttctaaaaaa

SEQ ID NO: 89422 - DNA, 813 bp, Homo Sapiens
ctagatgacttcatcaagtacatgagatgagatgacaatagtaaagactctccatagtacatcatgtgatgtatctaccagatcatccatgggcatgtattgcgcaccaacaatgaccatgtgtctcaggtgcagagtgtggagcgcatgattgttggaaagtaaccagtcctgtctctccttcacagtcggctggtttgatgctgccagctctacgaggtgccagatccaaaccgcccccagaggctagggttgcatcagcgggaggtcttcctcttctatgatctccttgtggtctcctaaattttccagaagaagaagatctttggtgacgtacagtttccgtcagtctttccccctcgtggaaatgcacatgcagctcttccagaattcatattaccagtttgggatcaagttgctgtctgcagtacctggtggggagcgaaaagtcctcatcatcttcaatgcccccagcctccaggaccggctgcgctttacatccgacctgcgcgagtccattgcggaggtgcaggagatggagaaataccgtgtggagtgtgagtagcccagccatgtctcctccctgctctcctgaaacagtaccctgcagaaaccaagaatcctatcctcagagaatctcagagttgagggttagcttgtccaaccttcccatcctcatttcaagaattcttcagcctctgcttgaataccttcagtgacaaggggctcattacctcccaaccccattattatcctgaactctaattatgagccaactattccttctagtgaaaggtatcagggagaagaatc

SEQ ID NO: 89423 - DNA, 337 bp, Homo Sapiens
  misc_feature (36)..(36): n is a, c, g, or t
atgtgtgaaaagcgctcaagtatgtgttgtaaaaanaagggtctaggccagttacttccagataagagcataatgcccatgaggccaagcttatgtattgggcctgtagcctgcttgctggcaaataatctggtgccaagtattctctcatggcaggtgtagcttgtgaacgtaattgtaaccacaactgtgaaaggatctcaacactgtgccttccaagtgatctttgatcataagatctgtcgataatgcttgtgaagaaatatagactctcatattgattatttttactgaattggagtggacactaataaagataacagagcactttaaaaaa

SEQ ID NO: 89424 - DNA, 435 bp, Homo Sapiens
gcggccgccgcgcccccgccggagctgccggagtggctgcgggacctgcctcgcgaggtgtgcctctgcaccagtactgtgcccggcctggcctacggcatctgcgcggcgcagaggatccagcaaggcacctggattggacctttccaaggcgtgcttctgcccccagagaaggtgcaggcaggcaccgtgaggaacacgcagcatctctgggagatatatgaccaggatgggacactacagcactttattgatggtggggaacctagttaagtcgagctggatggaggtatatcccgatgtgcaaggcactgcggagaacagaatctaacagtagttcagtacaggtcgaatatattctaccgagcctgtatagatatccctaggggcaccgagcttctggtgtggtacaatgacagctatacgtctttcttt

SEQ ID NO: 89425 - DNA, 613 bp, Homo Sapiens
tgcggccgccgcgcccccgccggagctgccggagtggctgcgggacctgcctcgcgaggtgtgcctctgcaccagtactgtgcccggcctggcctacggcatctgcgcggcgcagaggatccagcaaggcacctggattggacctttccaaggcgtgcttctgcccccagagaaggtgcaggcaggcgccgtgaggaacacgcagcatctctgggagtaaatgtcccttcaacggtaatggaagccatgtgcagacaagacgccctgcagcccttcaacaaaagcagcaaactcgcccctaccacccagcagcgctccgttgttttcccccagactccgtgcagcaggaacttctctcttctggataagtctgggcccattgaatcaggatttaatcaaatcaacgtgaaaaaccagcgagtcctggcaagcccaacttccacaagccagctccactcggagttcagtgactggcatctttggaaatgtgggcagtgctataagactttcacccagcggatcctcttacagatgcacgtgtgcacgcagaaccccgacagaccctaccaatgcggccactgctcccagtgcttttaccagccttcagaactga

SEQ ID NO: 89426 - DNA, 796 bp, Homo Sapiens
gaaggttattttttatttatctattttttaagaagacagaatttagctacacccccaaaaaacatgataatgtattaatgcagactcttctggaagccatgagaaaacaaatgaagatttctgacttgatgtgtggcatgacgatggtgatgttttgggaggttcattttggatcaacaaggcaagttttgactaatgagatttcaaatccaccccgattcactcccgtttacagaaggaaattaaaaaattgattggttacttccttcgctgcatacgaacaccttgattggccaggctgccgtggctaggcaaccaggcggagaatctttggaacaagtagcagacttcatcacagcaggagccgtgaggcaagaagctctgggatcaattaaaatgccaggcttttccaggctggtttccagcgcatctgtgcatgattccacataaatttagggaattagagatcagacaaagttataagacagctgttgacgtcccactcaccagttaggaggattgagaagaagctgctttccaggaaatcccagtcgacttccagatagatctctttggtcaaaaatgtgtcacagctccaactctttttttgtaagatggtgaacacaggcaggggccacatctgacttacctctagctccaggtactaaagagccactggggagagctcagtcatgtaatccaatactatctaaacatgaactacggagtccccatccaaggcactgaatgagaacatctggaacactcaataaatatttcatcaacaaataaaaaa

SEQ ID NO: 89427 - DNA, 469 bp, Homo Sapiens
  misc_feature (208)..(208): n is a, c, g, or t
gtgaagaaggctgctgtggcatgctcgggacctagagggaacctgcctcattgacaggggacagcagctgcacagctccagacaatcgttgtcaaggacgggaatgagattctaacatggctgatctgattttcaagaaaggtgaaagacccccaaattcatggaagagaagtgagtcacacaagggagccagtggcagagccacacnccccacagagcaatcaacatgctctactctgcagacctgcaacagggagggaagccagactctgatgcaagaaggaaagaccatgtgctggctcagtgtgtgcagcctggactgagctactgaactctaaatccaaggatgactaataggcagaatgacattaataccagacctgatgaagacagcacaaaaagtaaatctcaacacaacctcacaatattaataaagcaaaaattttaaatacagtaatgtattagcaaa

SEQ ID NO: 89428 - DNA, 600 bp, Homo Sapiens
ggaaagcacttgccttctaccaaccccagcttgcaatcactgggccttcccctcctatccaaggggttggaggggccccttggctctccttttggcaggaggagcctgcttcattacaccaatgactctgccatccccctccctggccctagaccccaaacacatctccctctacccaatttactcttctcgccccacctagggacagattccccctgctctttttgtcctagaaaccccgctagtttgggatggtagcgtctggggtggggagggcttccccttccccactcgagggtgcgggtggggaagggggggtgggtggagacagccctggggcagggaggatggtctctccactgtagaaagtagagtaggattgtggtcagacttaatttgaggcatctagtgaagacacgtacaaatccaccaaggaaaaagatttcaaaagcaaaataaaagcgggaaataaaacagacccaagaataatcaagtcaaagtgatgttgcacaaaatgcagagaaaccaagaagggggagggttaatgtattaaatgtgctattaagaacttaattttattaaaagtactattacttaagg

SEQ ID NO: 89429 - DNA, 492 bp, Homo Sapiens
caaacacttgttgcttgactgatacattatggcgggcgggcaaggccgccgatcacgtgataccgccccccaactccgggcggaagaggccagcgacagcgctgcacgaagcgagtgggcgggcgctcgtgcccggctaaaagatggctgctggcgcctggcagccaccgcctgggaggttactgtaaggcccgcagctcccgccagctcccgcggactgctgccgcctccttaccatgaagccagtaagtcgtcgcacgctggactggatttattcagtgttgctgcttgccatcgttttaatctcctggggctgcatcatctatgcttcgatggtgtctgcaagacgacagctaaggaagaaatacccagacaaaatctttgggacgaatgaaaatttgtaactcttctggatttaattatctgaaaatacagttctttccctcatgcttatgtagatataaaaataaaattcataatgcaaagttcaaa

SEQ ID NO: 89430 - DNA, 452 bp, Homo Sapiens
aaacattaatcctttgtgcctcaattgatccctggatccaaaacaagctgaaaaacaaggttctctctgtatatgaggcacctaagaccaatgtgaaggcagagcccacaaggttccagaaagagcctgagaacccagaagagttaactattcaagactttcgacttgcaaagctgaaccccttgtttattgcaaagtccatcaccaaagtaggccaaaagaaaacgcctgctttcccaccgtgctgctcgaaaccacgaaaacataggccacaggtcatagggccctggcagccaaggatcaagaaacagctccgggtccttgctgaaattgccaaataagtcaattctttgggcctactccccgactccctccctgaagatgcttctcaggctcccatgagaaaacaatctatacttatcttccgtgaataaacaagtgtcactctaaaa

SEQ ID NO: 89431 - DNA, 730 bp, Homo Sapiens
tgagccatcacacctggcctaacagaatatttaaaaatggccactcaccaatcaaagtctcaaatctaaaatgtaatggatgtgagaaaattactatgcttgtcataattagaaccatgttattctcatttagactcaatggatccaatccagataagaaaactgtcttaactcataatataggttccttggggaggtagattaagtctttgacttgattatttccttatccaacctttatcctactggcctgaaaagggttagctgccttctcagctggccaaagtttccactacacagtgagtagggcacttgctcagtaattcagaggaatggctcaatgaaacttaacgttttgttgttttgtttatcatcactcgacctgctctccccaccctgccctttaggacatcattcctttttctggtatgaaaacaaataagaatgaacaggtagtttaacattccatttcatgaaagtcagtgatgagtaaaggaattatggttgtactgctatataaaattgccccaaacgttcccaggcctttgggatgcaggtgcgcaccaacccagggctcttgttcctaaggtcactatcagctgaacaaaccttcaatgcagcagatttacaccaggaaaagcaaaactaatttattctattctctttgaccattttggagaaaaactgtgggcctctgcaggccaaccctaagtctacagtagtgttaaga

SEQ ID NO: 89432 - DNA, 432 bp, Homo Sapiens
atatatattagtagattaatagaatacattactactgagtagctaaaataaacttaagctacctgaatcaaaatatataattctcaaacagagtctaaaaaattgcatgaggatatgtatagtatgaggtcactatataaagtaaacatagcatattatgctgtagctacataaaatatgtagtaaaagtataacaacatgcatgggcataataagcatcaaattcagagaaatgttcacttctgggaaaagaagaggatgcaggatcctcggtgatagggtatttggaatgttttatgtcttatttcaaaacatcaaatgctactatgtaaaaatgctgggtggtgggtacctggatatttgttgtattatcctctgtacttttctgtctacttgaaatactgaataataattaaaaagcccaatgcaagc

SEQ ID NO: 89433 - DNA, 425 bp, Homo Sapiens
actcttcaaaggtacactcggacgcccactctgcaaggccattttgttcccttacagtgcctctgaaatcattttgagagaggagaatagggaattagggtaaacaacggttaaggcataagcaaaagaacagcaggtgcagccagctctagacagcatataggccacatcctcactcctgttataacaaaacagaagtttccacttcagccttttgtttcatcctgggtaagtccttcatagggtgtaaccaattggaggcatctaaagggcacctaggggtgttgctaaattattttattaatagcttaaaaccctaaagaacattgtaatcagcgctcttgagccctttacataagccgggcgtccactctgtggagtgtactttgcttcaataaatctgccctttcattgcttcaaaaaaa

SEQ ID NO: 89434 - DNA, 1167 bp, Homo Sapiens
  misc_feature (1119)..(1119): n is a, c, g, or t
  misc_feature (1146)..(1146): n is a, c, g, or t
aggagcagatgatagggtattactttagggagctaccacagaaccttcggccagagatgacggtggcctccacaggatggcagtgagtgccctcactctgctttctctctttcaatccttgcaggtggacaggtcgaccgcagcccagcccagtgccttgacgagcccaagcacgaagaaaggcagacaggaaaaggcctacgctgtcctcaagggagggccctgaaagacctgctacctccagggtgacctcagcgctgcgccccgaggcaggcaggctgggatggcgaattcgacaggcatagcgtgccccatgctgctcagtggtgactgggggcggctgcaagtgcccagagaggctgacagagccatcggaatggtggcgcagggccgagagccacctctgcccctcggccttctgagagcggccccctgggccaccccggagttcccactccacctccaggcccccagaagggtagaagtgggacacaaggcagagcaattccgggggtgcctcccctggggcggcccgtgcaagggttgctggcatcagggacactttggggggtttgtacacagcaagctccagggtgacctgtccttgcaggtatggcaggtgtatggtggccagataaggtgccctcctgaaagggttgaactctaggcagccagaaggtcccatttccggtccatgggccccatggctcatcatcatcccaagcagcaatgccacggccccttcttgggctgctggcatctggccatgcagcccaggagtagcagaacaggagcagatgtcccttaccacaggtgctagcgtagccactctagcccaaagggagggggacccggagccagagatgaggcggcctcggaggtggggggcatgtaggcaaagctcaagtccagcagagcatcttgtcccagtctcactcgaggggcaggggtgtgggtgaggacagtcagtaccactgttgccatggtgatgagaacaggctcctgctgaggctctggctgtggtcgcaagaggctggagaggctgaggactgggctggatatgctgaccatcagccaagccccatccatggcccgcgggcagttctgccgcggggtcangccgctggcccatttcgcaaatgctgngagaagcacgaagcggcttat

SEQ ID NO: 89435 - DNA, 1082 bp, Homo Sapiens
gcggccgccaacacctgccttagggccctgggtgggcaagtctgggccctggggtagggagggagactcaggcccacacttgggtattttctaatttcagacaaacacacactcagcgcgcactcactgattcctacacattgccaagatttcacacatgtgaccaggggccaccaaagtccctgtgacctttgtgactaggatcctaatttctctattttctcctgggtgcctgggtctgtgtcacctggggcagtgtggataatgtttagttctgtgacactgttttttgggggtggcacctggttctccgatgcctgggctggtgtcaggcccaggactgtagtgctgggagcagtaaagctcagctctgtgtaatgagtgatgctatggcttgctcgtgtcttatgatccaatccttttctacatcagcccttgttttgttttatggctagtcttatctggcctggttatttccttgcggggaggagagggtttgctaatctgctcccagcccaacctattaccaccccacctcgctgggacctactgctcgggaggcagcagacagggagccaccagcagtggcttcctggccctgtgctgggggtggggggaagctgggggcacatgtggcccttgccttctgagcagctcccagtgccagggctttgagactttcccacatgataaaagaaaagggaggtacagaagttccaattccctttttattttgctggttggtatctgtaaatgtttaataaatatctgagcatgtatctatcaacgccaagaatttcaaagtctccttcaacaatatgaggcttttaggatgtttatattccttcatccctcttgtttcccaggttttgcagggaaaaaaagtctggaattatagatacagcttattattaaatttgttcttgcataatgtctcttctattacaaaaattctttcttcataaactgcattagaggtttgcaacaaccacatcatttccattaacttagatttaggttttactggattcattgctcaccattattgcttgtatattacatcttttccaatctttaaaaaa

SEQ ID NO: 89436 - DNA, 431 bp, Homo Sapiens
accaacactgatgatcccatcccaacacactactttgtggtgctgaccagttgtaaaaacaagagccacacaccggaaaactgccctgggtggctggatgtcctaccctttatcatccctcaccgacctaccaacgtggagagctgtcctgaaggtaaaccagaagctctttgggttgaagaaagatttacagctcacattgcccgggtccgtgatgtagaacttctcactgggcttgacttctatcaggataaagtgcagcctgtctctgaaattttgcaactaaagacatatttaccaacatttgaaaccactatttaacttaataatgtctacttaatatataatttactgtataaagtaattttggcaaaatataagtgatttttttctggagaattgtaaaataaagttttctatttttccttaaa

SEQ ID NO: 89437 - DNA, 464 bp, Homo Sapiens
  misc_feature (218)..(226): n is a, c, g, or t
cataatcttctatgtctctcttcagaaaggctggagatgacactgctaacaccacctttagaagaagaggcagctcaaccctcagaaacactcccccctaaggatttatttatcaaaatgtcaccacaataattgttacagccagccttgctccttcaaaaccatgctgccttgatagactacagttagttaaaattcctttgctttggttgcttttnnnnnnnnntgtgtgtgttactgtatctcacacaccacagctttaggaaatgttagcaaactgcaaataatctctcactcacataattgtcaagatgtttaaagtcatttccttctacaaatatgtccaaactctgttatcctatccctataaagttatacatcattcaagggcttttaaggaaagtacacaaacctgtattaagcaacaaataaatgccacagaccaggctatgtgctattcaaaa

SEQ ID NO: 89438 - DNA, 449 bp, Homo Sapiens
  misc_feature (206)..(206): n is a, c, g, or t
cacgctgaaataaccatataaaaacctgaactcaaagaagagaactggaataatcctccctaatcccacttcccatggtgagccccagctgggacgctgacacatggccccaactttttctcctgcctgatgtctggaaccacaggggacagatggtggtccctggtcactgaagtacccacagaacccatgcaagaggcacaaanaccatctgcttagtggtcatgtggcagcagacagtatctcagaagtcctcgcagcatatgacttcactgatgaagatggatcacacttgagcagggattcttgatctctgcaaaacagctcatacacaacaggaacaatctcacagataagaaaaactccagaagttggtctcgggctatgaaaatttctgccacaatatgatttatatgaaaataaataaagtgggtctactactttaaaaa

SEQ ID NO: 89439 - DNA, 372 bp, Homo Sapiens
ctggagaggccatagggatcccgagtgccaggactgggtacaggaggggcaggatggccgaggaggcagcctgagcaggaggggctcggcccccggcagtggccctgccacatggggtggcccaggcagcggcccagcgcccaggcctgggcctcgggagaatgtgatggggaaagggaggaggaggaggttccgagggaggggcagaagcaatagaagcatggccgtgcccttgcagcctgcttagactccagtcagccacttgtacctgggaggccgggctgagtgcagaatcaggcccccccgccaccgcctccctgagaggccggggagcccacagctttgatctcaacaaaagccaaggcctgcaaa

SEQ ID NO: 89440 - DNA, 467 bp, Homo Sapiens
ctgagacagtgacccaagacaggacaaaaaacattgagaagagtccaactgtcaccaaagatcatgtgtggggagctacaacacagaagacaacagaggaccctgaggctcagcctccttctactgaggaggaaggcctgatcttctgtgatgcccccagtgcctaaataatctgctctagcaacactcccttcagtccagccaatcctgggtcctgtgccactcctacaaatgctccaaactctgtcctcaaatgacttgtgccactcaaccaggaaatctatcccaggtctaactcacctcagcagaaggcactgttttatgcaagaatacccatcacaagaaaaaggagttcataggttcctgaacctctgcaatcccctgaaaaaggctttcattgccatttccattaacatgcaggtgaagcagggcattctccaaatatactttgtacctttaagcaaaaa

SEQ ID NO: 89441 - DNA, 687 bp, Homo Sapiens
tttgcccagagtaaagaaatctaatgtatcaatcatgaaatccaagaagacgtcctatcaattggtagtctgtcctttgtacttccttccttgagtatttttagggtacctattgcatgattatgtttagatcacagttataagcaaattttctccattccctgaagaggatgagaggagaggttatagcccagagccagcagggaagaaagccacgcataggaagctaatgagcagggatcccagagagaaagaaccgcagccctgggctgctgagtcaacagattcctttctcaaatccaagaagagaaatgaacagaatgacaaaccaggaacaaggaagaaaaaatgggacacggagccaattctctggaactttggggtcacttctataatttattttcaagttgtcagaaattgtgctaatgtagatgagcagatttacaactaaaaccaaactacgacttctttaaaaaaatgtttgatttaggtctggtctcaggatgggtgtacaggagctgtagggtgtaatttgttcttttccggcagatttagttttccaaatgcaatttgcttagactaatattccatttagttttcatattctaaacatctactaacaaaaagtgcaaggggaaaagatggcaagcgtattaagaggcatcctgtaaggcagaggaaaaaaaa

SEQ ID NO: 89442 - DNA, 533 bp, Homo Sapiens
  misc_feature (83)..(91): n is a, c, g, or t
tttaaaattctactttctgtttaatgcaatgttgtgtacagagtcaaatagttaacaaatattgttaaagatcactaaatccnnnnnnnnncacatgcagcttaccccaggagtttttgatatttgggaggtcatcacctcctcatgtctgttaacttctgcttgccgaagaggagttactaattgccatctcaacttcttccctttaattttaagcactccatgctgtttctatttttcattttccatactcaatcccatcagtcctatgtgctctgtctgctctgttgtgtttcaacagctgccctgccctatcctgctacccctcaaaaaaccaaacttcccatactccttttcaaatcaggagttttctgtctaattgaccatatgaatatggatattccttaagtgaacacttctttttgggagtgggatgtggtgggaatgcctatttaaaaactcacataaacaaaattatccaggaagctaatggtgtactggtgtataagcatgcactactgttttgagaattc

SEQ ID NO: 89443 - DNA, 456 bp, Homo Sapiens
  misc_feature (162)..(162): n is a, c, g, or t
  misc_feature (233)..(233): n is a, c, g, or t
cagattaaagatgagagttgctgaaaggacagatgagaggaaattagaaggtggaattgactggactggggactcattggactgatggatggggacagtagtcagctaagacggttccctggttcttccttgggagtttgggtgagcgatggtgccaccaancaaaggtaaagaaaatagaaggaagagcaactttccaggaaaagggtggtgagttcccttttggacacttngcctgtgagatgtggaggtgagctggacatgcaggatctacagcccaaagaagactacaggtgagagtgaaaagcaagggagcctatgagagtggataggtgaaaaggagaccctcagggccattcagaagaacaccctcatctaaagaacaggtgtgagccactggcacccagccacattgtgaaggttttttaatgaaaataaattcaaatcagttcatct

SEQ ID NO: 89444 - DNA, 481 bp, Homo Sapiens
atggacattgcggggaaggagcgtgaggcagtacagctgatggcggaggccgagaagcgagtcaaggcctcccactccttcctccgagggctgtttggaggaaacacaagaatagaagaggcttgtgaaatgtataccagagctgcaaatatgttcaagatggctaaaaattggagtgctgcaggaaacgcattttgtcaggcagccaagctccacatgcagcttcagagcaaacatgactctgctaccagctttgtggatgctggaaatgcttacaaaaaggcagatccccaaggtaagacagccaggcatgtagcatgctatctctgtgtgtaactaaacattcagtaattcccccaacggttaaggtcagtgttggtgtgccttcaagtcctggtaaaaaggaatttttgtaatttggaataatagaggattttgataaacttaggggattttcctttttaatcatttggggggcttt

SEQ ID NO: 89445 - DNA, 618 bp, Homo Sapiens
agcggagctgagctcgggtaggccgcgcgaggtccctcctctccgggcgtccgtgcgcctagctctgcgctgggagcctcgcgccctttgacagcagttagttgctgactcggatgcagagagtcggtaacaccttctccaacgagagccgggtggcatcccggtgtcccagcgtgggccttgctgaacggaaccgggtggccacaatgccggtgcggctgctcagggacagtccagcggctcaggaggacaatgaccatgccagagacggtttccaaatgaagctggatgcccacggcttcgccccggaggaactggtggtgcaggtggatggccaatggctgatggtgaccggacagtagcaactggacgtcagggacccggaaagggtcagttaccgcatgtcacagaaggtgcaccggaaaatgctcccgtccaacctgagtcctaccgccatgacctgctgcctgaccccctccgggcagctgtgggtcagaggccagtgtgtggcgctggccctccctgaagcccaaacaggaccgtccccgagactcgggagcctcggctctaaggcttccaacctgacccggtaaacaaacgacgcgatgtgcagcaaaa

SEQ ID NO: 89446 - DNA, 459 bp, Homo Sapiens
accgagctgtaaatcgcttgagacctgtatttggttgttttgttggttttgccaagtaaggtcacttgaggatttcttggctcgaggtcccaggttgcgcagactctgactgcatcgagttgagaattttggtcagaatgttaaagtggaaacctaccccaggctgtcatgacttttgcattctggtaaccaactgatcctacccggacccatgatgcataactcagctggtcctgtggcgcacacccagaggccgactcaatgcatgaagactgttttccacacccctatgatttcatccccaaccaagcagcagcatccattccctagccccctgcccaccaaattatccataaaaactctggcttctgagttctcagcaaaactgattttagtaataactccagttcttccacttggctggccttagttaattaaacttattctttactataaaaa

SEQ ID NO: 89447 - DNA, 543 bp, Homo Sapiens
caccgattaattgctttattgaaggttccctggctcccataccctggcttgtgcttagttttatgggaccatcagtctcctcactggctggaagcttctggggtaaggagaagaaactcatctttgactctcccacagcactgcagaatagtgcttggcaaaaaggcagttaggaagtatttcaaaaaccactgggaaatgccttcctttgcagataaagccttctgccttcgggggccgtataggaaaactcatttaagatcaggttctccagggtgaggagactgctgttcagatgtttgcagagccacattgctattgttgttttccctgaggcgggtggacctaatattacaatcctgggcacattgtcgttgtctctatgcaagtgctggatcatgaaggggatgggatcttcgggctggtggatcaggagttgctccagcatgttctgcatcaactcgaagatgtggttctcctccccgtactggggcatctcgggggggatacggtgcggggcgatagtggcgtccatgtagccgt

SEQ ID NO: 89448 - DNA, 1121 bp, Homo Sapiens
cgcggcggcctagcgacgcggttactagggagcggcgagccgagacggctacatggacgccactatcgccccgcaccgtatcccccccgagatgccccagtacggggaggagaaccacatcttcgagttgatgcagaacatgctggagcaactcctgatccaccagcccgaagatcccatccccttcatgatccagcacttgcatagagacaacgacaatgtgcccaggattgtaatattaggtccacccgcctcagggaaaacaacaatagcaatgtggctctgcaaacatctgaacagcagtctcctcaccctggagaacctgatcttaaatgagttttcctatacggccaccgaagccagaaggctttatctgcaaaggaagacagttcccagcgcgctgctcgtccagctgattcaggaacgcctggctgaagaggattgcatcaagcagggctggattctggatggcatccctgagacgcgtgagcaggctctgaggatccagaccctggggatcacacccagacacgtcattgtgctgagtgctccagacacggtcctgatcgagagaaacttggggaagagaatcgaccctcaaactggagagatttatcacaccacctttgactggccacccgaatctgaaatccagaaccgtctcatggtgccagaggacatctcagagctggagacggctcagaaactgctggagtatcataggaacatcgtcagggtcattccctcctaccccaaaatcctcaaagtcatcagtgctgaccagccatgtgtggacgtcttctaccaggctctgacctatggccaaagcaaccatcgtactaatgccccgttcaccccgaggggtgctgctgctcgggcctgtgggcagtgggaaaagtctgcaagccgcccctcctgggccagaaatacagggcttgtcaatgtctgctgtggggcactgctgaaagaaagctgtgggcaaataggaccacgtttgggggaggtcatcccgccctttctttgtaaaggaaaatgggagttcctgaacagccttctcctgaaggtgcttgaccaaggccttggaccaccaggactggctcccaaaaggctgggtggctacc

SEQ ID NO: 89449 - DNA, 387 bp, Homo Sapiens
tagtctaagatatacaccccaaatcctaattgcctctttgcatcacatttctttgtgaatctccatgtgtatgtacataattaattgttatttttcttgttaacttgtctgtgatcagtttaatttgtagggtcccagacactgaacctaggatggaagagaaaaagtgtttctgctttcctatggcttaggcaaccatgaatggacaggcagggcatcccacttgctccagaggctgcagctcaattgagatctgacaaagctgatgtgaaaactttactgaaccagatcctggaattttgcctacaaaaatacaaatacagaactctgttttttcttttccaaattcagatttgcacgagaataaaattataagaattaaaaaaa

SEQ ID NO: 89450 - DNA, 474 bp, Homo Sapiens
ctgatcataactaatgctgagaaaaaaagaatactcttttctgagttaattacccaagttcaaaataagcactctctgacaaagtaataaatactctgctatgttaaaattgattattttaaccattatgcaataaatatctataggtgatatttagtcaactcaaagatatttttgtatgcaacgtaaaaaagcattattagataatatgtacctagagggctatatttaaataaagaaatgttttcattatgtaatatataaaattgacactacaatatgttacttacaggtttataaaaggttattttggtaatgtaacacgtgttccttttgtctgtgatactattcttatgctaagtactagtttataagtcttctaaagccacagtaacatgttaatgggaccaaggatcagcatcaatccaatcctagaaccctagattaaataaagatcaagtttcagggaaaaaa

SEQ ID NO: 89451 - DNA, 410 bp, Homo Sapiens
tctaagttcgtttattgagttacagtggtctttagtaaagtaaaacaattttcccaatcccaggccttgtgatttgagatggtaccttagaaaaagttacacgcaagttccgtggttgaatatatttgagatggtaccttagaaaaagtttcacgcagatccttggttgaatatagttgagggagcgtagtattgacaattcttcatgtaggaaacctgaaatgaacacagtcacagtttgattaaaacattgtcctgtttgttgcaacagaaaactcggatagttttaacaacaggaaacacttgtaggacttcctttaccaacatactttttaaatgttttgctattggttccatatttatttagatttataagtgtcaataaagcaaacttttgatgcctcaaaaaa

SEQ ID NO: 89452 - DNA, 456 bp, Homo Sapiens
aagtgagcctcacagaattgtggagatagtgactcttctatgctagtggttctctaagtgtggtcccagaccagcagcatcaacgtcacccggtacttactggaaatgcaagttctcagacctcacatctgatctactaaatcagaatctctggggatggtgtccagtaatctgttttaacaagcccagcaggtgatactagtgtatgttaaagtggaagcacctctggtctatgacttctgctggcatataaatcagccccaagatttgaggtgtccctgagaaaggatgttattaaatctgagtaaaagggaaattgtgactgaaaataaaaataaattatcctccacaatgggtgagcagtaaaatatactatactaatccctattcttactataattgatcattttgtttggttatgcatgagtaaaagaatgaataattattgttttcttt

SEQ ID NO: 89453 - DNA, 501 bp, Homo Sapiens
atgggaaagaaatacatacctgacctcaaagagcctacaataagttggtataaaagtatacagacacgcaaaatttacaaggcaattaaccacagttacatattgtagcaccagtgaattcaaagcactgaggtcaaatcaagagaagttgaagaaaaataaaaaagtacttgaagaagaaagtatttcagtgatgagatggatttcaaaaattgtgagggacaaagattagcaaacagaagaaaatgttttctagatagggaacaaaactgatgaaaagttatagattaaagtttaaagagtagatggggagggccatagccaagaggcaggaaggcatgaatcagcctttttgaatgactttgtataaatggtgaaatggaggaagtagaatagaatagagaagatattatctctgtctttaaaaagcatggagtctgattatgagatgcataactaagaaatgaaatagattttaaaagttaaaatttaaaagtaaag

SEQ ID NO: 89454 - DNA, 396 bp, Homo Sapiens
  misc_feature (110)..(167): n is a, c, g, or t
tctggggtcagaagctcaaaatcactttcctgggctgaaatcaaagtgccagctgggccagggtccctccaatggttgcaggagagaaagctttccttgtttttcaagcnnnnnnnnnnnnnnnnnnnnnnnnnnnnnnnnnnnnnnnnnnnnnnnnnnnnnnnnnnacagttcaacagcctcatcatcttctgtgcctctaccactctcctcagcaggcaggagtctccgagccagtgagaatgaggtagtcttgaggaaggacagcaccacacaggtattctaggatgatctacacaggcactcagtttcgcaactgcgccgcccccgcaggccgcccagaggggccggccggggcgctggggacgcggcggcacccggagctccgcggccgca

SEQ ID NO: 89455 - DNA, 403 bp, Homo Sapiens
agtctgacggtgacttgaccttggactttccagcttccagaaaagagagtggtagaggcacagaagatgatgaggctgttgaactgtggaggcatagattagagtgacgtggtcacaagccaaggaacacctgaagccaccaacagcttgaaaaacaaggaaagctttctctcctgcaaccattggagggaccctggcccagctggcactttgatttcagcccagtgaaagtgattttgagcttctgacccccagaactatgagaggaaaatttttgttgtttttatgctcccccagtttgtggtaatttgctactgcatctccaggaaactactgcactttgtactgaaacaaatgtaaaaatagattgtaaatataaaataaaccaaccataagagaaaaa

SEQ ID NO: 89456 - DNA, 290 bp, Homo Sapiens
ggctgggtgggccccggaggtcgtggctcgggagcagggaggcgtaggggggccggcctgctgtgatgacatttccaattaaagcacgtgttagactgctgacgcgggtgatgcgaactggagtctgagcctgcccgagcggagctgggagggggctggcgggcgggcgcgcgcacacccgctgatctatcactctcgttcttgtagctcccagccgaggacgtcggatgtcatcgtccttgctgctttgccaccccattcccaacaataaagtggtttgaacccaaaaa

SEQ ID NO: 89457 - DNA, 939 bp, Homo Sapiens; identical to SEQ ID NO: 15850
  misc_feature (113)..(197): n is a, c, g, or t
  misc_feature (238)..(263): n is a, c, g, or t

SEQ ID NO: 89458 - DNA, 638 bp, Homo Sapiens
gtgggctgggttctgaacaagggcgcctgtgtggatgtggaaaagtgtgcggcccaaaccgcctccctgcagcgctgcgcagttctgtaagaacgccaacggctcctacacgtgcgaagagtgtgactccagctgtgtgggctgcacaggggaaggcccaggaaactgtaaagagtgtatctctggctacgcgagggagcacggacagtgtgcagatgtggacgagtgctcactagcagaaaaaacctgtgtgaggaaaaacgaaaactgctacaatactccagggagctacgtctgtgtgtgtcctgacggcttcgaagaaacggaagatgcctgtgtgccgccggcagaggctgaagccacagaaggagaaagcccgacacagctgccctcccgcgaagacctgtaatgtgccggacttaccctttaaattattcagaaggatgtcccgtggaaaatgtggccctgaggatgccgtctcctgcagtggacagcggcggggagaggctgcctgctctctaacggttgattctcatttgtcccttaaacagctgcatttcttggttgttcttaaacagacttgtatattttgatacagttctttgtaataaaattgaccattgtaggatctcaggagg

SEQ ID NO: 89459 - DNA, 624 bp, Homo Sapiens
tatgagtgtgcatttctaggtggactaaaaccggacaactgtattgagaccctagaatattttcaacccatctatgtctacaacctgggtgagaaaaaccagaagcttgaagaccatagtgagaaaaactggaagcttgaagaccatggtgagaaaaaccagaagcttgaagaccatggtgtgaaaatccttgaacccacccaaatacctgctccaggtccagttcctgttccaggtcccaaaagccatccttctgcatcctcgggcaaactgctgcttccacagtttgggatggtcatcattttaatcagtgtttctgctataaatctctttgttgctctgtagtttgatgcattgtttatctttcttattctttacttgaaataactatagggatccacaggagatcaaaaggaatgatgtattttttacgtgttggccaaagtcactggataaaatgagaattgtatatttgttattcattttgcaaattcagaaagttggtccagatatatgtcacagaacttttcacttgtatactactcttacaatggaaaaaaatcccgaaaactgtatacttctgattaaattcaataaaagattttgattagatatttcaaaaaa

SEQ ID NO: 89460 - DNA, 388 bp, Homo Sapiens
ctttctagatggatttaatgtaattcaccaataaagcatcctcagaagtataataaaaattctacataaaatgacatagccagggaaaaggaagatatacagtttgatgaagattcaaaatggatgttagcattaaaaatgagcagtcatgcaattcctgtgtaatataaagatcaaaattgcagggcactaattttgcttctaatttataagatagtgtgtttatgggactacatttgtatttataaaaaattcaatggcaaatgctttgaactgtcatttttcttgagaaaaattgccattcaacatgttatatttataaatttcactgtatagcattgaaaatagctggactatatttatatatacaaaaatgttctggaaagat

SEQ ID NO: 89461 - DNA, 401 bp, Homo Sapiens
aaggatgcggtggaggccttgtataaggtccatgggatcgagtacatttttggcagcatcagcaccaccctctatgtggccagtgggatcaccgtcgactgggcctatgacagtggcatcaagtacgccttcagctttgagctccgggacactgggcagtatggcttcctgctgccggccacacagatcatccccacggcccaggagacgtggatggcgcttcggaccatcatggagcacaccctgaatcacccctactagcagcacgactgagggcaggaggctccatccttctccccaaggtctgtggctcctcccgaaacccaagttatgcatccccatccccatgccctcatcccgacctcttagaaaataaatacaagtttgaacaggcaaaaaaa

SEQ ID NO: 89462 - DNA, 625 bp, Homo Sapiens
  misc_feature (142)..(142): n is a, c, g, or t
gccaagaaaattactttggccattctttcaaatgttcttctggcaaagtctgggccaacaaaaaattatttgaatgcacttgttagcacaacaagaaaaatggaagtccagcaggagaagatgctaaagaattagccagcanatcaaaaggcctccagtggataatagatacaacgatagcttatcccaaagctgaacctatagatattcaaacctggatccttggatacaggaaaccaacagtcacacatgtcattacaggatctttccaattaaagatgtacccctggagactgatgaccttaccacttggctctatcagcggtttgttgaaaaagaagacctcttatcacatttttatgaaacaggagcttttccaccttccaagggccataaggaagctgtttccagggagatgaccctcagcaacttgtggatatttctcatacagtcttttgcatttttgtcaggctatatgtggtacaacatcattcagtatttttaccattgcctgttttaggaattgacgtggacttgtcaaggtcaccgtaggagttcagactttctttcataagtgtgcattattttacatgtgcaaatcagaatatatttaaaaaaaagcaaa

SEQ ID NO: 89463 - DNA, 291 bp, Homo Sapiens
aattctaatgttgagtttttaatgattattttaaatgtttatatagtttagtaaaatttgcatctcaaagtatcatttttatattatgggacgttttcagattggctaatatttgcattgtaaattttgtatgcagtttatctaaaattcaaaaatactgtcagtacaccagcgtttaacatctatattccaatttgtatacagtttaaaattgtactgcaaaactattgtgtgctcttacacagtatgcatcatattgttgtctgtgaaattaaaggacatttgatagtc

SEQ ID NO: 89464 - DNA, 447 bp, Homo Sapiens
gaaaaacgtatcgaagaccttcgtgtagctgccaaactttttgatgaagaaggaaggaaaaaattcttaacacaggatatgaataatattcttcttgacattgagttacagctacaagaactaggccctgtcatccgcagtggtgtctactcccaccttgaagcttttgtgccatgcaataaagaaacactagtaaaacgtctgaagaagttacatctcaatgtccaggatgatcgtttaagagaacctctccaaaaactgaaactggctgttagcaatgtcatgcctgaacagctatttaaataccaggaggactgccaggctcgtagtcaagctaagtgtgccaaattgcagacagatgaagaacgagaaaaaaatggatctgaagaagatgatgtggaatgagaaacaaatgttaacataataaaatctcagttaaaaatattt

SEQ ID NO: 89465 - DNA, 801 bp, Homo Sapiens
  misc_feature (188)..(188): n is a, c, g, or t
  misc_feature (677)..(686): n is a, c, g, or t
  misc_feature (709)..(735): n is a, c, g, or t
tcacacttccaacctgtccccagtcctgcccggatctttaatgggaggggttccccactctgacagtcttgtaaaatcctgagaatgtctgaggggatcagatggtagctagttcagggctgaggatgggacagtgttgatgttacttttcccccacatctggctttttgcaacctcctccctctccntaccccttgattttggtgtgacaaaaagatacctcatttatggggaaattgaggaagatacatatacaagcaccccaacccatatttaacatatgtggcaataactcccttcccattcttccccctccaattttcaaatagtagttttttaaaaaaattaaagacatgtcactcacaggggaagatggcatcttcaatttcctcaaaattactgagtccagccctgcccaagggttgtgggaagaagggggatgagaggccagcagggcaagcccttcactgcctccacatcaaatgcggcagaaacctgcctgcatgaacaaagaacacctaagggattttagggggcaaagcttggtgccctgtaaaatttacttcctgatggacaggcctggagccaggggggcctctttaccagttctgtttgtccccctttctcttaccagaacccctttggctatcacccctaatatgggaaagtaagaaatnnnnnnnnnngacaagaaatcaacatatttatnnnnnnnnnnnnnnnnnnnnnnnnnnngaccgcgtatgcggccgcaagcttattccctttagttgagggttaattttagctaggcactggccg

SEQ ID NO: 89466 - DNA, 1725 bp, Homo Sapiens
  misc_feature (103)..(103): n is a, c, g, or t
  misc_feature (166)..(166): n is a, c, g, or t
  misc_feature (213)..(213): n is a, c, g, or t
  misc_feature (630)..(630): n is a, c, g, or t
gccgctcttggtgtcccccgatcagtagacctgtttatcttgtgcgaggaaaaacaggtgggtggtctgctgcagtggaaagcgccgtagatcaaccggacgncggggggaagatactttccccccgccggggtctttcggtacgcgccatacagcacgtgtgggncgcccatattagtggcggcgcgcagcggttcttcttgtcttatacanccccccggatatctgttttcgcccggtacgagcggcgggcgcagagagaaatttatgcgttagcggcgcggaaaagggggcgccaaaaacaacaggggggggatgatcaagcggcagcgcccccgccggcttgtgcggtgcggggtgatttataaaaggggggggtggcacgcggcggcaaagagcgagcgcccaaccttatgtagggtgggggaccgtgagcgtttttccgccccgtccattattgttgccaccggggggcgatcgggagaaagaagtcgctgcactcgtgtatcaaggggtgggtgcgaggatttttgcccgcgctatacccgcacggtttatttttgtgtcgccggcgacaggggtacctcgctcgacacacaccagacgatcgcaggcggcgggcacttaatnaatttctggtagaactatatcgcgagagatcgtgcggcctctcgggaccgtttctcctgcgccggggcggagaatgtcccgcgacgaacggcacctcctccagggacttcccgcgttcgggggtattgtgtttccgagaccacggttatcgttgtgcccgccgggggcgtcttttttttggtgtgcgggaattcccaggcccttgattccggtgccgcgggttttccctcgggaacccgcgttaggaccctgttccgctttcccaccgggggccgcccggcccaaatgaacggttttgaaaagtttttgaggggcggagggcgcgcgaccaatacttactacggccggtgcgtgtctcgctcgttgtcggctttcgcggcggttccctttgtttggcgggtacatctatcatgtaatttaatctgcttttttgtatattagctttgacatatagaatcgggtatctcaggatccctaatatataaaagacccgcataagaaaaaaacatttgatgatatgcataaaatcacaaccacaataattggaccataattagactagttaagagatgaggaatatatgctcatttgtaagcgataagtgattatataaagagaaaacatgggttaagtaacacagtaacattaatttttgtatataaacaaattagttatctcaagtccttaaaagtttacatttaaaaaaacaggtcaagatgaagaaataactttgtagtttaaacttccacatgtgctcctttgggtggttttgccttggattttgcttcctttgaaatctttccattttgacattgagtaaatctggctactgtagaaacaccatccacaaacttggttttgaaaagaacgtttgcattggtgaacataccttcttttagtgacaccacaatgaactgagaatgtgtgaaatgagtacgcagcatctgtccaatgttttgtgtatgagaaagatccaaggctgcatctacctcatcaaggatatatatcggagcaggcttgaagagaagcatggacaggtattaatgacaaggccgactaagacctctgaccaccactaaagtcagttaggttatc

SEQ ID NO: 89467 - DNA, 659 bp, Homo Sapiens
atgtgagattttattagaaagaggattcgactgctaacagttgaggctccccaggctcacccaaagacccctccctcgtcccagcaggaactcctgctgctgctagggcctggcccggccatcaccgtgtgcaccctcttgaggagggggacacactgcccgtgttcaaggggctgctcggaggaggcaaacccagccttttgcgattatggcttgtggggaatccagacctcgaaaccccacggggagggaagggtctggttgtcaaggtgggtccctttgatgtgaggtgccatcctctgagcccaggtctgacccccctacccagacccgtaagtggggagaggcctgaacaaagcaaggacccctcatcaggggagacaccaggtgcagaactgcccaggagacagcacagggacaatcagaccaccctcctcgagtaccctacgtggggggagggctgaacaaagcagggaggcccacggttagacaccaggcagaactgcccaggagagacacagggacaatcagaccagcgtcctcgaggttagcctgaggcgggtgggcacggccgacgatccacccggtggttcctgtttgtcccaccacttaactgggagacactgttttattaaaacacaccgtggcttccttcaaaa

SEQ ID NO: 89468 - DNA, 497 bp, Homo Sapiens
gaaaagaaccgtgtaacgctgcagaagtgtgtggtagctatgccggaggtgtcatctaaaggtgctaccatttccaagaagggctttaagaaagctgtcgttaagaccccagaaaaaggaaggcaaaaagcgcaagaggacccgtaaggagagttattctatttacatctacaaagtgctaaagcaggtccatccggacactggcatctcttcgaaagctatgagcattatgaattccttcgtcactgatatctttgagcgtatagcgagcgaggcatcacgtttggctcactacagcaagcgctccaccatttcttccagagagattcagacagcagtgcgcttgctactgccgggagagctggctaaacatgctgtgtctgagggcaccaaggctgtcactaagtacaccagctccaagtaagcctgctaagtaaacgtcatttctaacccaaaggctcttttcagagccacttaaacatactgaaacagcaaaa

SEQ ID NO: 89469 - DNA, 377 bp, Homo Sapiens
tttaatagaagaatccttctgcaaagagaataatttgcatttggtttgcagatttggattttctgaattatagtatattgggttttcttaattacgtctgtgatttaaactactgtgtctctagtgacagtgtcctaaattcccacagatggcatttacactgtgtgaacacggactctgtggtacctagaaagaaagtaacaagcagcatctcttcagcacctccgtaccggtcactgctcgagcgatcacatacactatttcattgactcttcacaaaaattctgccacacgggttgtgttgtcccatgaggtgcaagctgttacataaagaaactgaggtgcaagctgttaaatacgggaagggagagaaatga

SEQ ID NO: 89470 - DNA, 465 bp, Homo Sapiens
tgcctccgccccctcctttgtggcggcggcggcggcttcccgcattctgcagaaaaagctcgcaggtggaaggaagcagggcccctgcggatggcctagagcccgagtgaagcggttgggtgcgactttcgcatctgaaaccctgcacgtcttctccccagaccggaaccacctaaactcccttttgctccaccatcaatttcaccgagatggacaggagtggtgccttttaagactgcacagtacacaagccttgatgcagctgaccgttaaactgtcactggagtctggggaaggatagggttttggtgaaaatcccacttatacttcatgttaggattccctttttgatatttatccacaactggtacgcccactattaagcatcttagcccttccccctacccccaatttgtgtgtacttggaaaataagaagtattagaatatctcctggatgttaaaaa

SEQ ID NO: 89471 - DNA, 499 bp, Homo Sapiens
ttccattgagccgggaccagccagatccaaaacaaggagccaggagagacacctcaactatgttctccttcaccccttcagtctgttgccggtgcttgcctttggctgagctctactgaaaaccagaagacaagaaagttcagcttgatgtactggatggtccaaacctggcttctaggctgtggagcaggttggagaaaacgtagggaagattagggtgggagaaggaagctattcagcataaagagagatctccatactcagcatttcactgccttcttacttgaggtccagtttttgcattttcagttgcctacccagcccttcagcttgaatgtcccacatcagattcaagatgtccaaacttcctcaccaagctattaatagctgttttcccagagtcccttgattttatcagtggcatcatagttcttcttacaatcatttggactctggttcattatatctcattatttataaaatctttagttacctaaaa

SEQ ID NO: 89472 - DNA, 399 bp, Homo Sapiens
aattcaataaaatattgtatgaaaagacaagaccaaacaagacaaattaaatgcaaaactggtcagttatacctaaaaaaccagggagtaggtggtcggggtgggggaaataaaactatgccagcctttcttttctgtcttgagtagggctaaaatggggctccgatcaggttggcaggaattatcccttcaaataagagatagtaggagtcaaggaggcagagaaagaattctacattttcaggttcactccaaaactctggcttgggtaagcttttccagtttgagctgctaagctgctcttggaaagagctgtctagttctgcctattctgatcaaggtcttgaaagcataagtgaaaagtgctggcacaagtttatcccagtccagggcctgact

SEQ ID NO: 89473 - DNA, 512 bp, Homo Sapiens
cagtgggagccgcgtccgccgcatccgcctcgactcggtgccggcccctggccctcccctcatgactgcggcgcctctgctgccaccgcccgcccggccgccgctcgccgcaggatggatgcggaccgtgcggcgctaacccccgtggctcagctcccgaatcgcccgccttcgagccctcctcgtgagccgcagcagcctcggtgccagcccccgccgcagctgggcccagcggtccgcctgtccctcgttgcggcttgtcggtgctgagtgaggcgtcgtccgggtcggcgcgaacccgcccggccgcggtgccctgcagacctctgcgcgggcggctcggcccttcacgcccttttcgttcacgaatccgagcccgctcgcctctctccagcgaaccgaccatgtctggcggcgccgcagagaagcagagcagcactcccggttccctgttcctctcgccgccggctcctgcccccaagaatggctccagctcaaattcctccgtgggg

SEQ ID NO: 89474 - DNA, 467 bp, Homo Sapiens
  misc_feature (17)..(17): n is a, c, g, or t
ttagggtgctgcccggnacttatcagtcgccaggcctgccgcaagagctatctatccccacagcctttacccagccttctcagtggcaccttgttggggaccgtgagctggtgggtccctgccttcctccccaggcctcaccctgagctcttgggtgtgaaaggcctggtgggctcagactccacccaggaccagggagcttcctgtggaaaaaacctaggcaggcaggttccctgtgcacgtggtacaggattggctgggctaaggtgccaacagagatcaggagaggctggacagtaaggatgttccctccatatacctgagtctggctggtcttccacattcagggccctggctccctgctccatggcgtgcttgtgattgagagtccacttgtctggcctgtagcttcccctttcccatcagccgcatcattacttactcaagataactagttaagtaaaaaa

SEQ ID NO: 89475 - DNA, 397 bp, Homo Sapiens
ttttcagaacctgaagtgggacatggggagtgaactcgatcttgctcttttgcaaattcaacgactaaagtatgacctaaaagtttcagttgatggagtcttgtcaatgcctttatagctgctttttcattagggaatgtggcaaaagctgtatgtttcagtcgccccttatctgacaggacccgcacagactgagccccgaagtacttcagcaagtcctctttctcctcagcagtaagctcagccggcaggtgcctgaccagaagggttcggtcgccccgaggcggggaaagcgaggaggagctcgtgcatccccttgatatcgcaagcggctgctcgggagctgccattttccttggagaagcaaaaacagaaatcgtgggaagaagtctcagtc

SEQ ID NO: 89476 - DNA, 476 bp, Homo Sapiens
  misc_feature (23)..(23): n is a, c, g, or t
ggatccgaggcaagcgttgtgtnctgtgcgcctcaggtacgtgttgggcggcagtgggcgcggactcggtgcggtctctcgcgggctgcggtcgggcccgggatcctgctcctggccgagtcgcggtgcgcgggctgctggggtccggcagggctggaggcggaccgcgaggaagcggcgcggccgggaagatggggcagggtcgcctcggccccggggcctcggtttcctccgatcacagcgcctcagggggcgcgcacgggcgctgcggagacctgtgtcctgccggggcgcggcgctaggggcccctgctcgggtttttattcccagacctaagcttacaggtgcgtggtcccagaaagtgagtaggaaagcgcccaccacgcgccaggcgcttaagctttctgtgctcggtttcccagtataggaggacggtcacggtacgtagtatagagttgtcctgaaggtgaagcgag

SEQ ID NO: 89477 - DNA, 422 bp, Homo Sapiens
ctcctttcttgctgctacgcctcaactatttcattgcttgtcaatgctcagcaaggaagacagcctaacagcagccctcccacctgtgaattcctcactgattaaaatctggttacaaaacaagggacctagagagatgttcacttcaccacttctctacagatgcctcctgctgcttccaacttttctcctttaaggcagggtgaatccaaatcatggtcttagccctgaaggaggcaccaaagcagtttcgttgccctgtgaaaagcttctagaggagctcatctgaatgcttgaagaaaccagccgcccttgcaattacctaaaaggaattgagtcattttaacaagacattatttctgccatccacggtcacaatcatctctttgaaaaataaatactcttggtatgttgatttaaaa

SEQ ID NO: 89478 - DNA, 1665 bp, Homo Sapiens
  misc_feature (59)..(59): n is a, c, g, or t
  misc_feature (66)..(100): n is a, c, g, or t
  misc_feature (1503)..(1513): n is a, c, g, or t
tcaatggggccgcctgtcagagccgaacgacgagcgccagcgagtagtgagcgaggaangcggcgnnnnnnnnnnnnnnnnnnnnnnnnnnnnnnnnnnncagtcgacggtaccggacatatgcccgggaattcggccattacggccggggctccaagctgccttttagactgaatagcttttctgttagccctactttaacatttctttgaagtggtgtctgcttgaagagggaaacacgtcatgaaactgtaatgcatgaacagaactcaggagttgtctggccagcttagtgctgccactggtgacatgccaacttaccagatccgagctcctactgctgctttgccacagggagtggtgatggctgcatcgcccggaagttgcacagtccccagcagctggcagaagaagcaacacgcaaacgagagctgaggctaatgaaaaacagggaagctgcccgggagtgtcgcaggaagaagaaagaatatgtcaaatgtcttgaaaatcgtgtggctgtgcttgaaaaccaaaacaagactctcattgaggaactcaaggccctcaaagatctttattgccataaagtagagtaactgtctttgacttggaccttgtttactctaatcaaggcaggagatgcagcagtcctacttattgccatgtggacttgtgggaaggacacgtgtgacccttaagaatccagttgtggattagtgtttgaaattgaatttgggaatgttgttccaggatgtggaatgcagccgtgatcacacttaccgagcttactttgatctgtttgtcaatagcatgcaaaaaatgcttgtttgccctttgcttctgctttttaacagggaagctgccaaagaatgtcgacgtcgaaagaaagaatatgtaaaatgtctggagagccgagttgcagtgctggaagtccagaacaagaagcttatagaggaacttgaaaccttgaaagacatttgttctcccaaaacagattactagaaatatttaactatgaactgaaggcagcatgtatagttgcttttgaaggaatacaatatatagctggcaagaatggtggcttcttttctttgtatcattcatcttcttctttaatcacttaacattcctaaaatgcttcactgtacgtagttaagtcgtagctataacttcaaattttttaaaagagacaaactgtaaaaaatgtgtgtattcttaaaatgcaatatttgtaaggcttgttccaatgccacatacttgcagctcccattctatgtgtcatcaatagtgtcctatgcaataaaattatttgcaggtctttaaatcattttaggaaaggatgatcaaaaataatgcatccagcagtacaataaaagtaaaccacaaaaaaatacctcaggaaagaatagaaagaaagtctatctaatgacatgcctatatgagaagaatagcctagatatgaatatatggcatttgcagatttttatattagttgctttgttnnnnnnnnnnngattgtattgctgtccttgaatgccatagtcaaagagagtttttaatagaaccatgttggttgcactttgtagtgtttggtgctcatttaaatatctgaacatttaatacagatataaactctactgtgtaatgttaatgttcttgcagaaa

SEQ ID NO: 89479 - DNA, 1326 bp, Homo Sapiens
ctagcaccagggtgagggcagaagcatcgagcagcagctccaggagctccaggagggagaggacggaggccccaaaccacaggctgcagaggctgcccatggccgagagcagctgcggcaccgagtacacgggcgcctcctccactgagcggtagttgagctcctggtagacgatgttgattttggccaggctgctcctctgtctgtggctctgatgcggcagcccctgttcacctagcgtggccagagtccatccagctgacttggcggaaggccacctggaggtcccagtggagagcttgaatgcagactccctgcagggcctggggcagcgggaggtaccaggggagccggtgggtctccaggtcctggtagaggcggtagaagcagtgtccccaggcagggtgccgggcagagctgcagtactcagccccccgccggcagagggtggaggtagtagccacaggagcaggtctccaccatcagctgctggaagcaggacaccaggcaggcctggtgtaggaggtgtgtgtagcagctccacctccacgccttccccgccggcggtgcagtggccgtaggggctcccgagcccgtgcacctcgtcccctcggatgctgatggtggcctccgtccctgaccggacgctgaagctgtggtgccccaggaagggcgtgtggttacggccgtgaaccatgaccctgatgccggccagcgtggacagcagagggaggtgaggctgctgctcaaccctgaggaccaggccgactccgtgggtgatgccggggcgctgagctgtccagacgccatcgaccgtgtagcagctgccgtaggtggggtggtggaaggtccggaactgtcgggcctggcagtccaggccatcgtaactgcaggagaggacgaagtggccgtcctggctcccgtggctgtcctcccatgccgcgggcagcagggccaggatatccacatagtggaagtggtaccagtcctggacagccgccacgcctgacgtgtagcctcggtaaaagcagtcgccgcccgtgctgttgcacagtctgaaccccactctgacccggctgcccgagtggctcagcctctgcagacggatctcccggtccaggtggaaggggggctcgtggcgggggacagtggcggagagggcggctctgcctttgctgaggttgacgttgtacagggagtcaatgttctccctggcaaactcgtccagcagctccagatggcggaggaccggactcggccgacgtgggttcccgtcacacagggtgaccagcgggagcagcttgcgatcccgggaattccggaccg

SEQ ID NO: 89480 - DNA, 444 bp, Homo Sapiens
tgttgcagtaacatatgaccccatcacttcaatggctttcaacaacacatccattgagggttggctgtgggctatgctccacttcttcatggtgagacccacgctgtagagcacctggcctctgagacgttactgttttcatggcagaaggaaacatgagaatggtgaagccataaaatggcgcttaaagcttttcctcctaggtggcacaggtgacttgagctctcatttcattggccaaagcagataatacagctagatgtcaacagctcaagaatatatcatcctacaggcagcaacagcaaacaaaacactcagtgatgaataggttgtagcatttatcagaatgcaggtgactaccaaaaaagatgtggaaaatatttctaacccttccattttcccagacatgtgattactattaaattgtgagtaaatcttcaaaaa

SEQ ID NO: 89481 - DNA, 407 bp, Homo Sapiens
aaacaaagaattgagtgtgaccaccaggcaacatctggcaaggaactgagttccaacagtgcacaaggaagtgaatcctgacaacagtcccaagagcttaggagtgaatccttctccactccagcctcagataagtcttgcccttaattgcagcctcatgaaagactctgaaaccttgggcccaggtaacccatgccaagattcctgacctgcagaaactgtgggtcatcaagcatgttctttcaagtctctacatgtgtagtaatttgttatgcagctttagataaccaagagatggaacaattggaactgccctacagttacggtggggcataaaatgacacaagcattttggaaaacagttgggcagtttcttataaaattaaacagacactaaccctaaaaaa

SEQ ID NO: 89482 - DNA, 711 bp, Homo Sapiens
  misc_feature (701)..(701): n is a, c, g, or t
ctactgctgaaatttctttctcaggtatcattgacaattcataaacaaacaaaatggccttagactacagtagttaaaagaatgatttttgtttgtatctaactactttttgttagccttgcccaacaatcaaatggccttttaccaaggtcatggtccctagaaagaaggctacaaaggaaggctgtgtgtcaactaggtgtgttctaaacatcatttttccagttggaggaatgctgagtttggagatggctgataaatgtgtcatctggataacattctgagattgatataggaatgccttcttttgcttctttagctgccttgaccaatgtagtgatgctgacagaggctataaaaaatgtggctctccaatcttgggcactttatgtaaccttgctcctgggaggccgagcacatattcagcaggaaggaacttgctggctcagttaccatgattcatgccaacaaatcaaagaatgctgctaatgaatcacaaaaggtggagaatgctaaacagcaatgcttctgtcactctgttgtggctattaatcaagatgatgcattgctaagacagctgcctgggtatgacaggaagcaaattgctgtgtctgcctgtcagaagtttatttgctactttgagtatatggaacatgaatgtcaactgaatgtatttaaagaaagtgcaaattaaaattatngatcttcaaa

SEQ ID NO: 89483 - DNA, 262 bp, Homo Sapiens
ctaaagtatggagcggattattccaaagttatttaaaagggggttttgaggtttattaactaggagctagttgaatacctcatgtacgaagagaaagaagagcttcctgcaccaccatgcagatgacgggtcatgaaccagcactcctcttcccagtgggctagcagagatcatggctcacagcagaaattcactaaatatctggaaaatttaagtagacgtttttgatcaggaaagtgaagtgttgaaaagtagctttggg

SEQ ID NO: 89484 - DNA, 665 bp, Homo Sapiens
aaccctttatttgccagcctgtctgtgtcgttggccttatgacgaggagtgcctgtgggttatcctaatcgttgtcttggtcactcttggttgggcctggttgactttgccagtcagctcctacagtgatcagttggccacctctagatctgtgtttgccggtctagacgttatcggtgcacttccttgaagtgccaggttgcagcgatcccagagcgttgataacgtgatctgatccctaagttgagacctgtcttcctgtaacgcttccgaataagaggtccggtcgaaaagagttgaaagatacgaaattaggtggtcgttggaatcctgatcgcagtaaagtggtccttggtaactgctcgagtagaacatgtctgcatccgccaatagtccgctaatagggagggctgtgcgattaaaggcttccatcgattgggtagtgtccttcaagtgggtggcgaagagccagtcgggcatatgtcatgaaggtttctccgaccgattaatggtttgctgcttgactagcctagggaaataataataaaggtaaagtaaacttttttaatgacatatggggcacaaaataactggtgtcttgtaaatgttctgtttttttaaataaaacttctctactttagtctttactttaaaaatatgggctg

SEQ ID NO: 89485 - DNA, 632 bp, Homo Sapiens
  misc_feature (83)..(83): n is a, c, g, or t
gatgcaagacagggtatatgtgagcagtcactttatggtcacatgcattctatcaatgatgccatttttgatccagggcacanaggccttcatgaaatgatggtgccatgctctgggacttcccagcctccagaactggtcacatgatagcatcctgtgatgcctgtggggttacaaagctgtgggactttcggaagctgttaccaattgtgtccatcgatataggtccaagtcctggcaatgaggtgaattttgattcatcaggtcgagttttagctcaggcaagtggcaatggtgttatccatttgctagatcttaaatctggggagattcacaaattgatgggccacgaaaacgaggcacacacggttgtgttttctcacgacggggagattctcttttctggaggctctgacggcacagttcgaacgtggtcttgaccgtcagcacatcccgctgcagagggcattccctttaaggcttgaaaatgcctcctgtagtcccaaaccagcaaagaactggttaaatgtgccagcaggtaacatttacagtctgctttaaaacatgctttggacatatattttagtgctcatactgttactaataaaaaaataactttatgctcaaaaaaa

SEQ ID NO: 89486 - DNA, 659 bp, Homo Sapiens
  misc_feature (242)..(251): n is a, c, g, or t
  misc_feature (590)..(599): n is a, c, g, or t
aaaccggcaagccaccaccaaataagactctatttatttatttatgtattactgcatctctacctcagctgttctacagtggctcagaagaggctctgaagcaattccgatgtttaaccattccccttgataaatcaaatcacaaggacaggtaatggcttcctagagaggctgactttggaaagaagagaagcatgagcagtaaagtattgataaagtgatactcttgtaaattgctagtnnnnnnnnnngatgatatatgtatctgcaaaatccaaggaagttgcaatttgaaataaaaaattcttgaacagcaaaattgaagacaaaagaaccaaagaccctatttcagggtagactgaatcaagtcttcttgcactcactaaagaaaagacttgcagccatatgaagacaacagcaaagtgaccctgaccattttcttgtagtgacacctccgcatagtgacagatgggctcccagaggagtggattggcaggtcttgccagcacactgtgagttgatcacaagaggaaatcaggcctcacacctgtgctgaaccgagttccaggcacttctctaggtcctgtggnnnnnnnnnngtcatttgaatttctcttcctatagacaataaaggttattaaaaaaaatttctttcaaaa

SEQ ID NO: 89487 - DNA, 524 bp, Homo Sapiens
ctaccaccaagttaatgaaggaaaaaaactgacccaaaaatatatatctttacagcagtcaacttgtacacaaaacttaaaaataagtttcagcttgcagataatgtgaaaactgaatgcggggtagttttgtaaggaaactatacactgcaaaatggctatttggaaactgtaaacattaagcttgattcagaaacccctaaatttccatgtggggtaattgtaaatgtcagatcatcactgggagttttcctcatggacgtctgtgctgctgccgctgcgcacacagtgctctctccacatggactcactggatttggtgcatgctctatagaaagcaaggctactaataaaaggtctgagagtacgagtatgggtaggtagcatgaccactgaaagccaacaaaattcaaagttacagctgtctgttctcaacccttcaggccttgggacctagagttcccattcaggggcattctatcagacaactaggaggaatttcagccataacaattaaatttcta

SEQ ID NO: 89488 - DNA, 469 bp, Homo Sapiens
gactctctcctggagtccagagcaccttggaaccaagtacagcgaagcccactgagttcagttggccggggacacagaagcagcaagaggcacccgtagaagaggtggggcaggcagaggaacccgacagactcaggctccagcagcttccctggagcagtcctctccatccctgggacagacagcaggacaccgaggtctgtgacagcgggtgccttttggaacgccgccatcctcctgccctccagccgtggcgccacctcccgggtttctcagactgcctggagtggattcttcgcgttggttttgccgcgttctctgtactctgggcgtgctgttcacggatctgtggagctaagcagccttagatagcagcagaaggctttttggattctcctccttgaaaagattctcagttaccaaacgtctccacctagaaaataaaaatacattaagatgtgctttcaaa

SEQ ID NO: 89489 - DNA, 643 bp, Homo Sapiens
atagcaggtatgtcctcaagtgacaaattgaccagatgggaagtgcttggtgtacagggagcattgctgagtcattttatacagccagtttacatcagcagtatacttattggtgatgggaattgcagtgataccagaggcttagaaatcgctataaagcaacgtgttgatgatgcactcacttcaaaacttccaatgttttacttagtcaacagacctcatattagtttagtaccctctgcatatccccttcaaatgaacttggaatataaatttctgagtctgaattgggcacaaggagatgtttctttggagattgtggatggcctgagtgggaagatcactgaaagttccccatttaaaagtggtatgtcaatggcaagtcggctttgtaaggctgcaatgttaagtcggtttaacctgcttgccaaagaagctaaaaaagaattacttgaagctggtacatatcatgcagctaagtgtatgtctgcctcctatcaagaagctaaatgtaagttgaaatcctacttacaacaacatggctatggatcctggattgtgaaatctccctgcatagagcaatttaacatgtgaaataggcaatccattatcacattaaaaatcttgttttgtttggaaaaaa

SEQ ID NO: 89490 - DNA, 462 bp, Homo Sapiens
tgaacgtgggtactggtgatgtgatagttcatgttaatgctcataaaggtccaccaacatacaagacagctcccagaattagtcctgcctgcctccgtccactctctagatctattcactaaattcagtatcatcagaggcaggagatgatagggagaacaagcaggacaagagttcttaaatacggagatgaacagagaattcaaagacgaacaaacatttgagaaaagccaacaccgtgagaggccccaaactcggtgtattactcaaagagttagtagacaaaaaatatttcaaggagacttttaatatattatctaggggattttctttaacagaaaaacttaaggatatctagtcctcagtattgccagaaatgcatgctgctgagtcattctacaccattcagagctggttaccacttttagaagcaagctagtattatagtgtgatgctgtaaaa

SEQ ID NO: 89491 - DNA, 433 bp, Homo Sapiens
tcactccaacgggtgacctccactgggcagcctgcctcaggaatgcctctcctctcatccttcttcaggcacagaggcccgccctccatacaacttccagaaagacagctctgcacacctaaagaacctccacagacccctgcatcaggacaacagcctctcctggcactcaggaccagcctcctcctagctgcctgcaaattgtcacagaacacacctgtcggctctgaccccatgccttcactcttgctgtcctctctgctcagagcaccctcccaccacccctgcctgccagtgccagccacgcacgttggatgacagctgaccccctctgcaaccaaaaccttccaaaccatggccaagcagatggctcccttctctctcccatcccccatgactgtaaggacctcaaatacacagattgatcaagtgt

SEQ ID NO: 89492 - DNA, 894 bp, Homo Sapiens
cgcagtgctgcccctttctatgggcagggccgaaggtccgcgtgtaaaagtacccagtccctggtaacctgacacttcccttttaaaagccaccttttgtctatctctggcctgccacgattcttcctgtgctccataggaggacccattggacccccgggctggctgcagggcccacacctgggttagacctcgcacagggacgctgctgccactgtaataaagcgtgcctacacgcttctgaaactggtgtaggaacaacctcagttctgtgaaaggcggacgcagcaggacagaatctccgtggacatctgtctggaggagcaattttactgcgacattttaaagaaacaaatttaattgatttccaaggctagagtgtgacagaaatctaaaagatcaacttcatcgtgcaggaaggagcatagaaaaatagagaaaagaagaaaacagcaaaccattctgagtaccgtggaaacaaactaaaagtgggcttagaaggaaaacagaggaagaaggtctgagtagtcccagggacgccagaggccaagatgggaaagccacccaggcgagacaggggagatggaagccacagggaatcactatcacatacctctgctggacctgaatggtcctggcgccagctagagccatctggtcgaccttagacatgtcaaggcaggagccatctgatcgaccttagacttggcaagctggtggctaagtccagtgctcactgccgacatctgtctcaaaataaacaaaaagtccaacagtgaatatttaacaataacaaaaatataataccaaacaatattaaagaccaataaataagtgggagtgaacaaaggtaaaaggtaactaatatcacaattaaaatattctgctatcaaa

SEQ ID NO: 89493 - DNA, 464 bp, Homo Sapiens
tttggttacacttcacccttggaaatcaattaaatttgtttctttaaaatgtcgcagtaaaattgctcctccagacagatgtccacggagattctgtcctgctgcgtccgcctttcacagaactgaggttgttcctacaccagtttcagaagcgtgtaggcacgctttattacagtggcagcagcgtccctgtgcgaggtctaacccaggtgtgggccctgcagccagcccgggggtccaatgggtcctcctggtctgcgagaaatcaaactttgggcacaagtcatgaagccgacaagcccgggagacacagtgtcagaattacaaggtgagatcagccgcccggccaagctatcttctcgctagcaggtgaggcccgtgaacagccaagctccccttggcacggcggaaccgcagtggacgcgtggaggggctccgtagaggagggacctttgcttgggatg

SEQ ID NO: 89494 - DNA, 672 bp, Homo Sapiens
aggcatgctgcagcctataccactcaccctagcactttggtgcacagggtccctgtcagtgttgggcccagcctcctcacttctgccagcgtggccccggctcagtaccaacacaagtttgccacccaatcctacattgggtcttcccgaggctcaacaatttacactggatacccgctgagtcctaccaagatcagccagtattcctacttatagttggtgagcatgagggaggaggaatcatggctaccttctcctggccctgcgttcttaatattgggctatggagagatcctcctttaccctcttgaaatttcttagccagcaacttgttctgcaggggcccactgaagcagaaggtttttctctgggggaacctgtctcagtgttgactgcattgttgtagtcttctcaaagtttgccctatttttaaattcattatttttgtgacagtaattttggtacttggaagagttcagatgcccatcttctgcagttaccaaggaagagagattgttctgaagttaccctctgaaaaatattttgtctctctgacttgatttctataaatgcttttaaaaacaagtgaagcccctctttatttcattttgtgttattgtgattgctggtcaggaaaaatgctgatagaaggagttgaaatctgatgacaaa

SEQ ID NO: 89495 - DNA, 634 bp, Homo Sapiens
gacgaaacccatgaagtgggaagcgaggaagaggaaataccattcaggtgtttcatatgtcgccaggccttccaaaaacccagtcgtcaccaagtgcaggcattatttctgcgagagctgcgcgctggagcacttccgggccaccccgcgctgctacatctgtgaccagccaaccggcggcatctttaaccccgccaaagaactgatggcgaaactgcaaaagcttcaggctgcagaaggaaaaaagagataagaaagactcaagtctgtatgtacactggggagaagcagcctgttgagtaagatgagagagatgacagtcttcctgcaatcccatgcctgagtatgtaaccaaaagaattgaaatccggatctcaaagaggtatgtgcactcccatgttcactgcagaattatttgcaaaagccaagaggtgtaaacaacccaagtgtccatggatggatgaatggacaaacaaaatgcgatacacacacacaatggaatgctattaagccttaacgggaaggaaatccttttaaagatttaaactgatccttttaaggatcacatgctacaactagaatgaaccttgaagacgacactgctaagtgaaataaactagtcacaaaatgaaaa

SEQ ID NO: 89496 - DNA, 374 bp, Homo Sapiens
ccctccggaagggaaaggctacggggcatgtgcctcatcacaccatccatcctggaggcacaaggcctggctggctgcgagctcaggaggccgcctgaggactgcacaccgggcccacacctctcctgcccctccctcctgagtcctgggggtgggaggatttgagggagctcactgcctacctggcctggggctgtctgcccacacagcatgtgcgctctccctgagtgcctgtgtagctggggatggggagttcctaggggcagatgaaggacaagacccactggagtggggttctttgagtgggggaggcagggacgagggaaggaaagtaactcctgactctccaataaaaacctggccaacctgtgaaa

SEQ ID NO: 89497 - DNA, 739 bp, Homo Sapiens
aacatcactaatatatttaaatccctctctactcctcccagcccattttaagcctgtatcttctttggtccttgtgcaagtttcctacttcttcttctccttgcttccagtattacacctctctaatctattcttcgaatcatcaccaataatctttctgaaaagcaaatctgatcagtatctctctttcttacaattcctatgtgtctccccatactcaccatagggtaaaatataacttcattatatgggttccagcaggaatcaatgatatactcaaactgggataatttgataaagagaatatttacaaaggtgtggacagggtgtaggggtgctatcataaagacgtgtgtagaaccagcataaaatgtgctccattagcattcctaggctttagggagctaaggaagagagtggttgccagaaactggagatgcggaaactggagatggagagggctgtttcttgttctcagactacttttagactatataccctttcttgaaactcattcacttgtcttaattctcctcctacttccttgacctctattttgctatataatcttcatattctctgctgtggtcccaacatactggtaactttcaaatccatatttccctcaagtttctctcttcttagctctagtttcctatattcaattatcttaatataaatatatggatatcccacaggcttttcacactcagcatgtccataacagagctcatcatct

SEQ ID NO: 89498 - DNA, 461 bp, Homo Sapiens
cccagagcccgtgggaataagccattctcatcctcacctgattatgtgattgagtcctgggaccagtggggccagtgaccaacctcacagcatatgactgtccacccaccagtctctgctgccttctgagagccacagcaaccctgggggaaaggcaaactcatcaccctggggcccagagacctttgccttgtctgttttggatgggcagctggtcatcctctcaagcatagtgcggtatcagaaagaaaagtgaagtgataaagaatttatttcccaggtaaaatcaccaggcttctggctacatgtcaatatatttcaaaatccaaactaactcattggaagggtgggggaaaagagaggttgagagaggtttggcatattttggaatattcctttggaattttggaacatattttatttctgaataaagcaaactgtagtcttccaaaaacacaaaa

SEQ ID NO: 89499 - DNA, 799 bp, Homo Sapiens
  misc_feature (328)..(328): n is a, c, g, or t
gagggcgacataagcaagtcctaccgacggatgttccaagccaaggcgttcagcctcactggctgagctccccaaccaccctgggaccttgtaatggtcactccagggggttgcaactatcgaaccggacccctccacccaagccttctgtccgccggggaaccattggagctggtcccatccccatcaagacacccgtgatccctgtcaagaccccaaccgtcccagacctcccaggggtgttgccagcccctccagatgggccagaagagcggggggagcacagccctgagtcgccatctgtgggtgagggcccccaaggtgtcancagcatgccctcctcaatgtggagcggccaagcttccgttaaccctccacttccaggcccgaagcccagtatccctgaggagcacagacaggcaattccagaaagtgaagctgaagaccaggaacgggaacccccaagtgccactgtctccccaggccagattccagagagtgaccctgcagacctgagcccaagggatactccacaaggagaagacatgctgaacgccatccgaaggggcgtgaaactgaagaagaccacgacaaacgatcgctcagcccctcgcttttcttaggttcacaagaaatgcgccggtggggaatgaactgtttcattaataaaacctaatttgtcttgatccattccactctataataaaacaaaagattttgtaggcaactcggaatatagctcttttgaaagtactcgacacctttagataagaattaaaaccaaccaaagtaactgaaa

SEQ ID NO: 89500 - DNA, 484 bp, Homo Sapiens
agaccttcttcggtgacgaccgccttccctgtggccctagatgagcacaagggcagtctgtgtgtgggatcccttcccattcacgctccaccctgctcttgaccatggtgaacttgtatggattacatcaatatgctacgtgccctgtggattctggctggatatgggcaatggcgagttccagcaggaaactggagggacagaagagagcgaggtcagaaaatttaatctcctgcctccctccctatgaggtcaccccagctggtgactgtgaccctggatggaaggtgattgtctcaaggtggtctgctcttcgcaactctccttctttctggtaacctcgcccagcatccctctaggtcgagggaggggtggtgttggcctcattgcttttaacctggattcctgtaccatccctcatggttctctcctacaaacctttgcaaagaatccctcccaacacgagcagaatattagtgcaaaa

SEQ ID NO: 89501 - DNA, 741 bp, Homo Sapiens
tgcggccgccatcggcacggacttctggtatatcattgacaccgagcggctggagaggactggcccgggggcgcaggacctgctggggtccatcaatcgcagccagcccgagcctctgagctcccactccggcctctggcggacctgccgggtgcagagcccgtgcacaccgctgatgaaccccttcaggctggagaacgtgacagtcagcgaatcgagccgccaacttctcaccatggtgaccctcgctgggatcagcgtctacatagcgtattcagccgccgccttccgggaggcgctgtgtctcttggaggagaaggccctcctggaccaggtggacatcagcttcggctggtccctggccctgggctggatcagcttcatcgccgagctgctcaccggggcagccttcctggcagcagcccgcgagctcagcctgagacggaggcaggaccaggccatatgagcctgggcgctgggtcgtggagggaagggaggggcttggccccggagcttcaccgaccgatctccatcggctgcggcctcttcttcctcaaaggccactcggggaggccaggcacccccctccttcccccacaaatccccgcggactaagcttggggcctggctgttatcctagtacctgtgtgcttatgtccgtgtgtgtccgtgtggcctggaggagcccgagggagtgccaaaccgcttcgcgagaaataaaaacgatccattaatcacaaa

SEQ ID NO: 89502 - DNA, 589 bp, Homo Sapiens
tgcggccgccatcggcacggacttctggtatatcattgacaccgagcggctggagaggactggcccgggggcgcaggacctgctggggtccatcaatcgcagccagcccgagcctctgagctcccactccggcctctggcggacctgccgggtgcagagcccgtgcacaccgctgatgaaccccttcaggctggagaacgtgacagtcagcgaatcgagccggcaacttctcaccatgcatgggacatttgtgattctgctgccgctcagcctgatcctgatggtttttggggggatgacggggtttctgagcttcctcctccaagcctacctcctcctcctgctcactggaattctcttcctctttggagccatggtgaccctcgctgggatcagcgtctacatagcgtattcagccgccgccttccgggaggcgctgtgtctcttggaggagaaggccctcctggaccaggtggacatcagcttcggctggtccctggccctgggctggatcagcttcatcgccgagctgctcaccggggcagccttcctggcagcagcccgcgagctcagcctgagacggaggcag

SEQ ID NO: 89503 - DNA, 493 bp, Homo Sapiens
gggccgccatcggcggacttctggtatatcattgacaccgagcggctggagaggactggcccgggggcgcaggacctgctggggtccatcaatcgcagccagcccgagcctctgagctcccactccggcctctggcggacctgccgggtgcagagcccgtgcacaccgctgatgaaccccttcaggctggagaacgtgacagtcagcgaatcgagccggcaacttctcactgctttttgatagctccatggatgtcaatggtgaattattaacagtcaatcaatagaatggaaaacttctgcagggctttgccgtcatggaaagaagttcctggtataaaacagaatggcggataaaaccagattgtagcttcacaccatatgatatcatatgatattatcatggttatgaaaaatagaatctatacatatatgtgaatagctatatgaattgggaagaatgtttattaaaatattagcatcagcctcgtgcc

SEQ ID NO: 89504 - DNA, 530 bp, Homo Sapiens
  misc_feature (76)..(84): n is a, c, g, or t
acataacttttttaaaaaagggtaaaaaatccatttgtccaacccctggcatattgtaataccatgagtacctgannnnnnnnnaaatggacagtctatgctttcatgaggcatgcatattgagcaccccctgtgggatggtcccagctaggggagaaagtatgtgtgtctgtgctcacccggcagcataactacacaactgcccctctgaaggatggagcaaaggacatctcctgagcactgagcatcaagcactgaggctctgggaaaaggaagatcagacagagaggaggtaagtggaaggaactgagcagcttcggttcaatcccaaggcaaaagcctgagcaaggacacactccacaaagtgctcagggtggttccccgggccccaggacggcatgacacagcacagcacagcaaagccctgagagctctgagtttctgcctgagtctaattatctataaaggaaagagactggatcctcaagtcttccaatccatccattgtagaatacaggactctgttctga

SEQ ID NO: 89505 - DNA, 484 bp, Homo Sapiens
ggacctgggtgttggcggctgcagcctctgggatgaccctgctcgcttcatcgtggtgcccgcggcctatgccttggcactgggcctggggctgccagccaacgtggcggccctggcaatgttcatccgcagcggcgggcgcctgggccaggccctgcttctctacctgttcaacctggctctggttgatgagttcttcacgctcacgctgcagctgtggctcacctactacctgggcctggcccggaggccgcctgccacgcggccggggccacctactacgtgtccacctatgcggcggtggtcttcgccgcgctcatcagcgtgtgccgctgcggcttcgtacgcggtcccgggcccagggcggctgcccgcctggcccggtgcctacggcgccccgcgcgcgctgcctgcgccttcgcctggctggcgggcctggcccctccctgcctggagcaccgctgggcaagctcggggctggcct

SEQ ID NO: 89506 - DNA, 503 bp, Homo Sapiens
agagcccctttccttcccagtggggcttgggaaagctcagcacaacccagaagtgcatgtcagagcagagcctgtccagggctgtccctgcaactacagggctccctcctgcaaagtgacacgtaccaaatcttgcagccaacaagctatctttgttggccagaattatcctacaaggattagacagatcatagacaaggacagacagccccagaaagttgaggcatttaaggggaagatactgtgtcaaagccatccccaatccatgccccacaggaagcctgtgccacatccaaaccccacttgccggcgtcaggtcagcctggtgtgtccagccgtcccaaccagtgctaaaagccctgtgtttagtgatgtgcctttcctaactggacagaaaatgcttccaaagcatttacagggaggaaaatttccccccacaaaataattcactccttgttgagaatcttgattctccccaataaatgttccaataagaaggaaaa

SEQ ID NO: 89507 - DNA, 509 bp, Homo Sapiens
ctttcactctgaagtcatgggaaattttccagccatgaaagccctctttccactgcatactgatgggctgactcagcttccttcagccgactgagatcttttcatactattggctatttcataccaattaacctcttaaataagattgtgaattgccaaaattgatagacacttattaccacctgtggactccatattccttaccacaaatgttattttcatcagtcctgagtcattttaacttacagaaattaggattgttgctgctaatatgaataccaattataacttttagaaacaagaataaagcctaaaagagaatgaaatataagaaatgttcgttcccacccctaataacatttggaagtgaatattcccattttcttccacccacagggattgggattgatttttaatttcctaggaaacaatactagactacccaaaaagatgttgccagaatccaaaaggaactatgctcgtaaaagaaatgcagttatctcctacct

SEQ ID NO: 89508 - DNA, 566 bp, Homo Sapiens
ccctctccggtgatcgcttccctagcgtccaggccatcattaccgcatcacactgtcagactagcccatacagcctcatcaccatcctcactccgggcaaccacagaagatcacgaatctaggacagcaacagctgatcctgactccgtggcattcgcagccgatccagactacgaggcagcccttgccgccccagcagatctagactccggggcggccccctgacgccccagccgatcccgactccggggcggcccctgacgccccagccgatccagatgccggggcggcccctgaggctccccccgcccctgcggctgctgagacccgggcagcccatgtcgccccagctgcgccagacgcaggggctcccactgccccagccgcttctgccacccgggcagcccaagtccgccgggcggcctctgcagcccctgcctccggggccagacgcaagatccatctcagaccccccagccccgagatccaggctgccgatccgcctactccgcggcctactcgcgcgtctgcctggcggggcaagtccgagagcagccgcggccgca

SEQ ID NO: 89509 - DNA, 479 bp, Homo Sapiens
gctgaagaaacagatgggcttttggacttggacctcatccaaggagctggctgcctgcactttcacagaccgtcagcttcatccccaggccccaaatcctgaatttgccgtgtcaatgaaaaaccatcatcagcttttctttacattaaaaactgattgtgatcatagcagtttttcctgttttctgggatcactgctgcgaagaggaaaagtcaccagaggataaaatgacacacacgcaaactcttctgtggctgaaattcccctcactcttcctgcctctaacctaaaaggaggatacagaccaaggagcacttcatgaaggtcagacatagcagcaccaagagacaaaacagacagtgttcactaggacgaacaagcggctcaaaaggcactggagtttccctgtaagaactacaaacaccacgggagtgatgttaactcagatttttccatataaaagattcatcctgtaaaaa

SEQ ID NO: 89510 - DNA, 829 bp, Homo Sapiens
tgccttcctccgggagagccatcaacaaccacccattactgtgcagatgatgggactaacttcccttatccatgtgggcttctctgcccagctccccgccactgaggatgtgtttttgcaagacagtcaaagaagagacaagaagtaagccagcagaagccggtgagccaagtaaccctaactggtccacacaaagattgactgaatgactccaacatcatgaactgatcagttccaaagtctactcttcaagaacatgaacaatcatatcattttaaagataatttaatcctcacatggaccaaagtttttaaagaaacaactattcaatcatcggctaaaacacaaaattatacaccaacatttgaaataccattcaatataaaatataaataaatgtctttcaatttatactcaaagacaatatgttttagttaaatcatttgggcactcccaaactccttttaagtgcccagagattgacagagcagttcagctactgcatagccatggattagctatacaatatagaaacaggatctggcttcttcaaaaacgtaatatgatggatcatagggatgtacccggaagagcagaagttgaatataataagataaaattagaaaattgaagatactaagagatgaacattatgtggattttagaatcaagatactgaaagaattcagatacagacatttattactatttttgtttgctagtaaatttggcttcaataaagcccacactgttattttaatttgagtaatacttcaaaatactttcttttgagtatataatataataaaatatatgtgactttaaaaaa

SEQ ID NO: 89511 - DNA, 550 bp, Homo Sapiens
gctggagcccggtgttcagtggtttccctgcccgaggtcgctgcagccccatctaccacatcttcatgtggacattgagattcacatgctggctcctgaagggtgctcagtctccttggtgattaaggtcctgcttgaactgctgccaactccatgtcagggaagtcgcttttggtgcctggctggtttgcccagagccaagctggggcaaggggcagccagccctggcttccaaggctcccgtactgtctgtgtccttgtataaggagctttgctcttggaattactgaaagtctgtggcccaagagagagacacaagtggccttaagtctttttgaagtgttatttcatccagggaaatgcctcgagccatagagcctgaaatcatctttgttggctcagaaaataccttagcttcactcagctggactgcattgaaggcgaggctgccccttggatcaagcagaaaacaagagaaagaaagaacgttccctttggggatagtctggaaagttgggatttgcaaataaaggctctgaaagcattaaaa

SEQ ID NO: 89512 - DNA, 1198 bp, Homo Sapiens
ttaggggcgagagagtatgaagtcacggcgcgccgaattcggcacgaggcgggggctgacgagtgcaccatggccaccgcggcaacctcacccgcgctgaagcggctggatctgcgcgaccctgcggctcttttcgagacgcatggagcggaggagatccgcgggctggagcgccaggttcgggccgagatcgagcacaagaaggaggagctgcggcagatggtgggcgaacggtaccgcgacctgatcgaggcggccgacaccatcggccagatgcgccgctgcgccgtggggctagtggacgccgtgaaggccaccgaccagtactgcgcccgcctccgccaggccggctcggccgcgccccggccaccgcgggcccagcagccacagcagccatcccaagagaagttctacagcatggctgcccagatcaagctactcttagaaattccggagaagatctggagctcgatggaagcctctcagtgtctccacgccacacagctctacctgctctgctgccacctccacagcctgctccagctggattcttctagttcccgatacagtcccgtcctctcccggtttcctatactcatccggcaggtggcagccgccagccacttccggtcaactattctgcatgaaagcaagatgttgctcaaatgccaaggtgtgtctgaccaagctgtggccgaggccctgtgctctataatgctcttagaagagagttctcctcgccaagccctcacagacttcctgctggccagaaaggcaactattcagaaacttctcaaccagccacaccatggtgctggtatcaaggctcagatttgctcattagtggagttgctggccaccactctgaagcaagctcatgcccttttctacactttgccagaaggactgctgccagatccagccctgccatgtggcttgctcttctctactctggagaccatcacaggccagcatcctgccggaaagggcactggtgtcctgcaggaagagatgaaactctgcagctggtttaaacacctgccagcatccatcgtcgagttccagccaacactccgaacccttgcacatcccatcagtcaggaatacctgaaagacacgctgcagaaatggatccacatgtgtaatgaagacattaaaaatgggatcaccaacctgctcatgtacgtgaagagcatga

SEQ ID NO: 89513 - DNA, 400 bp, Homo Sapiens
gcaggcctgaagaccaccctcccgagaggaaccagcccggtaaaagggcacacgatgatgcggcttcccggtccctccgcgtgtgccgattccagatgaccttccagtgtccccaaggttcttccatcttatagactgtaaccctgcctccctgcttcctggtccagagcctccctccagtgactgtggagcctgagaaggcccccgggccccagcatgggccccgagccttggaggagcactggcagttggtggcagtgagaccagcccacccaccacagaaaagcacaaacctctgggaaagacaacgtctctcgggggccaggggtcatcggtttgacccctgacctataagccaagaaaccccataaacacactcagaaagcagagaaaaagaaaa

SEQ ID NO: 89514 - DNA, 596 bp, Homo Sapiens
  misc_feature (369)..(382): n is a, c, g, or t
gacacatggagaccagtcaactgaagggaaggcatgcacctatgagaaaagtagtcttatcacaaacttcctcatgtcacttttttgcactcagttctggctattagtcttttcttttttccccaagttgaatgcagttcattgagtgtactcccttgaagggaaatccaacacaccatattgatactccatagctagaaaaatagcaagtagttttctgtgactcagtatgaacccagatacatagttggatcaaaactttggcttttcccagttgtcagtaaggggaaagtcacttatgctatctaaaccttgttttcttctcaggaaaatggacaaaatgccattaactttgaagtgccattgtcnnnnnnnnnnnnnnttaagaagaggagctgagtctaacctcagcagacgatgtttttagtcctaattctgcattgaatcagttctgtgaccttggccaagtatttcatcttttcacgatctagtttcctgagctataaattggtcataataataattcctaccttacaaaattgatttgggattaaatgaaataaagcatataaaattcaagatcaggtctgataaaa

SEQ ID NO: 89515 - DNA, 914 bp, Homo Sapiens
cagtaaaaacaagtaacaagacagttctctaaactcagaaagtgtctgggttctaataaaattttcatatatcagggaaaatctgatttccctgatggctgcatttctattaaaagaatagctaacaaaaatcaaagtaatgtttggacagaaaattaggctgaatagtactttaaacattgcaacaaaaaaaggcacgttctacttaatccaggatattaaatatttttgattaatacattatttatactaaattcccaaaaggcaaaactaatatctacattattattaccttatctttggcctcaggcagtgtgatttctctaggttctaaaaatgcaatttctcgaaaaggtggaacacatctgactatatctggtacataatgtgtatgaaacaatggtggcattgagtatcttcgttcacctgataaaggcactatctggttaactacagttggctcttggtggggtgaatggaaacgttgccgtttaccgtcaagaggaaggtttttttcatcgcttaatctcttccttcctcgaaataatggggaagctgaggtctgtattggactgacatttccatatgtcagctgctgtaatgacacagctctagacaagtctgcattctgaaagttgaattgtgcatctataagctgctggtgtgaataaacagtaggtgacagggtaaagaagttattatgttgttgatgatttggagtgaagggtgggcgacccaaaattgagtttgggaacatgctcttgttcactggaagtgaacatgtattcttctaccttagttcttcaccaccctttgaaacaccatgcaagggtcccaagactatcttcctcttttggtcgtgcagccgttctagctgtaacagacgttttctgtgggtccttcgtgtgttgccc

SEQ ID NO: 89516 - DNA, 471 bp, Homo Sapiens
  misc_feature (219)..(219): n is a, c, g, or t
  misc_feature (314)..(324): n is a, c, g, or t
  misc_feature (371)..(371): n is a, c, g, or t
cctgaccccggggtcagaagctgaggactcagatgttgacttttagggcgctgacacagtggtcgatccgctctcctctggaaggcggtcactctttgcggacctgaaaattctttcctcagcgtggaggttctcatctttgtcctgtggtgggaaaaacatctggttcttggaacactaagaagacctccagaatcatgtaggtggttacgtgtaatnaaaaatcctgactattcccaaacgaatatctctatcaacttgacacagagttgtggggaacggcgaagtaaaataaagaaagcattcactaaagnnnnnnnnnnnccacttagatatgcatcgcagaatcgggtttgacataacaaataggngacaaaagacacaagctggtgccccgggattttgggacaccacacaggaaaatggaaatccacgaaacacccctaaaataaaaagggggtgctcggtttc

SEQ ID NO: 89517 - DNA, 397 bp, Homo Sapiens
  misc_feature (148)..(169): n is a, c, g, or t
atgattcaggtgtcggatggactaagtagatatgacaaagccaggactaacttgtaatgtccttgaactttgaattggcaaaatttgataaagctgccctaggaatcttattgtagactgaaagagacactgctgcactttggaaacnnnnnnnnnnnnnnnnnnnnnnttaaacctatcacttagggggcagaagaaagtaaagtcttgttttttaaaatagaagttgtcagcattagactatatagattctgtaatcttggctttgtaatttgatggaccagacagatatgtacagacattttaagactgttctgtttaagaacagttcatgtctgtgtactaattgtcttcggtaataaaacagatgttgatggtaacagcaaccaaaagtaaa

SEQ ID NO: 89518 - DNA, 560 bp, Homo Sapiens
gcggccgcagccccggccgagcaggcgccgcgggccaagggccgcccgagacggtccccagagagccaccggaggagcagctcacctgagagacggagccccggctcgcccgtgtgcagagcggacaaggcaaaatctcagcaagttcggacctctagtacaataaggcgaacctcctctttggatacaataacaggaccttacctcacaggacagtggccacgggatcctcatgttcactacccttcatgcatgaaagacaaagctactcagacacctagctgttgggcagaagagggtgcagaaaagaggtcacatcagcgttctgcgtcatgggggagtgctgatcaactaaaagagatcgccaaactgaggcagcaactacaacgcagtaaacagagtagtcgtcacagtaaggagaaagatcgccagtcacctcttcatggcaaccatataacaatcagtcacactcaggctactggatcaaggtcagttcctatgccactgtcaaatatatcagtgccaaaatcatctgtttcgcgtgtgccctgcaatgtaga

SEQ ID NO: 89519 - DNA, 575 bp, Homo Sapiens
gcggccgcagccccggccgagcacgcgccgcgggccaagggccgcccgagacggtccccagagagccaccggaggagcagctcacctgagagacggagccccggctcgcccgtgtgcagagcggacaaggcaaaatctcagcaagttcggacctctagtacaataaggcgaacctcctctttggatacaataacaggaccttacctcacaggacagtggccacgggatcctcatgttcactacccttcatgcatgaaagacaaagctactcagatcgccaaactgaggcagcaactacaacgcagtaaacagagtagtcgtcacagtaaggagaaagatcgccagtcacctcttcatggcaaccatataacaatcagtcacactcaggctactggatcaaggtcagttcctatgccactgtcaaatatatcagtgccaaaatcatctgtttcgcgtgtgccctgcaatgtagaaggaataagtcctgaattagaaaaggtattcattaaagaaaataatgggaaggaagaagtatccaagccgttggacataccagatggtcgaagagctccact

SEQ ID NO: 89520 - DNA, 565 bp, Homo Sapiens
gtgatctcagtgctgaagaaaacagggagtgtgtgtcttcatacttgatttgccttaccgcaggggcataatatgagatatctgggcgtgttaagtcgttcttgatgaaatgtgtcctctgtgaatgtagtctcactgttagactaggaagatgctgttttgctgtgcccagttcctcttaaaagtacagatgctccttgggttgcagccgtaataaacccatcctaaatagaaaacgcgttttaatacccttataaacgaaaaggataaataagcctttgggttctgtaatgtgagccagcattctttgagtgcgtatgtgacaggaaccaaagagaagtaaaggaatgtgtccaagggctcccaagttggcggtggaattagaattgaagcctcagctccaaagcctgtgttctgaactacccggttgcagttcacaaaatacactttggcagtactttcataacgaaaacaaatgattacaaccagtttacaaatgctttgctttactggaggatcgacatcctccactaattttcaaaaataaatctcaaaaacagcaaaa

SEQ ID NO: 89521 - DNA, 516 bp, Homo Sapiens
tcagcttctcagtcatttttaataaatgcttacggttcttcttccaaagcaggggaaaggagaatatataagtaacgatatatttgcggtggctatgcctattccacagcaatcacaaggggtgtccttggggtgggagtgcgcctgggaaagagttggcaatcagtgagtgacagtcctagacttcaaggaccagaaagactaggcagccgtgggggaccagaataagtaggaccacgagagagagtagagagaagcactgtggcaaaagatggagggtctcactagctctttatttcccagaagaaatatcagacacgcagggtagacttctgcattaagcaccgcaggcccagtgccagggaccatagtcttttggggcccatgaaaatgttttgatttgttttaaaatcagaaaaaaataagtaaagctttaggctgaagaacatgttttaatatgcaatattaatatacttttccttatgccaacgcagttgcaaaatcttatttttaata

SEQ ID NO: 89522 - DNA, 506 bp, Homo Sapiens
ttggcggccgccgccgcctcagtcatggctcctcgccgtggccgatgtttttgtacctccatctgcggaggccgcggcgcccggccccagctgccccggacgtgcggcgacggcacgcagcactgcggcagggggaagccagccctcgctgcggccgaggaatggccatgagatgtgagtagaagccccctggacagcctccaaaagagaactgtgagaaaaggttcttcaatcctaaaaatgatggaggaaaaaacagtccctcttcctcagacagtgacacctcaaactgctacagtcacctttgcagcaagtctgaagatgccaccaacatcaaagggaatggagagttggtccttggtgatagcattaagccactgtatcaaccaatcctgacaatttgtatgacttctggatttccagccacattacaacaatgtaacaataaacatttattaattgcttaagccaatttgagttaggttccttatataataaatgaagtc

SEQ ID NO: 89523 - DNA, 543 bp, Homo Sapiens
gtctctctaactgatggcattcacttcacacagtcgtctatgttatccagagatttttatttcattttacattttagggcacagttctttggggctaattaaaatggggtttgcaggctttttatggtgaagaataatatatctctgtctatagctttcccatggtagcctgataaggctgagagagaaaaatatgtgcagtatctcatcctccccctgtaccaggccatagctttgaagtgtattttgtaaattcaactataggttagtcagaatgctgtttttcgttaattaacttagcctgtgttgatatctcctccttcctggtcacattcaaaccttcccagagtacaaaggggtatgtagaaaggattccagaagaagtaatactttattctctaatgttaatagcttttctggatctcttagtagggggaaagtagaaaatcgagtagaatttggcctcaggtcaataaatgatataaaaacatgtgttctatttatgtatatatatgtatgtttcaccaaaaagtgataaaacca

SEQ ID NO: 89524 - DNA, 213 bp, Homo Sapiens
tcatttcatagagatagggtcttgctaccttgcccaagacagacctcaaactcctggccccaagggatcctgccaccccaagtgatcctgctgccttggtctctcaaagcactactgtgcctggcctattttctttataataatgctaggaataaggaactaaaaaataaaagacatagaaaatgttctagtagaatctggcatccctggaaa

SEQ ID NO: 89525 - DNA, 297 bp, Homo Sapiens
tcaggattggatgtggggggaaaataacaggcagaaaacaactttatttgccagtatttttgaaacactgctgagcagtatcttgttcttgtaataccggctgtcaaaatagcatgccgactgcttccttcatcaatagaaaacaaatgcaagattccagagagtcatttttctatttttgtggtctctagccttcttgtaattatttattctcatcattgtatgtgaatagaaacatttctcaattgaaattaatgactgaaggtggaacagaaatacagttttcagtgatgtgct

SEQ ID NO: 89526 - DNA, 274 bp, Homo Sapiens
tggcttttgaataggtatgtaggctttcttgtttaatagcagttaaaagaggaaaatgtacaagaggaataaacatgctcttttcacagaggagctttcccctaaccatgcggcccatctgtatcagtagctttacaagtaagttttagagaaaaaagttccctttagagttaaaaatggactttcctaattttctctatatatgtgcaactatctgtgtaaaataaaaatgccatttccaacacctttgtgaaaagtaattgtgaatgcaggc

SEQ ID NO: 89527 - DNA, 1389 bp, Homo Sapiens
  misc_feature (143)..(143): n is a, c, g, or t
  misc_feature (248)..(248): n is a, c, g, or t
  misc_feature (260)..(260): n is a, c, g, or t
  misc_feature (278)..(278): n is a, c, g, or t
  misc_feature (288)..(288): n is a, c, g, or t
  misc_feature (401)..(401): n is a, c, g, or t
  misc_feature (579)..(579): n is a, c, g, or t
ccgcgtggtctcgatcacaggctgcgtcgccgcggccgatgcgctgatcatgtaaagccttcgtgaccgttcgatccgcgggggcgctgtggtgggttaatttcctctgagtcagagctttgttgtttgagcgtcgcggaaancgtatgcccagggtcacggggggtataagtagggaggcggcgggggagcgtgggataagtgttggggggaggcggccgagccgcgcgcgcaatgggagcggtgangagtgagtctcncgcacctataacctccgncttgtgtgancgggcggggcttatatcatctatggcccggcagcgccggtgttagccaactatagtgtggcgggttccgcagcgctgtcaacgagcatgggtgtggctagcaattcttattantacagacactggcggcgtaccggagaaggctcacaaggcgtgcttctgcggaaagaggggtaccaaagaggtggggataacagacggtgggcgccgtgtgtgtgttgcgcgtccctcggggttttaccgcagaaggacgcagcccgccatcatagaggggaagagtttcggggaggancgtattggtaatgtggggaagggggccggcagtgtggattacagagaatgggtgcgtgcgtggcattctagggggacgatgacagtggactcgccccggcgcaagggctgcttgccaaagcacgtttccgcgggatggtcccctaggaattgggggaatttggaccgtaacagtaggctcccacctcgtatagagggggagcccggcggcggcgaagtaagcggaacatcgtttcatgaatactcgtacttcgcgcttgtatgcaggtccgtcccgggcgagggcggaccggcgaggacgggatggagatcgcgccacagggcgatgccgggaacccaaaggctcttgcagcacaggaggttccgaggttcaggttcatttcgtgaatcgtggcgattggcatatttgcgtttgcgaggagtttgtccagtggagcgtcgcctcttgcaggtcctggtgttaaattactcatgtttatttataacagactttcagccagtacagtacaaaacttacagtagtatatctccgttacacaaatatttacttacaatatattacatatacaaaatgctttgcaataagtctcaaaagctagtttaactccccttgagaaaggagaaaaactctttaaaaaagggggggaggggaatcagaagaagagaggaggaggtgaaggggtaaaggtcaaaagagacaccaaacataggctacaaaggaaaccctaagagagagggagaagagaggtggtattgcacttgcttctgtgtttattttttctttttgttcttcataacttctgattaaaaa

SEQ ID NO: 89528 - DNA, 476 bp, Homo Sapiens
ttgttcacagcagtatgctttactcaattgctacaagctataaatagctcaaaagaaaagtttccttgactctgaaaaacaaagcaaagcatgcttctctgttccaagtgtgcggagtcaaagtatccctccataactactattagccatcccttaaagtatatttcctacctagttatttcacagcaaagctgtctcaaaatgcaaagtaatttctgataccccccaaactcaaaaccatcagataacacaatacaaaacagaacagagcatttgattttgagagggatccatctgcttttaattcctggggtttcaagataaaaacaggttttttcccaaaacggagtctgtgacacctcctttgtttttcccaatgagtctgtgacacctcctttgtttttcccaaggagtcccaggctaccagaaattatccaaaggcctctcgtgtgttcattatggatggccaccaaaaa

SEQ ID NO: 89529 - DNA, 484 bp, Homo Sapiens
  misc_feature (466)..(466): n is a, c, g, or t
gggccaggggtcatcggtttgaccctgacctataagccaagataccccataaacacactcagaaagcagagaaaaaggacaagagtctgtgtttgagagggggtctgccattcctgcttggggactggtggggaagagggccaggacatcttctgagccaggacgtccctgaggctccacctccaagctcagacagggcccaggcttggggaacagagagagcaggtgtacacccaaccaaagtgattgtgcccttggttggggggcgcgggcatataacctgtcagaagcaaacaggagcggcaacttctaactttgctccaagccactctctttttaaacagcaacaatttaaagctatgaagtcacctggagaaaaggaacgttgctcttggacagcaagcaaaccatttctctccgtctgttgtgtttttctcctagtacctcacctgccacctctccaagncatcctaggacccccaaa

SEQ ID NO: 89530 - DNA, 424 bp, Homo Sapiens
aaggcgagaggggctgggaaaggagtcttccctcccctttcctgaactgtccaggtccttctaggacacctgatccttccagtccctgggggctgtgacccatggccctgtgcagggtacagggtgagtctccttccagtgccccagtttcttccaggtcacgccaggccaggccaggccaggtggggaaagggacaccttccggccctccccagtagctggctggagatggagcttcctgtgtcccagaactcggcgtccagctccactagggcctggatccccatcacagcttgggttagccccggtcccagcccaaactcaggctggaggcagccccgaggcctgtgcctttcccactccaccttctacagttgcttagccaataaacctttcctgggctggagagctgtcagcatcaaaa

SEQ ID NO: 89531 - DNA, 639 bp, Homo Sapiens
ggcacgaggcaagttagctgtatggatggctatgaggggtgcaccagccccgttcaccaactgaggaatggagaactcgaagggaggaacggagactcggccgagcctcagcactcacagcggcagggtggatgagttctaataagggtagtttcctgtgacagtccggaatctggaactaggcatcaggtgagagtgccctggagtggagtgggctgggggaagaggatggcgcttgctggtggtgtaagtgttggtgtagcgaggcaggtctacagtggctggaggatactgacctcagcccaaatggatcctgcattaaaaggtgcgggtggatctaagactggccagctaagaagtgcaagggaaatagcttcctccgaagcgaagcaagaaaagggcacagccgagaagccactcaaactctgttccccaatgaatccatttccatggtccctgcttcgctgtacgaaaacccaaaaccttgatggtgcatcttgtgaaaaatcaagatgaaaataaaaggtcagaagaaaactctgtggagactgttgtcaatgtagtcaaactgactctgatatagacaccttccgcattctgcacttactcatgcgatttcatttactttttagagagaaa

SEQ ID NO: 89532 - DNA, 469 bp, Homo Sapiens
  misc_feature (91)..(110): n is a, c, g, or t
  misc_feature (441)..(441): n is a, c, g, or t
gcagtcagggacagacatacatttctcataccttccccacatctgagagatgacagggaaaactgcaaagctcggtgctccctttggagannnnnnnnnnnnnnnnnnnnccataagaagtcgtttttagggagaacgggaattcagacaagctgcatttcagaaatgctgtcataatggtttttaacaccttttactcttcttactggtgctattttgtagaataaggaacaacgttgacaagttttgtggggctttttatacactttttaaaatctcaaacttctatttttatgtttaacgttttcattaaaatttttttgtaactggagccacgacgtaacaaatatggggaaaaaactgtgccttgtttcaacagtttttgctaatttttagggtgaaagatgccggatgccaagagtaaaccttcagtttgattanagtcagtttatgtctataaaaaaaagaa

SEQ ID NO: 89533 - DNA, 455 bp, Homo Sapiens
accaggacggtctccggaggccgggattcgcggagggtccaccagcaggaagaaaccccaggaggaagaaaactcagacagatcgccggcgaggcagcgcggcatcccagcctcaggcgtgcgcggacggtgtgcggcgcacacaaccaagcttaggagccgactgttaagatgccccagtgacacggacaagtttctcctctgcaacccaatgagagctgctgaccacgagagcatcgcgggaccgccaaaggattctggaaaatgtggtcccgggtggccagtgtgcgctgaccttcacctgaaggtacggcttgaaggaaacttctggagggtggggtggtgttgaagagaaggcacaattgtcaccattttgttcaacatgggcgttttctttgtgcattgatttgcatttttaaaggtattccattaaaaatatgtttatctaaaaaaaa

SEQ ID NO: 89534 - DNA, 919 bp, Homo Sapiens
  misc_feature (294)..(294): n is a, c, g, or t
ccggtcaggtaatgaggtgcagaggtgtggggaagacctgggtgcctccctgggtgccaaccagcctaaccagccggggccaccaaacagaagtgcttctgacattaacgcgacacacagaaggtgtgtagggtgggtagtggaagtgaccgcagaggcctctggggattgtagttttggagctagagaggcaggcaagcagtcgggttcgcccacacggtgtgcctctcacatctgcacagcgcacacaaccaagcttaggagccgactgttaagatgccccagtgacacggnacaagtttctcctctgcaacccaatgagagctgctgaccacgagagcatcgcgggaccgccaaaggattctggaaaatgtggtcccgggtggccagtgtgcgctgaccttcacctgaaggtacggcttgaaggaaacttctggagggtggggtggtgttgaagagaaggcacaattgtcaccattttgttcaacatgggcgttttctttgtgcattgatttgcatttttaaaggtattccattaaaaatatgtttatctattttaatgttttttttggtgcccctttaaattctctatccacagtcctgagccttaatacgaagtgagggcctggcctctgggcatcaagcagccagaaagtcccttaggagctttctctgaattgttgaattgtgactgatcttttcctttcctgacttccttaatatccacaatttcctcgtaaccatccccccaaagccacacccacaaggcacctccaagacctatcatgaagcagatattcaaagattatttgtaaatcttcacaccccaccccttccagaatgtcttccaacatcccttcgcctggagaaataaaacacaaggtttgcatgttgagtatcagcctctcccattgggtgg

SEQ ID NO: 89535 - DNA, 1700 bp, Homo Sapiens
  misc_feature (121)..(129): n is a, c, g, or t
  misc_feature (581)..(581): n is a, c, g, or t
  misc_feature (615)..(615): n is a, c, g, or t
  misc_feature (618)..(618): n is a, c, g, or t
ttttaacagtatttcacagttttattggtgcaaaactaaacaaatccaggaaggttattcatataagaatcttcaacacaaattctgcctttatttacaaaatggtctgataaaatatcgnnnnnnnnnatacttacaggtctcttccacaacacacttcacacgttgattttagcaatattaatagcaccattcgtatattatttaaaatcaagaagatttcatttcagttactatgttgattcatcatcatttacatccatggatgagataagtgagtatactgggactatctgctgctccatggtaaggattcctgggtccagcacaaaaggctttgcagttaccagttatgaaaggtatctatggtaagtagatactatgagaattttcgtgccacaaagtttaataatcctccatgtttgtataatgttatttccacatcatcttcaaacgaagcaatcacgctgaatacttttccagtgcttgtctgtatattcaatgtaattccaggagacagttcttcaggaaatgttaaagaaaatgtttctctaccggagaggcccaaggaatctgcattntctcctggaaggaactgaagtggagctatgccanatncaatcaaatgatctttgtgtatttttcataactttcagccaaaacagctttcacacccagtaaatacggtcctttggcagcccagtctctggagtttcctgaaccatatttctttcctgctaaaataatcagtgggataccttctttctggtacagctctgcagcctcaaatacatctagcgtctgtcctgatggaaaatgaattgttttaggagctggttttccaataaacttattaaaaagcttgatatttgcaaaagtgcctcttgtcattacagcatcattacctcttcgagctccgtaagagttgaattcacgaggggtaaggcctctgtttgtcaaatacttaacggcagcactattcctagcgatacttcctgcaggtgatatatgatctgttgtgacagagtctcccaaatataataagacatgggcattttcaatagcctggagtgcaattggctctttggtaagtttatcaaaaaatgaagggcatctgatataagtagactttaagtcccatggaaacaaactgaatccggtgcttctaaggaattccaccgtttattccccatttctattttatcttttaatgctttaaacatggatagtataacatgttcttcctctactcgatgaacttcttctcgactaggccaaatatcatgcaggtaaatgttcttgccggtggggtcagtacctaaaggttctgtctggaaatctatattcactgtgcctgctatggcataagctaccactaagggtggagaggcaagataattggcacgaacacaatcacaaagacgaccttcaaaatttttgtttccagataaaattccacaggtaaccaaatcaccctgttttactgcatttaaaactgcgtctgataagggtgctgtatttcccacacaagttgaacatccatagccaacgatttcaaatccaagcttacttagatatggtaatactccacttgaactgaggtaatgtgtaaccatcccactgcctggagataaacttgttccttatataaggtttaacacgcagaccagcttcaacagcctttttagccaaaagacctg

SEQ ID NO: 89536 - DNA, 863 bp, Homo Sapiens
  misc_feature (508)..(510): n is a, c, g, or t
  misc_feature (617)..(657): n is a, c, g, or t
  misc_feature (736)..(736): n is a, c, g, or t
  misc_feature (812)..(812): n is a, c, g, or t
gggggggcggagcgccggggaagcgaagtaggcaggggcgaggcggctggggaccgcggggcggacgggagcgagtatgtccgctctgactcggctggcgtctttcgctcgcgttggaggccgccttttcagaagcggctgcgcacggactgctggagatggtggagtccgtcatgccggtggtggtgtgcacattgagccccggtatagacagttcccccagctgaccagatcccaggtgttccagagcgagttcttcagcggactcatgtggttctggattctctggcgcttttggcatgactcagaagaggtgctgggtcactttccgtatcctgatccttcccagtggacagatgaagaattaggtatccctcctgatgatgaagactgaaggtgtagactcagcctcactctgtacaagagccaggtgagaatttcaaggattatcgacttcatattgcacattaaagttacaaattaaagtggcttggtcaagaatgaaaannncaacaccacaccaaccctctatcgtcaatccctctcttctcctcccccagacaaataaatacgctccaaccgcgctcgccactttacgtcgttctagcaccttcctnnnnnnnnnnnnnnnnnnnnnnnnnnnnnnnnnnnnnnnnnatctcgctgcgtggcggcggcgggcccgttgactttgcagttggcgcccccccgccactactaaacgcagggagaatcnctctcggggggcctgcgccccccccggcgcggggccacctgtggccgttctcctcttgtgagtgcgcacgccccgnaccacttcatccggttgcggccaagtgcgaccgtatgcgcgccccccggtc

SEQ ID NO: 89537 - DNA, 432 bp, Homo Sapiens
tcctgtgacagagcacctggggaaagggatggctgtgggcacagtttcagcagacttaaacattcctgcctgccggctctgaagagagcagtagatcttgacaaggagggttcttccagcacagcactcgagctctgctaagggacacattgcctcctcaagtgggtccctcgcccccctgtctcctgactgggagagacctctcaaaaggggttgacataaacctcatacagggaagctctggctggcatcaggtgcccctctgggatgaagcttccagaggaaggagcaggcggcaatctttgctgttctgcagccttccctggtgatactcaggtaaacaaggtctggagtggacctccagcaaactgcagcaaacctgcagaagaggggcctgactgttagaagaaaaactaacaaacagaaagcaat

SEQ ID NO: 89538 - DNA, 541 bp, Homo Sapiens
gcccgcccgccgagacccgtccgccgtcgctgccatggccgaagtgcgcaaattcaccaaacggctcagcaagcctggcacggcggctgagctccggcagagcgtgtctgaggccgtgcggggctccgtggtgctggaaaaggccaaagttgttgagcccctggactatgagaatgttattgcccaaagaaaaacccagatttacagcgaccccctccgagatctgcttatgttcccaatggaagatatatctatctcggtgataggtcgtcaacgcagaacggtgcagtctactgtaccagaagatgctgaaaagagggcccagagagtatttattaaagagtggattaaaacctagagcacagattggcacgtggtaaactacagaggatgaggacttctctggggactttcgaatggtgccatgtaaatctttgagaccagaaaagatgcctaagaatgtatgtgagatagatgaagactgtgagaaagatgaggactcatcttctatatgttctcagaagggtggtgtgataaaaca

SEQ ID NO: 89539 - DNA, 496 bp, Homo Sapiens
cctggaacaataaacatacgaaataactcttattacatgtatattattacatgttatttaagtcaaaataaaggctaatttactataatgcaatagcacataactgtcatgtaagagtggttgcagaaaacaggattgtatataaatatacctacttacaaatagtttttaaaattaaattgaagaatgtttttgtatttaataattaggaagtgtttaatagtagcttaagatatcattcacatatgaaccacagtaagattaaaattaccataccatttgctgaatcctgtgaaagctctttccatgaaaactaaaggcttgttcaaataggactttatcttccactgtccactcatccggaaagggagtgaaattagggagatcagcaagggacttctcaatgttatgtttatgccagaacaacatgccaagtgcctttgaagagaaatcattcccctttggttttaatggacttatgttccatcacacttaa

SEQ ID NO: 89540 - DNA, 1011 bp, Homo Sapiens
ttccctcccgcccgcgctctaagccatctccgccttcaccctgacgcctgcctcttcccctcacctttccccctcccctgttctaccatgcccggcatgatggagaaagggcccgagttactggggaagaaccgatcggccaacggcagcgccaagagcccggcaggctggcggcggcagcggcgcctcgtccaccaacggcgggctgcactactcagagcccgagagcggctgcagcagcgacgacgagcacgatgttgggatgagagtcggagccgaataccaagctcggatccctgaatttgatccaggtgctacaaagtacacagataaagacaatggagggatgcttgtatggtctccatatcacagtatcccagatgccaaattggatgaatacattgcaattgcaaaggaaaagcatggctacaatgtggaacaggcacttggcatgttgttctggcataaacataacattgagaagtcccttgctgatctccctaatttcactccctttccggatgagtggacagtggaagataaagtcctatttgaacaagcctttagttttcatggaaagagctttcacaggattcagcaaatgcttccagacaagacaattgcaagccttgtaaaatattactattcttggaaaaaaactcgctctaggacaagtttgatggatcgccaggctcgtaaactagctaatagacataatcaggctgacagtgatgatgatgtagaagaaacacatccaatggatgggaatgatagtgattatgatcccaaaaaagaagccaaaaaagagggtaatactgaacaacctgtccaaactagcaagattggacttggaagaagagagtatcagagtttacaacatcgccgtcattctcagcgttctaagtgccgtccacctaagggcatgtatttaacccaggaagatgtggtagcagtttcctgtagtcccaatgcagccaacaccatcctgaggcaactgacatggagtcatct

SEQ ID NO: 89541 - DNA, 434 bp, Homo Sapiens
catgttagcaggtaaaaaatcattcacccaatttgaagcatagaagaaaatagttgctgaggttttttaataaccattcctactatctgtgttcccttagatactcctgtaattcttaatgtgaatagtttgttaatattgctgtaaagtattatattgtatgatttgaagacagactatatgtcattttattatactccatcaatctataatatattagactgatgctttatctaaaatgctttgagtttgtataatatatcttgacaaattttactaccatatgttatgtaataaatgtgtatttttgtacttgcagaaactgctgctaacttttaaagttgtttggttttcaaggcactgataatggatatgtatgaagtccatgctgtctgttaaataaaatgccattctgcagaattaaccatcaaaaa

SEQ ID NO: 89542 - DNA, 594 bp, Homo Sapiens
tgaaaggagtgtacactggtctagcagttgagatcagctagtgttccatctatcttatgtcatgtcagggaagactctgatcctctcataatttacctattgttgatttcctgaatctttttaaatcctttgcaactgaagatggtctctccatcagagaagcaattaaccaaatgcctgactacagcgtatatagcatctgttataaaagcatgaaaggttaacttaaatcctggcacacaaaggagatgtcagaccagaacaaatcagcatggaaatacctggaggagatacaaggttaaggtggagcatatgtacagtcaagaggatgttcatgactagtggaatgtgtttttcagattgcaaagactggaaggtgcaggtgacaaggagattaaacaaggtcacttgttttctttccttctctgaaataaagaagaagtggccgtatcacacaatttcgacccatgggatataaatggaagtcgactgtgatttttcccagtcattgctttctgttaatgagatctgttttatttctcttttcttttttcgtcctactaaaaatgcatgtgattgtcatagctgaaaaaa

SEQ ID NO: 89543 - DNA, 555 bp, Homo Sapiens
gcggccgccgaccctcccaccgcctcacgcctcggagaccgggtccagagccctcagccgcttccgagccccgagaggggaatcagaagtgcgcgtgatcagagcggcacccccttcccaggaaccgcagctgaaccaacggtttccccagcaccagcctctgcgaccaggtcattttttccaggacactttctgtcttcatgacaggaacatcgagaagccaaggctagtggctgggttactgatggattactgatggattcttctcagcacttagtgacctttgaggatgtggctgtggactttacccaggaggagtggactttgttggatcaagcccagagagatctctacagagatgtgatgttggagaactacaagaatctcattatactagcagggtctgaattattcaaacgtagtctcatgtctggattggaacaaatggaagagctgaggacaggagtgacaggagttctgcatgaattggatttgcaactcaaaaccaaaggctccgcactgctgcaagatatttctgcacagagatcaccaaaa

SEQ ID NO: 89544 - DNA, 570 bp, Homo Sapiens
gcggccgccgaccctcccaccgcctcacgcctcggagaccgggtccagagccctcagccgcttccgagccccgagaggggaatcagaagtgcgcgtgatcagagcggcacccccttcccaggaaccgcagctgaaccaacggtttcccctgcaccagcctttgcgaccagaccagaagaccatgtagcaccaaaaagatagctgcaaagcggaataaagttggggaaaacaatctgctggccggaagagagtaagatgcaggaggatgattgccggttctccgcagcacgagtcagggaggccatgagatggaagagccaccccacaatgggaagaacctggagacaaggttctccttgtctatgcccaagagaagccacccttcaggagagagtttctgagtttcatgaacttggggaacattctaaacctattcaaaatatgcttactcacagagaggtctcacaagtaggcacgtcgtccataaatgagactcgcatgttgaatatttacacagaattcagtttttgtttagatgactatcagaataaaatatctgtgtatgaaaaa

SEQ ID NO: 89545 - DNA, 635 bp, Homo Sapiens
atgagccactgtgcctggcctaaaaaatacttactaaatgactaaacaaataaaagatagtctctaactttcatcataatctcaaagagcttcatgatctggaagaagtttagacacaaatgggtaggcaaagtatttcttaattgctggtgcaagaccttacccttgtcttaataattatcctgtctaagtaatacaccttttaagaaacccctgaaaggaagatgatcgtccttgggagataccggaaatctgaggtaaagtggcccataaactgttttgaaatagagaatttctaaaatatgtagggtattttgaatatagctgagaaagctgctatgaactgaaggtttacgtcccctacaacattcacaaatcccaaatgtgatggtatttggagatagggcctttgagaagtgattaggtcatgaggatggaaccctcatgaatgggctgcatggaaaaggacccacagagatgccttgtacttttcccatgtgaggacacagcaagaaagcactgtctttatgaacagaagtgggccctcaccagaccccaagtctactggcaccttgatcttgaagttcccagctcccagaactgtgagaaataaatttaagttaatacaccacaaa

SEQ ID NO: 89546 - DNA, 642 bp, Homo Sapiens
ccgcctcctccccgccccgttccccagtcagcccgtcttccttcccctcccttgcatgatggaaacaccatggctgcggcggcccagctctctctgacacagttatcaagtgggaatcctgtatatgaaaaatactatagacaggttgatacaggcaatactggaagggtgttggcttctgatgctgctgctttcctgaaaaaatcagggcttccagacttgatacttggaaagatttgggatttagccgacacagatggcaaaggtatcctgaacaaacaagaattctttgttgctttgcgtcttgtggcatgtgcccagaatggattggaagtttcactaagtagtttgaacctggctgttcctccaccaagatttcatgataccagtagtcctttgctaatcagtggaacctctgcagctgagctcccatgggctgtaaaacctgaagataaggccaaatatgatgcaatatttgatagtttaagcccagtgaatggatttctgtctggtgataaagtgaaaccagtgttgctcaactctaagttacctgtggatatccttggaagagtttgggagttgagtgatattgaccatgatggaatgcttgacagagatgagtctgcagttgccatgtttttg

SEQ ID NO: 89547 - DNA, 496 bp, Homo Sapiens
tgtctcatgcacaagccccaggctggtgtggagggcacagaagccatgcatctgcggaagtccctccgccagagcccaggcagcctgaaggccgtcctgaagacaatggaggagaagcagatcccggatgtggaaaccttcaggaatcttctgcccttgatgctccagatcgacccctcggatcgaataacgataaagtgagctcagggtcggggtttattttaacctgtggatttatctttcaacatctctccaccctaatacaagcacagctagttggctttgtaacgcctcaaagaactccatcacagatgccctgattatccctgcacagctgggctttgcccagttctggctctcccaaaccgtgctgcggcgagtaatcccgaatgtacggtggagtgagcagactgacccccaggaggcacaggaggcgtagcccccaggacccacgacacttttagggttccagaaaaaagttttcattctacataaa

SEQ ID NO: 89548 - DNA, 860 bp, Homo Sapiens
  misc_feature (731)..(731): n is a, c, g, or t
  misc_feature (770)..(770): n is a, c, g, or t
aatggataaagaaaagaggtttaattggctcacagttctgcaggctttataggaagcatggtgctggtatctgcttggcttctggggaggcttcaggaaggtgaagggggagcaaacaagtcacatggccagagcaggagcaagatggagcggtggaggcaccacacacttttaaatgaccagatctcagaaaaactcactctctattgcaaaggtagcacaaacccatgagggatctgccccccccaccgccccaaacacctcccaccaggccccacctccaacactggggattacaattcaacatgagatttggtggggccatatattcaaatcatatcacctactaagcccaaagctctaagaactgtccttttctcttacaatggagctacaagattttgctttggtgattaagagaacaatacaatcttatgtaggcagggccccataatgttttaaagttactgaaaatattccaattcatagtaaaataataatattagctattatttaatgagcgaaacacggttaaagcatttcctcaaaatcatctcatttagtcttcaataagaagtttgggggcttattatgaactctcagagatggcatttggatgtcttcaggcttaggagtatggactctgtcctggggatgaggttcagaaaaacttagatgttgctggccttagcttacaaggtcaagttagtaaaaatttagcatgattaganctgggaaatgtcctgctctaggggactgcaagtgattgntgaggttgttcctcttgttacgtgtctgaatgcctctcaagccaggaagataattccttattaaaaatggccggaggtaccagcattcta

SEQ ID NO: 89549 - DNA, 574 bp, Homo Sapiens
taagcattcagcaaatgtaccagagatgtctccaagagcaccagcaaccccagctatctggatctgaagtggatatgctcagagacatcctggcccaccccaaagaagatgctgctgcactcagaagacgccagagctagccaccacccacactgcaagtctggaagctctgcaaggacccagcaaggcagcctgctcagcgaaggctttgtctcctgtggcagaaagagcaacattaagaacaagaaccccgggctggactacccctgagatttaatgaccagagctgagacccccaagaccacaatgactatggagggctgtcattaccctgcctgaccctctaatgcctctcagttcaaggaggccactgagtgaaactgaaggctggttttccttggaagccagcggcccatccacctgctccacttccctgcctcttgcagcctccgctcaaacactgtcgtggcttggcagcactacaaggcagagtgaaaacagatacttctacccacattcctatctcctctcatttacgcagattaaatgctttctttccttgttttaaaaaaaa

SEQ ID NO: 89550 - DNA, 458 bp, Homo Sapiens
tctggaaagaggacaatgccttatgggaaagagaccggaaccttcttcaggaggacaaggccctgtgggaggaagaaaaggccctgtgggtagaggaaagagccctccttgagggggagaaagccctgtgggaagataaaacgtccctctgggaggaagagaatgccctctgggaggaagagagggccttctggatggagaacaatggccacattgccggagagcagatgctcgaagatgggccccacaacgccaacagagggcagcgcttgctggccttctcccgaggcagggcgtagccagcatgcaggtgcagggccctgtggtccagactcccctgggttgggattcaagtccagggtgagcccatgtgctggagaaaatacacactcattggtctccttgctttgaaagatccaataaagtcctgaggcaaggtttggaaaaccaacttaaaa

SEQ ID NO: 89551 - DNA, 293 bp, Homo Sapiens
aaatgaaggaaatctgaaggcattctcaaacaaaagctgagggaattccctgtaaccagatctgccttgcaaaaaaaggtgaagagagtttgtcatactgagagaaaaggatgctactgggtaacatgaaaaaaatctgaagatataaaacccacaggaaaaagtaagtgtccaggcaaattcaacatactctaatgcagtgattgtgggacataaaccacttatggtttaaccttcgttgttaggaagggttaaaagacaaaacaaaaataatagcaactacaataatttgc

SEQ ID NO: 89552 - DNA, 779 bp, Homo Sapiens
agtcctgggccaaaggcctgaccctggagcccctttcagcactgactgtccatgaactaggccctacaccagactacaaccaaccttccctcctggggacccttcccttgaccccatttcataaggagggtggattgggagatcctgatggggcaggaattacaagcttgaatctccacttcggaaaacacattcctgttcaaatcaagtctgaaggttttcggtttaaaggcacactcaggagcactgccgggctccccctaaagcagcaggccccactttccaagctgagtcaactggttcaacaccgagaacatgatttatgtacagcatgggcctccaaccctgcccccacccgtgcggggggaggggacaggcttcctggaaaaccatttaaataaagaaaaatccttccggtgagaataagtcagtttcctgcgctcatactgctaaaggaccaagcaaggctgtgacaatcacctctatttttaatcttttctaaatgctgttttctgtggccacaagaacagtcatttccaggcgtggggctccactttcacacttcgcttcaaggtgtctggtttttcttagctctgaactactagttttctccgctgcttcctgcaccagaagggtactggggggagccaagactcacttgttgagcgtggctgagaccaccaaggtgtccaggggaaccacagggtccccctttctcagcattaagcgggagggttagactgactgggggaagagagacacaaacacagaccccaggg

SEQ ID NO: 89553 - DNA, 260 bp, Homo Sapiens
agacagagtgttggagtgaaatggatatgatatgctgataagatatgggaagaaggaatgtaagctcataaatgtttctagctggtgagcctatgtagattgtgatgaagtaaccaggagaggaattcaggaggaacatacttggttgggcagatgagttgagtctatacggaactgtccatagagatgtccagtaggtaataccaatacagatctaaagtctgggggaagttgggggttggagctatgtatttgggaat

SEQ ID NO: 89554 - DNA, 717 bp, Homo Sapiens
gtttggctcccggagcgccctctaccctctcgggctaccggctttctcccgaggcccggctgcgcctggcttgtggtagcatccgctgtggccaggctcggagctacactcaggaaaagtggagttaatggaggttcctagagacactcacacaattctcaatccacatttcaaaaggctcccctgagacgcaccctgtcggcccctttccgaaagcacgcgaacttaaggctggcaggtgctttaaaagacactcctcccaaggactaggaagcctctgaaatgggcttggaagtttctaatcccaaagacttcgaacccaggatctggatagcaagcaaaaatatttagatatttactcagttgaaaacgtggggggtggcttcgtggtctcttcgccagccaaatcgcgtggaaaaccacgacctcaatttttacaacagcacgaagacttacaagtgagcgtagcagcgacttcctggaacctcaaacaatgtgggacgctgcaataatgcctgagggcttttgacttacagttgccgccggagacctggggagggggtagtacttgggccggtgagtccaacctcaggaactgtcctttcaaaaatggtgatggatgtaacaagttgcatgtctgggctttatttcagtgtattaattgtgcgatcttttaaaatagctgtatttttaaaactgttttacagaaatctcaaa

SEQ ID NO: 89555 - DNA, 451 bp, Homo Sapiens
  misc_feature (253)..(253): n is a, c, g, or t
ccctccctggccccggcgctggctccttcggggaatcccgcagggcagccgggagccccagaggcaatcccctggagggagaattgagacccccggcctatccgtaagttaggtttgcccacaaagcatcacagttgcaacctcgccccccaaaagtaaagggaaagtaaaaccagcctccagtcccctagattttcattaaagaaggcttcgggacacttccaggattcccccttggcacctgggtggtaangggagcccctgctccccggctaccccacctgctgcttttgtctccgcaggcctccccccaaacccactcatcgcatttaatgcaacgcctctcccccaccccgcatcagccctggacccccgttcggccccagctcaggggtgccgacctcgggctctagttagccgaatccctacggcggactgcccccggcgacgg

SEQ ID NO: 89556 - DNA, 541 bp, Homo Sapiens
ttttttgcagattccatgtgttgaattatttcacctgtggggaggccttcccagcccccacggacctactccaacacgaagccactcccagtggtgaggagccacacagtagcagcagcaagcatatacaggcatttttcaatgcaaaaagttattacaagtggggtgaatacagaaaagcttcaagccacaaacacacacttgttcagcatcagagtgtctgttctgaaggagggctttatgagtgtagcaaatgtgagaaagccttcacttgcaagaacacacttgttcagcaccagcaaattcacactggacaaaagatgtttgagtgtagtgaatgtgaggaatcctttagcaaaaagtgccacctaatcttacacaagataattcacactggagaaaggccttatgaatgcagtgatcgtgagaaagcctttatccataaatctgaattcattcaccaccagagacgtcacactggaggagtgcgtcatgagtgtggtgaatgtaggaaaacctttagctacaaatctaacctcat

SEQ ID NO: 89557 - DNA, 645 bp, Homo Sapiens
  misc_feature (398)..(448): n is a, c, g, or t
gtagtaaagatgtgtgtgaatatttaattgtgagcatactagatgcagtattgttgattataaaagctgtgtattaatgcctttaagccccacggtaatcatatgaagtgggtagtactatttctgcttttcagaagaaaaaacaggcatagagaaatgaggttgcttgctcaaggtacctgagttagttaagtgttagggccaggacttgaatccaaccagtgtgactctagagccagtactattgatcattatatggtaaaattgtaaacaacctaaatgtttcacagtgattgttagggtccatccctacagtggggtactgccttctcagccatgaaaatgatgatagaataatataaagacatgaaaggatgtcttggtatatgtaagtgagnnnnnnnnnnnnnnnnnnnnnnnnnnnnnnnnnnnnnnnnnnnnnnnnnnnatattatgtctggaaggatatgtgccaaattgttaaatggttatttctgagtgtagttttacaggtgattgttttctttttgcttatccaaattttctaacttctacaatgaatataaattatctatcatgttgtaattaagatattaaaatgtaacttttcaataaaaaattaaatgtgttaaaataagctgaaaa

SEQ ID NO: 89558 - DNA, 654 bp, Homo Sapiens
caggcatagagaaatgaggttgcttgctcaaggtacctaagttagttaagtgttagggccaggacttgaatccaaccagtgtgactctagagccagtactattgatcattatatggtaaaattgtaaacaacctaaatgtttcacagtgattgttagggtccatccctacagtggggtactgccttctcagccatgaaaatgatgatagaataatataaagacatgaaaggatgtcttggtatatgtaagtgagaaaaaataaatttaaaaacatgattccattttggtaaaaaaacccaaaaatatattatgtctggaaggatatgtgccaaattgttaaatggttatttctgagtgtagttttacaggtgattgttttctttttgcttatccaaattttctaacttctacaatgaatataaattatctatcatgttgtaattaagatattaagatgtaacttttcaataaaaaattaaatgtgttagcataagctgagaaatttgggttttatactctgcattttaagcaagtttgtagaaattgtacatgagaatttgtaaatgcatgtagtgttttgtaattttttgtttgattccttattctagaagtaatatcaattgagtagagaaatatatcactccatccaccat

SEQ ID NO: 89559 - DNA, 311 bp, Homo Sapiens
cctcaaggacctgttcactttggcagaaggaaatctgcctaatttttcttgaaagctaaattttctttgtaagtttttacaaattgtttaatacctagttgtattttttaccttaagccacattgagttttgcttgatttgtctgtcttttaaacactgtcaaatgctttcccttttgttaaaattattttaatttcactttttttgtgcccttgtcaatttaagactaagactttgaaggtaaaacaaacaaacaaacatcagtcttagtctcttgctagttgaaatcaaataaatgtaaatatataccc

SEQ ID NO: 89560 - DNA, 952 bp, Homo Sapiens
gaagtttatgtggtgatggtgtggctttccgaaatgggcaaatattcagaagatcttttgcattttcttctgccaggaatggggaaggggagtgggggcacaatctgagaaaggacacctgtgctgttctaggcatcgctggcaagtttgtgggaagggatgggcaagggtgagtgggtttgctccacacccgtcctgtgctgctcgagaggacctgggacgtgcgagggaaacgtgggtgacggtgcctaggctgcggcccttcactgctgtgctgggttcctgcagcctgctacgtttcccttggcaatgtaaatgaagatggaggggtcggttcgtgatttcctgcggctgagaataaatgtcttgttaaaaacgtgggaacggttactcttaggtgccatggatctatgtcagggtggtcagctctggacgaagccacccacctccaagttgtacaccagtattgagacatagggggacacgcagtactgtgcaggtgttcctatgtgaagaggtgtgtttaagttccgaagatgagacgaagcaaacgagtggggcgaaccttcaccctggagacggcagtgaggaggggctgggagtatgtaaggtggaggccctcaggcgttttttctggtggaggttgccgacgtgtctcgccagcgtggtccgctattttctgtatgcggttcttatgtacgtccctttcgggggcggtactgggtggcaggatgagcacgttgctgtggtgtggtcctgtgtgtgactcgggggcatgcacggtggggggtgtttgtacgcacggcgtgtatttatctagctcgtgatgggtggctgcgccgcctccctgcccccgaccctgtgtgggccggcccacggcagccgcgcgtgtgtgtgctgcccgacggcccagcgagggtggcgtggcggctgtgcgcgtgtgctggccggg

SEQ ID NO: 89561 - DNA, 505 bp, Homo Sapiens
ggatctcccggccgcaagcagcagtttggcgacgaaggagagtgggaagccgggagggggagccgcggcggcgtggccgtgagcgcgccctcccccgaggagatggaggaggaggcgatcgccagcctcccgggggaagagacggaggatatggactttctgtctgggctggaactggcggatctcctggaccccaggcaaccggactggcacctggaccccgggcttagctcgccggggcctctctcctcgtctggcggaggctcggatagcggcggcctgtggagaggggacgatgacgatgaggccgcggctgctgaaatgcagcgcttctctgacctgctgcaaaggctgttaaacggtatcggaggctgcagcagcagcagtgacagtggcagcgccgaaaagaggcggagaaagtccccaggaggaggcggcggtggcggcagcggtaacgacaacaaccaggcggcgacaaagagtccccggaagcggcggcggccgc

SEQ ID NO: 89562 - DNA, 560 bp, Homo Sapiens
attgcgaaattatgaccagaccatgagggtatgaaggatgaggaaaagggagcagtcatggagctgtttggagggagtcataattccttagacctctgacaactggaactctcaatctgccagtgaaagctgacatgagcccaataaggatggtcttttctattcaaagatagggacaccctctttttaaaggacattcaattcaaatgtatcttctctggttaaagtatggtgaagtctgtcctgtgggcactccccattgactcctagcagctcttgagccccatcttcaggatccgtactttgatagtcactgacaattagctttgaaaatctatagttccaatcctgtgaaatgagaagaatgttgaagctataaaggaggtctttgcctgcattcagattctgacaccaaagactcctctgattatactgaagtatgtaagaaaaccttctcttgaaatcaaggaccatttctcttcatcttatcttgagctacataccaaatatgagtacacatagttaggattcaataaataatttaagatacttgtgaaaaa

SEQ ID NO: 89563 - DNA, 553 bp, Homo Sapiens
tttgaaaagatgaaagctgaaaaaagttaggtttggtgtaggttacaccatggatgttggtgcctcctactggtcctaacaaaaatataagtggtaccagcaggcactacttcgcataccaatgtgaagtaaaaattccctttcatctgtggtcaagtatggaaaaattatgaaggtcctcattaaatccacattttttaacccattaaattatccttataaaaattcagataaactactgtcataaatgcaactgcactgcctcaaggacctaaaaactgttttcctaatcaactagatggcataatcaggtaacagcagaaacagatagtctagtgaatttccgagagtcaaaatatgctactttgatgcttattaaacactgaaaactttcacaatactaactccagttaagttggtgaggttaaaaatgactaaactaaaaataatggttcaattaaaacatcccacagggatctactgtaaataatagctgcaaccaagttctgttacctcaagacttgaagtcccaaagatttcccacagtaggtgg

SEQ ID NO: 89564 - DNA, 473 bp, Homo Sapiens
ctgactgatgccctcatgattttccaccctctcttcccataaagcatcttcctaaggaaatgaccatggcctgatactcattttgtcacttgtacagagccctaaggatgttctgaattcagtggtgccaaataaatgttgacattccccttttggttgatggaagtatcagtgtgggaactgtttgcttaatggcattttataaaataagaagagcatattagcagggagggagatgatggagggagggagaagtccatttgtcttatttatcctttttgtattaatagagaagcacttcacagtcactgggcaatgccatttataggaagaaggttctgcattcctgctgctgccccggagggcttaactttttaatgaaagaataaatgctcttccactcagtagataaagtgaaatgtgaattgttaataactgtgcacggtcaataaagcgatgttttaaggaataaa

SEQ ID NO: 89565 - DNA, 424 bp, Homo Sapiens
  misc_feature (199)..(217): n is a, c, g, or t
aacttgaccacagtcttcccctgaagaagggcatgcatttcatgttacagaaatgcgatagagtaaactgtaataaattatttacaagcacctagtttgtttaaccttatgtggaagccatcactgttggaaaacaatgagaatgtatcttttagcaaaacggtgctatctggaagcttcattgtgaagatgctttcgnnnnnnnnnnnnnnnnnnncagtcatgaggcactgaagaatgagttgtgctgaaattaactcaaaggtcagcttgtctggatgagcataactttggttgaagatttttctcccttaaaaaagattttcaaagcaccagttaattacaaaaagcatgcatatttatcctcacagtgagttaagtggtgagagagctagcaaatcatacattgcattccccaaagcat

SEQ ID NO: 89566 - DNA, 698 bp, Homo Sapiens
agccagccaactatggtcctgagctccgcacacttctggttgggattatttctggttcctactgccggtttgattgaagatgtggcatggagagcagccaagcacacctgcaaaaagacattgctggaggaggtgcaggagctggaaaccaagtctcgagtcctgggaaaaccggtgctgcgggatagcaatggaaagaggctgaacgagcgcgaccgcctgatcaagaggctgggccggaagacgcccccgacgctgttccggggcagctccctgcagcagggcgtcccgcatgggtatgctttttctcaagaagaacacggagctgttagtcaggaagaagtcatccgtgcttatgacaccaccaaaaagaaatccaggaagaaataagacatgaattttcctgactgatcttaggaaagagattcagtttgttgcacccagtgttaacacatctttgtcagagaagactggcgtcagcagccaaaacaccaggaaacacatttctgtggccttagccaagcagtttgttagttacatattccctcgcaaacctggagtgcagaccacaggggaagctatctttgccctcccaactcgtctgcagtgcttagcctaacttttgtttatgtcgttatgaagcattcaactgtgctctgtgaggtgtgaaattaaaaacattatgtttcaccaataaa

SEQ ID NO: 89567 - DNA, 1876 bp, Homo Sapiens
aggacatataaccagggttaaaaaaagcaggctggtaccggtccggaatcccgggatatcgtcgacccacgcgtcgtgagagttacaggcactgcagaagctgttcagtatgatatgtgtatatgctatttttttagcagccatgtctgagcagaatgttaacataattttggaaaaattttctttaaaccatctggtttttaagaaattggtaccaaaaattgatgagtagaggcaaaaatgccccttcatctttctctatatattttccagttgaaaacaaactaagaagtcctttaagaatttataatccgttccccattaacttaatttagcttttccatcactgttaatgatcagagtaacaaagtgtgaaaaataagaaaccatcatgatgttaattaacacatttagatgggccagttaaaacagcttcataagttttaaattaatgtaaatggaatattcctcatttaaaattttgcactgcattttctactgtaaaccaaaagaggttactaagcaaaaccacctaaatttaagttggtgatttaaatgaatctcacattaaaagaaagcttgacagtgttatgaaagccaccagactcagccagtgtgtccccatgggtatccccagccatccttgctcaatccattacttatatactaactacataatgacctgttcaaaccagactctatttaatgaactgtgaatttacacagaggccattttaaatgggtcaccccatttaggattagtggatctcaaattattaaccaaacatcactccatttcaaagtaaaatattccaccagcgatttgatttattggctcttccattgccactgagcaatgcccaggaagcaggcacattgccaaggactgggggcatcttgactaggaagctcctcgtttgtgtgagcgtgggtcagaccgccaaagtaggacttcatcgtttacctacctattatcaatatggtgcttgaatatattcctataactgtagaacagtgtggaaagtgatggtaactttgaagttgttcatgttttattggctttgttttaattgacactagtagagttttaatggtctttgtgtaaattttaatggcttttccattgtttttgcttctcttaaaaagtttaagaagaatatgacctcattaaatgtgctgttttatttggaccagtcacacaaaatgtctctctagagttgactttaaagttgtttacagaaatttaaactcaattccagagattgaagttgtccaaacagctcatgggcttagtgtccaaacccctgcccagccttccctttccaagttggtgccacctccaggtagccattggtggttttcctattactgatgtggctgtggaatgataaggtcctagaggggccctggcatttcaggaagcggacctggtattccctgacaaacattgcttaggaaagagggccggagaataagaagccagcacctcatcagtcagccctgcaatgtgagacttccgtagctgttgagagtcactgcaggtgttctttcatcccgtctgattttaacccatggttgagacgttccaagttagatctgctgctcttaggtgtggggctgtccacattagggaacttgcctcaaaaacagtccacagtggcaataccggacttctgttcaagctttttaaagtgctgagccttacaaacccctgaaggaaggtgaccctttaagagaggatcatctttttttatatttattttcaccaaatagggtgatgagggttggtttttgttccctcaacccatttgggtaaaataacggatctgattagaaactgttttaaggaggggctgggctcggtggctcacggctg

SEQ ID NO: 89568 - DNA, 764 bp, Homo Sapiens
  misc_feature (454)..(462): n is a, c, g, or t
gcggccgccagcaggagaatgaagagctcggtgggaggaaggagagaaaagctcctgggggcgccgaaagctcagcccagccgcgatttcacctgtgtacacgatggcgagagtgaggctgaattaatacctgatgactttgaagaaaaaccagaaagagaaaagaaacataccaactttactttgtgcaatgtatgtaacattcagctgaattcagccgctcaagcacaaatccactacaatggcaaatcacatcaaaagagattaaaacaactcagcaatgggacgctgaaaaatgacaatgttttgccatttttgcttcaagcatttggaagttccatggtagggacatatccatttagcattatatcttcttgtttacagaacattctatgcagtttcttatatggaccactcatggagctgttcagattttcatacaaaaagaggttgnnnnnnnnnctggcaatattatctgtcacaattatcccttcacttagtagttagaagtcggggggtgctaagagcaatttccacagatgctttgtttgtggagaaaagtaggatggcccctctgcttgtcttagtgcagagcaaggaatggcttcgaagccataccttgagtactgaggtctctgtgtagtcttacttcttttctgaatttttcagagtcttctgatagttgcttgatatattttgtctatggttttcagttctatgtagtagaaagaatagagtatctccccccagtcctctaagtagaa

SEQ ID NO: 89569 - DNA, 393 bp, Homo Sapiens
cacgaggaaagaatgtactgatgaacccgcaggatgacaacgagaggatcaactcagctctgccttagcttctccgcagtgccctggatctgggcatagtagtcatgcaggctctagtgagggcttggggtttctctcccacatgatttctgcatgcctctcccactcctctctttgccctgggatcttactttaatctctgggagcaaaatctctgtcaaaatatatctgaatctttttatgtggggctaaagtcagtggttttttggagagttaatggttgaatatttgtcaccctgattttcttcagtctactctgtataactcatgtctattcatttgcacagtctgggatcagaaactaataattcgaaggattgtccaaccacaaaa

SEQ ID NO: 89570 - DNA, 412 bp, Homo Sapiens
  misc_feature (53)..(53): n is a, c, g, or t
cgagataggagcctgcctttagagtctaggccgggtgactgccagacaagccngctttccttctgagcattctatttcccatatggcagtaggagtgaattagatcagggtggcgggggtgagggactggtatttcgtgctcgagaatctgatatttttcaggcaaggggttcatttccttcatcaaacaccttcctcaaactttgagtcccactgagttccgagagtccatatggcatagctaagaagagaaatctggagttaggcttggattgctccgtgacccaggacaagtgacttcacctgcagagcctgagttcctcactagtaaaatgggggtaataatatgtcgtacttagctcataagcagggattgattgggatcattcaaataaacgtacttaacacagta

SEQ ID NO: 89571 - DNA, 881 bp, Homo Sapiens
  misc_feature (667)..(667): n is a, c, g, or t
  misc_feature (674)..(674): n is a, c, g, or t
  misc_feature (689)..(689): n is a, c, g, or t
gcggccgcggaggctgcacccggcggggcgctgatgcggcgcctggaccttcgctgcgcgacttcgggggcgtcggccgagttgggactccgcgatgcagctcctgaaggcgctctgggcactggcaggggccgcgctctgctgcttcctcgtcctagtgatccacgcgcagttcctcaaagaaggtcagctggccgccggcacctgtgagattgtgaccttggaccgggacagcagccagcctcggaggacggatcgcccggcagaccgcccgctgtgccgtgtagaaagggggccagaatcgccggcaccacgagagcccggcccgcctgtgtggacgcaagaatcatcaagaccaagcagtggtgtgacatgcttccgtgtctggagggggaaggctgcgacttgttaatcaaccggtcaggctggacgtgcacgcagcccggcgggaggataaagaccaccacggtctcctgacaaacacagcccctgaggggccccgggagtggccttggctccctggagagcccacgtctcagccacagttctccactcgcctcggacttcacccgatctctgcccgcccgccactccgtattcctgtggtccgtgaaggacagcctcaggccttggcatcctgagcttcggtctgtccagccgatcagangaggccngactcagacacatangcggggggcagcacatgcatcagcaatacacagtatgtgggagcccagacagcccaacccccgcgaccgtggattggccctgatgtctaatatgatgatggagagagctactcttccggacagaggctgcgagccaccctgcaatctaaatgctagccatggaatgcatgcacagatcggctcttgctggca

SEQ ID NO: 89572 - DNA, 352 bp, Homo Sapiens
  misc_feature (210)..(210): n is a, c, g, or t
agccggccagagctgctgcctttgacagtccctatgagctgggaaagtcaggatggtgagacagaagacttctgtgctatggagacttgaaaagtgacataacatgtttggctcagactccccgcctataaaatggaactaaaacactcttgttttaggttaagaaactagaacagatctttgacatctctaatgagccctagattattnctggtgtcagggagattaggaaaacacttcatataccgtactctattcttgccaaaaacctcaatgaatgcttaaagtaagatctattcatgaaactgacttcacattacttcctaaataaaagaaggctattcccacattg

SEQ ID NO: 89573 - DNA, 494 bp, Homo Sapiens
tagccactacaacgtggctatcccctctgacgtctcccacttccgcttccatttctttttcagcaaacccctgcggatcctcaacatcctcctgctgctggagggcgctgtcattgtctatcagctgtactccctaatgtcctctgaaaagtggcaccagaccatctcgctggccctcatcctcttcagcaactactatgccttcttcaagctgctccgggaccgcttggtattgggcaaggcctactcatactctgctagcccccagagagacctggaccaccgtttctcctgagccctggggtcacctcagggacagcgtccaggcttcagccaagggctccctggcaaggggctgttgggtagaagtggtggtgggggggacaaaagacaaaaaaatccaccagagctttgtatttttgttacgtactgtttctttgataattgatgtgataaggaaaaaagtcctatttttatactcccaacaaaaaaaa

SEQ ID NO: 89574 - DNA, 554 bp, Homo Sapiens
cacttagacacacacagtggcctgagcctccaactccagcatgaccacgcgggagcttcagcagtactggcagaaccagaaatgccgctggaagcacgtcaaactgctctttgagatcgcttcagctcgcatcgaggagagaaaagtctctaagtttgtggtgtaccaaatcatcgtcatccagactgggagctttgacaacaacaaggccgtcctggaacggcgctattccgacttcgcgaagctccagaaagcgctgctgaagacgttcagggaggagatcgaagacgtggagtttcccaggaagcacctgactgggaacttcgctgaggagatgatctgtgagcgtcggcgcgccctgcaggagtacctgggcctgctctacgccatccgctgcgtgcgccgctcccgggagttcctggacttcctcacgcggccggagctgcgcgaggctttcggctgcctgcgggccggccagtacccgcgcgccctggagctgctgctgcgcgtgctgccgctgcaggagaagccaccgcccactgccctgcggccgc

SEQ ID NO: 89575 - DNA, 779 bp, Homo Sapiens
cgcgttgaacgaggcttcttgaaggcaaagagggtgcccagcttctttcgcagtgtacgggggacaggagtggcgcccccctcagtggccgggtcctcctcgggggcccagaggcgatcctgctggatcagccttttggagaagaattcctccacgccctcgtccacgcgggcactgagcccattcccttcctgcggcaaggctgggggtacctgggggccccccggcggcgggcggtggtggtgctggcggcgcggccgcggccgggcccgggtcggatggcgcaggggctgccccgccagtggcaggtccatgcggggcagcgggccggccgggggcccaggggcggcagggctcggagagccgcgcgcggacggccccgcctgcggctctgcatcttctcccggagccgccagctcgggctccggctccgcttcctcagcagcactgtgaatgaaggggaccaggtgaagaccgtggctgagctcaggccatttctgtggaggactgtcatccttctccttctcctcttccttctcctcggggaagaaaagaccttccaattccccaggctcaaggaggctgggctcacctccatccggtgctggtagggcagggggcattgtcactgttgcctgctgagccagactctccaccagctgatcccgggctgcactcaggcctgccaaagcctgagccacaatgctctctgccaaggtccccgtgattgatagccgcatgtccctgagcctagtgaaggcatcttgcagcagctgctc

SEQ ID NO: 89576 - DNA, 552 bp, Homo Sapiens
ggcagtttaacctgctgacccatagtggaatctcttcaggatgaagttacgcaacaggatggactccattgagaaggagttggatgtgttggagagctggctggactacactggggaactggagccccctgagccgctggccaggcttccgcagctcaagcattgtatcaagcagctgctgatggacctgggcaaggtgcagcagatcgccctctgctgctcaacatgaaactgggcacccaaaactcatgggggcacaatcctggggcacctgcaggaggagcttcgcatatttaaataaataaacctagcatgctgaatgcacgtgacaccgactgacttcagggatctgggccaggagtgtggtggacattggacaaagaggccattttggctgcgggaggacactctgatctcgaagcctgccataaaggtagcaaatagactcttgggattcccctcttctgtgcacatcgttgaatgaagagagtctttttgcacaaacttcacttgaaattgtgccactgatgataaacggaatgagagccaaaa

SEQ ID NO: 89577 - DNA, 607 bp, Homo Sapiens
caaagtgaaactgccgccaagtgctgatatgtctggcacggcccaggtaccagggcaggggaaataacagcagtgtccatcctccactgtgagccatgagccgcgagccaggcaccgcccggtagctgcctgcctaattttcttcatcttaacctgcttcctgggggaaagaggctgtggggtgtttgtgagccctgccacgggcagtaccaggggtgaccctgcgatggaccactcctgctctttttccctccctgagttttagagtctccggcggacctgtccagaggcctgcggccttttcatcctttatgctctccaccccaggagagccccttggtagatccatcttggagctgtgtccagcagcctggaccacctcaaggccctgtccctgagaaaggatgcaggatgaacattacaaaatgctgatgaaaaatatcaaggaacatctgaataaatggagagacttcccatgttcatggatcggaaaatgaacataataacatacacaagcttattctacgtggaaaaacacaggtccaaaaatgtccacaagatttctcaaaaagaataataaagtggaagcactcacttctcccaataa

SEQ ID NO: 89578 - DNA, 440 bp, Homo Sapiens
  misc_feature (21)..(22): n is a, c, g, or t
  misc_feature (42)..(42): n is a, c, g, or t
gataatcaagctccactttcnnttacccctctctcaactccncaaatcttccttcaatgagcattcttcccgcaaagtctggagtcagggaaatcaaaagtctggtttccttcctaatcctcgctggagcattccccgtgctgctgaccgaagagttgtactatctgccctgaggacgcacagtaggactcacttcctggcttcccagtgcctgggtggggtcatgtgactactctggccaatgagacgtgagctgtcccggcgtaggggagcagcagcatctgctcccagcgccctgacatcccacagcaagtgaagacgggctgctcctccggcagcctaggtccaggggagggaggcagggagcagagcccatggccaggtgcgatggacactcagattgagcaaggaataaaccttgttattttaagccaaaaaaa

SEQ ID NO: 89579 - DNA, 544 bp, Homo Sapiens
ataaatgtcaatggcacttggtaaatgttgatgaaaataaacagtaatttcacaaagaaaattgtatggtatttctttctcaccttcattgaaaaaataacagaaagggctttggtttcaatttttgttctccttgtctaaacacactaagaagtttgaagaaatggttcagaaatttaatgcaaggatctttatgaactatttgaagcatgccactcaaaataaaccccaaatctggagtaaacaaaaaagtccttgcatttgtgtgtatctatccactattcgagtctgaatcccagcattctcaactaaagaaacaatcaagtggtattttttgtgaccctcatcaagtgcagtaatttcactgacttttgaaataaggcagctaatttggagggggtaacaatcccaacagtacagattaagggaagggaagcatgtattttttggaggcatcccctggatccattggggctgccatgatacagaaccacacgctcctcaccctccttaatgcagctcttccttcacagcctccccagtt

SEQ ID NO: 89580 - DNA, 481 bp, Homo Sapiens
tatcctattcactgactttaatatctatccctaggtaagatagggataaatctccctatcctataaattcttacctgtaaattatttgagggaaggagaaataacaaggggtagtgactcttggcggtgttaaagatggcatagcaaaaggcagtgcagtggtaatttttgacagattaagatcagatgttttcggggcaaagcgctatttgttttttgacttccagtggtctgttttttgacatctgtttgtgctgtagtaaaattaatttatttacttttataatgttttaaacacttagccatagtttgggttgcttccagctctcataagtaaatcactttgatgagagtttatgagaatctttaaataatttagggaccaataaaatactgttcttgccagaagatagaaatgatacccatcaatggtactcatgctaaaacttagtgagttaaaagtatttgttttcagagtttt

SEQ ID NO: 89581 - DNA, 521 bp, Homo Sapiens
tcaatgacttaataagttaactatcatgcatcttactaactaggggatattttcctttcatgatacagccatagagtaatacaatgttatacaagaattccttctttggtctaaagtcctcagactgctaatgagaaaacaggcctggagaggttaaatggttagaccaaggttacatagctaattagctgcagttggaagccaagtatacccactttaagctgaagtagatgattttctgtgagtctaatatggctgtagtgatttaatagaaacccttgtgttttgcttttctcccttcccctttctgtttcttagagttggaaaggctcctgggtaaatttggacaggatgcacaaagaatagaagattctgtgctgattggatgctctgagcagcaggaagcatggtttgctctggatctaggtctggatagctccttttccataagtggtacatgacattattcctaacgggtacttcccagtggtcttcagaatttgggatttcacataatggta

SEQ ID NO: 89582 - DNA, 303 bp, Homo Sapiens
ctggtgattggaggagaaagcaagccatctattggtgaggcctcgaaaggtttttctgggggagaagagtagaaggagttgtaactatccctttgcttccttttttctacagcagaaacatgccagcgtctttttttaatggaagatcatctatgaaaatcagaaaatggaagaggaccttctacaatgctactcaaagccaggaaatatttttagcatagttaataacagatcgagggataagacagttgagaaattcattctcaaaagtataaaaggcgtgactgtgagaccggtatttcc

SEQ ID NO: 89583 - DNA, 594 bp, Homo Sapiens
gattcaccaccagctgctctgacagcaacaccactgcagcatctaatgtggacaaagtacaagaaagcagaaattcaaaaagcaggtctagggagcaacaaagctcctaattctattacccactacatgacatgtgggccaagtgagagaaaagtgtccttcagtttctcagtatgaagcctttatttctgaagtaacaagacacctagcaactataggaatcatttttaaaaatctttaaggagacttttaacagtccttcgtgaatagagcaggcaagaaatacaaaccttcattccttgaatcaaggagcactactggattcaactgccaaaattttttaaaggttttaggacttactataccttgtactgttaagatctactgaataaaggacgttctctcactaaggaccaggtgttttaaggttaagtgtttaaagaagtactccaagaacaatctgcttttttcatcatttgttttatgaatttatccatgtttgcttaatgcttctgctaagtgttagccaaaatctagccatttatatttagtaatgtaaacctaaattaccagctgtcccattttgtggaatgt

SEQ ID NO: 89584 - DNA, 496 bp, Homo Sapiens
tgccattttcaaagccgaggtggcgaggtgtcaggctgcagattcggacggtcattctccaaggctggatttgcaggtcaccacccggtacctatagacagagggtccagcaggctggttagcagacaccgctccagttctaagacgccagcagtgggatccacgtttaaggtggatgcggctgaaatgggaattatccccccacaggctttgctgtacagttctaagaagccagcagtgggatccacatttgttaaggtggatgcggctgaaatgggaattatccctccataggctttgctgtaaatgaccaggtcctttagaatgtacaacctctcagtgctgctgcaagctgggagctggatttctttctgtcttctttttaaaatccgttccttgtgttttcctaaatagccctttaaagagaaatgcaaccccagggctgctgaatgccagggaagactcccccaccccgcagctttgaactcagcaaacc

SEQ ID NO: 89585 - DNA, 635 bp, Homo Sapiens
  misc_feature (112)..(133): n is a, c, g, or t
ttcaaaatctccatttcaggcatcccgttttcagacccccacctcgtctttctagctcattctctctagcacctggactccaacctaggcgacagagtgagactccgtctcnnnnnnnnnnnnnnnnnnnnnngaggctactgtacttatttttatatttgactacattaggtctttttcacgggaagctgttgttttctttccgtctcattactgtataagagtttccttaccctttatgtattgaaaaatatataaattccaaacttaaattatttggataattaagtttttgcagatcttggaagtaaagataatgttttgatcatattaatgaataaagttaactgtttcatttcacttacataagttaactggccaaattggatttatatgtggtttcatccattggttctgtcctggccaagttgcttatgtcatccatagacaggataattctttcttcaatcacaagtaggttaatgttcttatttgagaagttgataattgtcaggtagtaattcacactggtagtaaagatgtgcttttgttttcttaccaaatatttttatgtgtttccagagttcttttcaatagaaatattttcaataaagtgttaatagtgtaagataaaa

SEQ ID NO: 89586 - DNA, 298 bp, Homo Sapiens
tttaaaatccaaaactggaacaaaatgaaagccgtccgtgaatcttggctgagtttgggccgtaattcattcaagtagctcattacgcatcggaattacccaactgccgaagcttctgaacagcaggcaattctagagcttcactttcaactttctgctcttattgatttatgaaaccttactaccttcaaaatcatgaaatattccaggcatgcaaagaggcacagagaatattttaatgaatatcgtgcacccaccacccaaccgaggaaataaagcctgacagttacaatcgaaa

SEQ ID NO: 89587 - DNA, 602 bp, Homo Sapiens
gactgaccttcacgcagctgcacaatgctgcatttggaagccggacctgaccacattcgtttccctctagattcatgttctggagaaatgaaaatgctgtctcagtggaatgttgattagctggagtggagacccaagatctctgtccaggcagggccatcaactagaggtggccctgtgattgatgagtgaccagccatgtgtggagaaaagcaatgtgaacaacttctgacttcgctgttaaagaaaattggtctgtcccccatttccttgcattcccattcttactggctgaaattcaaagctgataaatggagctagagcagatagctgggaaaatgagttgagggtcttacattaagacttgccagcaagaagaagaatttttccagggttcctgacaccaccaaattgttcgatcagctctgaactctatactgagattctttaagtatgagagacatgaactttgactggcttaagtgagctattgaggtctctttgctattgtgacctaactcaggggtcagcaaataacactctgtgcgcaaaatctgacctacgatctgtttttgtaactaaataaaatttcactgaaacac

SEQ ID NO: 89588 - DNA, 478 bp, Homo Sapiens
gaggtatgcctgcaccaggtggagtccatcagcgacctacatagtggagcaggcacactgcgcccctatctaactgaagaggcacgaccgtgggatgagctgctgggcgttttgccgccgtcactgtgtgcccaggctggctgcagccctgtgtacagacgaggagggttcctgctgctgctcgcgctgctggtgctcacttgcctagtgctcgcactcctggctgtctacctgagcgtgctgcagagtgaatccctgcgcatcctggcacagcacgctccgcacgcaggaggagacactactcaaactccgcttggccagcctcagccagcttcggaggctcaactccagtgaggcccaagcacccagctgagatgccatttggatctggggcctgggggtgtgtgttggtgggggaataaagtggctatgggcaggtctctccttccctactgctggctgccacatctacactaaa

SEQ ID NO: 89589 - DNA, 483 bp, Homo Sapiens
  misc_feature (458)..(458): n is a, c, g, or t
gacgcaccgatcgccggagggacagacacacgaccacgcggcgccaccgcccacgcctccacccaccggcgcccaagtcctccccgcgccgcctcctctgtatggcacaaactttcctcccgggacggaacacgctgcctcagggagcccgcgaccgcgccttctcctccgccggtcccatacggtaggcggcggggggggcgcgacagggcttgggggtgtcgacccgcacaggcccctccgtttggccccatggaccgggtctctggcgggtagtgggaaccgcgcgtggcgcctccctgcaggttgctctttgccggggctccggagctgccagagcagcaccccctggcccgcgtcggatggggacctgggctgatccttgggacgcctggatcttgggccaacttttttttgcggggaacgggtgtaggggagtcattcctggagcgatgtanggagaggcacttcggagcagcctgt

SEQ ID NO: 89590 - DNA, 1065 bp, Homo Sapiens
gcggccgcgggctccggcgagggacagacgcaccgatcgccggagggacagacacacgaccacgcggcgccaccgcccacgcctccacccaccggcgcccaagtcctccccgcgccgcctcctctgtatggcacaaactttcctcccgggacggaacacgctgcctcagggagcccgcgaccgcgccttctcctccgccggtcccatacgctgctgaaatgggttgcggattgaacaagttagagaaacgtgatgaaaaacggcctgggaatatttattcaactttgaagaggcctcaggtggaaaccaagatagatgtgtcctatgaataccgcttcctggagttcacgactctgagtgctgcggagctccctgggtcctcagcagtgaggctggcctccctgcgtgacctgcccgcccagctcctggagctgtaccagcagggcttctcgctggcggccctgcaccccttcgtgcagcccacccatgagcgggagaagacgcccctggagcacatctttagagccatcctgatcaagaaaaccgacagatctcagaaaactgatcttcacaatgaaggctacatcttggaattagattgctgttcctccttagaccacccgacagaccagaaactcatcccagagttcattaagaaaatccaggaggctgcaagccagggcctgaaattcgttggtgttatacctcagtaccattcctctgtgaactcggcaggcagcagtgctccggtgtctactgccaacagcaccgaggatgccagagatgcaaaaaacgcacgtggggatcacgcgtcactggagaatgagaaaccggggactggggatgtgtgcagtgctccggctgggagaaaccaaagcccagagcccagctcaggccccagaggggaggtgcccctcgccaagcagcccagctcaccctccggagagggagatggtggagaactttcaccacagggggtgagcaagacactggatggaccggagagcaccccttggaggtgcatgaagagccactctcagggaaaatggagatcttcaccctttt

SEQ ID NO: 89591 - DNA, 443 bp, Homo Sapiens
tttttttattctgccccatgtttattattgtgctgtatcggacattttagattggaaaatgtgctacaacagatcagtaatagtcacagatctacacacaacaaatgtaggtccactaggaaaataattcctcctcacaactttaaccgtatttgacatttctactaacaacataactttatttcctaccctttgccttaagattacctttctgaaaccagtatcagatctctaaaatagcctggtacttcctctaaaatccttcactagttcataggcagtcagatctttctaacattccttttttccccattttctaaggaaaatctgaactgtagatttttaaaaacaaaaacaaacactttttttggcctgtaacccacaataaggaatatgttttacaaggtaatctaacacatatacacatgaacaaatgtttactt

SEQ ID NO: 89592 - DNA, 311 bp, Homo Sapiens
tgagggggcgagtcatccacagtagactctggcctcccaggaaaccctgggagcagagcacccacgcacaccccgaatggctatggaagctgcagggcgccagggacactgggagtccctgctctcatggcaaagcagggacgggggacttaaaagccaccaacaggaaaatcggggaaaaaagggagatggtggtaacagttggacactatttcttggcaaaaccgtggaaaaacacgttctacaccagcaggtggcaaattgtggccgccatctgtgtttgcaaataaagtttaactggagtttgaaaa

SEQ ID NO: 89593 - DNA, 447 bp, Homo Sapiens
gcaaaggggtattaatcaatgttttgattaattacacgtacatagaatttaagacaaagtaaaggctcttccatccccgcaagtccccagagaaaatttataacagcaaagtatcatcattactaaattagagcgtgaccagcctactggtcttgcccaagtccacgctgacttgggaaaagtgactgcctgccgtgatggaagggaagtactcaacccgacagactcagccctttttaaaaactggaagcaggggtgagtcatggaactccctctgcagcagcacctctatcttcccagccctgggctggcgacagagggggaaaaaaagttggctgaatggaccagcaggtgagatgaagagttgattgtcttcaaacgtaaaatatctcaagcaagaaaagaagaaaaaagtctcttcaataaatgttggcaatattttcgaaa

SEQ ID NO: 89594 - DNA, 432 bp, Homo Sapiens
  misc_feature (206)..(206): n is a, c, g, or t
ccaaatcttaactgtttgcacacagaaaagcactgtcacaggaaccaaaaatcagtgacaagcagtgttaagatgttttgggtacttcagtcaacaagctgccatcttcaacatggggcatacagagcagttttcaagcctctatagaagtcatcttacagcgagtctgagccagtgaaatgcagttatagtgatatgtgtactcnccaaggtagctctcaatgctccaactcggaaatactcatatgttgcttctgacttgaagcagaggaactcacaacctaagaagccacaggcttgaagatggcagagcacaagatggcagaagtttggaatgaattactacttgaaagagaagctcttatttaccaagaaatatattttggaatttgcatgagtaagaaataaatccaattatgctaacattaaaaa

SEQ ID NO: 89595 - DNA, 297 bp, Homo Sapiens
ctattttcttcactgcttaatccttagctgttagaactgtgtctggcatacagtaagtggttcagtacctaagtgttgagtggataaatggatggatgggaaggatggataaaaagagtgcctggtagacctaacgcttcagctgccagattcctgaaggccccagaggaagaaaatgctacagaaatcaagagaagcatttaaggcacatatcttcaacatcaactcttcctatccacccacaatgctagatcccaacataaaatgaaataaaatttctacagaatcatcagcaaa

SEQ ID NO: 89596 - DNA, 178 bp, Homo Sapiens
gtattgtgatgctttatttgtacatttttttcctttctggatgtaattttaatctcttgccattcattagtgttatttcattgtaaacgttattgtgccaaatgtactgtattcaaaaggatgtgaatgtgtattgtttcagaacctaataaatacaatgacgttaagtcttaaaaaa

SEQ ID NO: 89597 - DNA, 559 bp, Homo Sapiens
cccttcctccctccgactcaaagaagacagtggaatccaaagaaacagttatgatgggggactctatggtgaaaataaatgggatttatttaacaaaatcaaatgctatttgccacttaaagagtcacccacttcagctaactgatgatggaggcttcagtgaaataaaggagcaagaaatgttcaaaggaacaacatctttaccatctcatctcaagaatggaggccctcactgtagattgtggaatgatgactaaggcttgaaagccttactaataaactatcgagtgctcttagtattgttggaatcaaaaataagaaaagagggcttctggttaaaggcacaaaggcattctccagtaatccaatgaaagcagcaaagaatgaaaaacagagaagtaaatttcatcaacgaaacaacaacaaaaaaatggctacgaccctgaactacacaacatgaagcaaactttacactgcagtataggcttgatttttgttggtctgtctagcaaacaggccttctcacattgtgtaataaatgctgctcagtccgtaaaaa

SEQ ID NO: 89598 - DNA, 505 bp, Homo Sapiens
  misc_feature (25)..(25): n is a, c, g, or t
  misc_feature (46)..(46): n is a, c, g, or t
cgaagattagaagagtaagcaacgncagggctcgcttattcagggntgcctcccagcgggcctttttgccggacagatcccttcctccctccgactcaaagaagacagtggaatccaaagaaacagttatgatgggggactctatggtgaaaataaatgggatttatttaacaaaatcaaatgctatttgccacttaaagagtcacccacttcagctaactgatgatggaggcttcagtgaaataaaggagcaagaaatgttcaaaggaacaacatctttaccatctcatctcaagaatggaggggaccaggggaagagacatgcgagggcctcatcatgccccagtagctcagacctgagcaggctgcaaaccaaagcagtcccaaaagctgacctgcaagaagaggacgcagaaatagaagtagacgaagtcttttggaatacaaggattgtaccgattttgcgtgaattagaaaagggtaaaacacaaacaaacaaacaaaa

SEQ ID NO: 89599 - DNA, 493 bp, Homo Sapiens
ggggaggaggggcgggacgccgtggagcacggcgaccggctgagcgtcatggagggctcaggggagcagccgggcccacaaccacagcatcccggagaccaccgcatccgcgacggcgacttcgtggtgctgaaacgtgaagatgtgtttaaagcagtacaagtccagcggagaaaaaaagtaactttcgaaaaacagtggttctacctggataacgtcattggccatagttatggaactgcatttgaagtgaccagtggaggaagtctacagcccaagaagaagagggaagagcctactgcagagactaaagaagcgggcactgataatcgaaatatagttgatgatgggaaatctcagaaacttactcaagatgacataaaagctttgaaggacaagggcattaaaggagaggaaatagttcagcagttaattgaaaatagtacaacattccgagacaagacagaatttgcccaagataaatacactaaaa

SEQ ID NO: 89600 - DNA, 389 bp, Homo Sapiens
tggcccatcactttgtagtttcttgaacaaatatgagagatgctgttgccagccaaaatgctacaaccattttacaggaaactagacgacatgaaggctgacacatcaagtgagagaagcaaacactgagagggaaagtccctaagtccttaataacctcactgactgtgctggtcctggaaacaacttgttttctggactctcagagcaagaaaggaattatcaagccatttccaactggggttttttgttaccagcagtccaatacattctaactgataaactacctcaaagaactattgcaaagattaagggggaaaggtctgtatatagggctgtccagtggacacctccgtgataataaaaatgttccgtgtctacactgtaaa

SEQ ID NO: 89601 - DNA, 496 bp, Homo Sapiens
gtctctctcctgctaatcttccagacctcaaggacctttccagaccaaggtcctggaggtgaagtgaagagagcacaagctttgaactcatcagacaacaaaattgaagatgaggatgtagataaaaatgccattattacggcttctccttagtctgtcggaggcattcatttgtctggaggaagttagaattttttccaaaaatataagactgaggtaatattagtcttttgacatccaaatggattatgccatgcatcaactttaggattcattcacagaaatgtagcacagcatggtcagaaagaagaaggcttaattttacaaaggtgccttgagtttttatgcagtttggatactgaattgaaacccagtggattgtcataggcctacaatagcagaatgagttgactcaacaataaggtagcgtagactgctggaccaatttgcaggctggaggatgtggcaatcaactcagggttctgcagacagcaaa

SEQ ID NO: 89602 - DNA, 371 bp, Homo Sapiens
atcaagcatattcttacagcagcacaaactaagacagggaggcttttgctatctctcctctgaattgtcacaattatcttcgaaatggtctttctactttcactttcatggctttccaataattctcaatacaaatgcatgattacataaacatttgctcaagaacctgtataaaaagactggtggatagtgactagatcctcaggatatgcagggctcaagagaaatgaaatatcttggggatatagttacttaagacgtgatactgtcacagtgaatttcacagaagatggtgctgccctaactgaggttcaatccatgtataagccagaccaatctgaagacaaataaagtatttcacagccacaaaa

SEQ ID NO: 89603 - DNA, 447 bp, Homo Sapiens
ttttcaacaaggctgtttctggcctgttttccctctcagtactacatggcaagtcacgtctccaaactgaggagtgtgcctgaagagtcaggtctggcagagaaaggatttcttgccctaggtttaaacaagcaatgtcaacataacttccaaaggcatcggctgcttggaagaagtgaatcccttgggtcattcccctgattattgtgaacccgtggctgagcaggacagaaatgtcacacaggtggactgagaacaaaatgatttcagatatgggagccccaaagtggcatcccaaggacaagtgctcagaattgcatgacttggttttctgttgagctattctgtcttggataattacagcatgagctcttggccagtggtgggaattaattggttttaattctcccgcaaagattctcttaagtaaaagtaaaacatttgcaa

SEQ ID NO: 89604 - DNA, 543 bp, Homo Sapiens
  misc_feature (79)..(113): n is a, c, g, or t
agggaatcagtgggactatttgtggcatggatggcctattcctcctagaacccacgtaagagcttggatgatttagttnnnnnnnnnnnnnnnnnnnnnnnnnnnnnnnnnnnattcccacctccacccccttttaggttatgggagttggtgttgggacagggtggcagagaatattggagtcaatcctagcttggtctcttgccttccctcttttcctccatccatcgtggacaatgcctgcaaaattttcacaggaagaaagcctattcaggatattaacttgaaatttccagtgtcctaagagcctctcatgaagcccagttctaataagtggcaagctgctctgccggggtcatctcctgggtcatcggactgattgctcaagttctgcaggagaggaagcaccattagaacaactccatcagaacagctccaccgggacttgtgggcctaaattttcctggcctaacgggtctgtctccaaaccctctttcctaagagctgagcaaaccaaccataataaacttgacaaaagacaaa

SEQ ID NO: 89605 - DNA, 539 bp, Homo Sapiens
  misc_feature (19)..(19): n is a, c, g, or t
  misc_feature (144)..(144): n is a, c, g, or t
aagaaaacagaaataatcntatgtccctctcttctgaatacagggcatgattttttagaaggaattagtcccaaaagtttttgagtctaacagaaaagaagaagatacttttacctacagaaattgtgtgggcctttgaggttntatgctccttttaggcataacatggtgttgaagccatttgcagttagcagtgacctgatagtatcttatggcaactttgtatttcaacttctcagcttgtgtgatccttctattgctgactatagacccaggaaacctaaaagctacatcttacctttctaattctttactccttggccatgttctgtttctagcacagtagatattcacacgtggcaccttatgcttacctaggccctcataaagcaaaatgctctttgtttgggcaccaatgatgtcagtatagaccagcaaactagagggcagcaatctaggtccttaaccttttaaaatagactgatgtactagctgcctttggattttggtatctcaataaacacattagtatgttgaaa

SEQ ID NO: 89606 - DNA, 522 bp, Homo Sapiens
gaggtagaccgcaggagccgcgccttcctaacctcgcctcggcattcgctccacagtggagagtgggagcctagctgtgcttgatgctgaatgcctgttttgagagtgtgagtgggatcatctacagtaaatacttgcaaagcatggcactgtggctctggggagctggtacgcctgtgctgtaaccatggtactcagtccttccaaagtgtttattaatcaagcacctgtcatgtgccattgagcccacgatggggaatgaggacagtccctgcccccatgaagcttgtgtcctgttgggaggacagacaggtggcccagcagttgcagcatggtgtgtgcacacgtttggctggtggaaccatgtttctaccactcatggtcaaaaaaagcccaccaaagtcctgggagttcacatctgtgtgatgatacggcaacattgtttgtaatggaaagactggacacccccagtgcccatcagtgggggagtcattaaataaactatggtatgtgaaaataaaa

SEQ ID NO: 89607 - DNA, 440 bp, Homo Sapiens
gagaaaactcacactgccccacctggccataggcccttgaccccctttcttggagcatttacaaaaaaagagcttacaattgtgagtccttcctctgtccccttgacacgtatgtgttctctcctacaattcaggagtatctttcttaaggacctgaaagccattcctttgaaatttaatcatctggaaggttgctatctcccattcttggtgggagggtagaatcctgacttcagtgataatcgccagctagctgacgcagctgatctaatcacttttatactgacagactttgaaatgttttgcatgtattccggctctttccccctcccttattctctctttaagctgctcaattatctctgcattgaaatggaacgctgctctttcccctactgttagtaattactgaataaaattggttttcaccactttaaaaa

SEQ ID NO: 89608 - DNA, 456 bp, Homo Sapiens
  misc_feature (67)..(67): n is a, c, g, or t
  misc_feature (123)..(123): n is a, c, g, or t
atagggtagccagaagatgaatggtatttgtttgtccccccacatcccactgcaaccctagacccanctgccccaaaggcagtagaagtaatattactagtgaacaaatttcagcccacctgncatgcctgcagtccattctaggtagaactagggtactcagaagcaggcactggttctttgctgatggtaaacacttataggagcattggagttcactacaccaggagccacttttcctcagggcagttcagtgatttcccagagcaaaagcaagaaccaaagggaatcccaaccatttctcctccctggtccgctccatcacaaagtcacacccacagcttcccttgtacctcctctccctaagcatgcagctctttgaagttttctgaatgttttgaccactagctaaaagaagacaattgtggggtaataaatactccctttctatgcaaa

SEQ ID NO: 89609 - DNA, 377 bp, Homo Sapiens
tttaattaaatgcacaggtatgagggctttcactcagaacttcagttcccatgactacttttacataagattattacatatgttactcaaccgtacttcccgtatttaccatgcagattttcaggaacttgtccctcacagaagaatgttctaataaagcatggtaactgctacaaataacaaagtaccaaataccatgggaaaacggaagggacagctattaattctaaaggaaaaacctgaaagaagtttaagagtttgatctttaaaagtaaaatttcaagtggagaataaggataaggatacatcagagaaatggcgggaagatagtcaagaaaatagaatggtgagttttaaccaacactatacagtagtct

SEQ ID NO: 89610 - DNA, 401 bp, Homo Sapiens
tttcaaagatttaattagtcgaaaaagcacactttaagatggacatattgttcatttcagctaacctgcgcaattacaaactcgctacagaagaaatgataagaaacaaaatactaacaatgaacattgtggcagatagtgtggagggtgaagcattgtagaaaatttgaggttcttctgtctccatgggaggttttagaaaagcatctatacagacaccatcagcaatacacacatcaacagcatcagtgtcttttacatcagctttctccttacaactcaaggtgctataacagctgcaataaaatttttcagaaaattgctccaggccttcaagtgtccggtttccacgtactgggaaatttccacccttctccaatttgaatagcaaaattatcggg

SEQ ID NO: 89611 - DNA, 702 bp, Homo Sapiens
tgaaaagtgtcttcctttcttcaatgaccggccgtggaggagggcaactgcggaaagtgccagtgaatgcctgccctgtgattgcaatggtcgatcccaggaatgctacttcgaccctgaactctatcgttccactggccatgggggccactgtaccaactgccaggataacacagatggcgcccactgtgagaggtgccgagagaacttcttccgccttggcaacaatgaagcctgctcttcatgccactgtagtcctgtgggctctctaagcacacagtgtgatagttacggcagatgcagctgtaagccaggagttgatgggggacaaatgtgaccgttgccagcctggattccattctctcactgaagcaggatgcaggccatgctcttgtgatccctctggcagcatagatgaatgtaatgttgaaacaggaagatgtgtttgcaaagacaatgtcgaaggcttcaattgtgaaagatgcaaacctggattttttaatctggaatcatctaatcctcggggttgcacaccctgcttctgctttgggcattcttctgtctgtacaaacgctgttggctacagtgtttattctatctcctctacctttcagattggtaatttagacctcatcccccaacctgttagaactgtgagattacacttaaaatatttttaaaaataaaatcagtgactcttta

SEQ ID NO: 89612 - DNA, 1052 bp, Homo Sapiens
cttcttccgccttggcaacaaatgaagcctgctcttcatgccactgtagtcctgtgggctctctaagcacacagtgtgatagttacggcagatgcagctgtaagccaggagtgatgggggacaaatgtgaccgttgccagcctggattccattctctcactgaagcaggatgcaggccatgctcttgtgatccctctggcagcatagatgaatgtaatattgaaacaggaagatgtgtttgcaaagaccatgtcgaaggcttcaattgtgaaagatgcaaacctggattttttaatctggaatcatctaatcctcggggttgcacaccctgcttctgctttgggcattcttctgtctgtacaaacgctgttggctacagtgtttattctatctcctctacctttcagattgatgaggatgggtggcgtgcggaacagagagatggctctgaagcatctctcgagtggtcctctgagaggcaagatatcgccgtgatctcagacagctactttcctcggtacttcattgctcctgcaaagttcttgggcaagcaggtgttgagttatggtcagaacctctccgtctcctttcgactggacaggcgagatactcgcctctctgcagaagaccttgtgcttgagggagctggcttaagagtatctgcacccttgatcgctcagggcaacttcctatccaagtgagaccactgtgaagtatgtcttcaggctccatgaagcaacagattacccttggaggcctgctcttaccccttctgaatttcagaagctcctaaacaacttgacctctatcaagatacgtgggacatacagtgagaggagtgctggatatttggatgatgtcaccctggcaagtgctcgtcctgggcctggagtccctgcaacttgggtggagtcctgcacctgtcctgtgggatatggagggcagttttgtgagatcgtgcctctcaggttacagaagagaaactcctaatcttggaccatacagtccatcgtgtgctgtgcgaccctgctatggacacagagagacctgga

SEQ ID NO: 89613 - DNA, 1105 bp, Homo Sapiens
ttttcacattatgcattgttatctactttttatttataaacagtggaaccaaagccactacttgagttatacttaaattttttttcctgctttatttcaccaaatttgttttcaaaactatactcaaccaaaacctatttggcatttattgtcactaagatgtagcaaagaaaagagtttgccaaattttaatcaagattagataagattttaatacaacatactctgctcatttgaaataaaccagtatcttccacggtttcttcaaaatatgcgacatctcacagaatactgtaaatttcagtgcaaaggatgccaccccagagacactgttgacttggcttgggtaaaggtacacatgaaaactgcttaaattaaatatctacaaaaaagaaagccaaaagacttgttttggttgagaacaataggagtccacataagtcttcaattctaggagcttcaaaatgaagaaaaggctgagatgtgttgtccttcatgttcctgttcatccaagttgcttccctttgaagaactaagaaaacactacactccataatgtattcttttggaggattccataaagtttaagttcaacatctcagcataaggatgtatgctatagagtagctaaaatccgtaaaaaggagaccaccaagacgcaaaatgtctgtccagtgcccagtgtgagggcttcaaatggtatcatttccttccctgctgctcggtaaactccagcaatagctgcaccatatttgtgatgtctgagggtgaagagggccagtaatccagcagggacatgaaagaagagagaagacaccagtgcccacaggaatacaccataccacatctctgggaaggagcagagggaagtagagttggggcacagggtcccgttgcccacccgcggcacaaccttcaggctcaggatctgctgcaggagcccggccgacccgccgctgccgccgctcccctcgcgctccatcccgtcgccattcaccacagagaaatgagggacgagcgcccgaagtgcggtagcggccggcgccgactcaccctcgcggacgcgtgggtcgacgatatcccgggaattccggaccggtaccag

SEQ ID NO: 89614 - DNA, 890 bp, Homo Sapiens
  misc_feature (79)..(113): n is a, c, g, or t
actatctgaccacatatggcgcatcgctctacagttcgaacgaccgagcgcagcgagctagttagcgaggaagcggcgnnnnnnnnnnnnnnnnnnnnnnnnnnnnnnnnnnncagtcgacggtaccggacatatgcccgggaattcggccattacggccgggggggcggggtcccgggtgcgcagcctgctggcggcgtgggaagctgtcctccgggaggggggccgtgctgctcgcccggagcccctttccccatcacttcttcggcggtccctgaggcggagccccggagtcccgctgggcgtgagatgcagagagcggccgcagagatgtggtatggtgtattcctgtgggcactggtgtcttctctcttctttcatgtccctgctggattactggccctcttcaccctcagacatcacaaatatggtaggttcatgtctgtaagcatcctgttgatgggcatcgtgggaccaattactgctggaatcttgacaagtgcagctattgctggagtttaccgagcagcagggaacggaaatgataccatttgaagccctcacactgggcactggacagacattttgcgtcttggtggtctcctttttacggattttagctactctatagcatacatccttatgctgagatgttgaacttaaactttatggaatcctccaaaagaatacattatggagtgtagtgtcttcttagttcttcaaagggaagcaacttggatgaacaggaacatgaaggacaacacacctcagccttttcttcatttcgaagctcctagaattgaagacttatgtggactcctattgttctcaaccaaaacaagtcttaacggcttcctatatggtagaataattcactttaagcagaaatc

SEQ ID NO: 89615 - DNA, 502 bp, Homo Sapiens
  misc_feature (42)..(43): n is a, c, g, or t
  misc_feature (94)..(94): n is a, c, g, or t
atcaaattagacgatgctgccatgttaattctccaaacgagnnacaaaagtgtatagagaacttggtatgtcaataacgtccatgtgaaccagnactagcagtgtggatcatttctgcaattaaggctatggcgcggtggctggcttgcacatgtcaaattaacagacagcaatgctttttaacagacgccgcctagaaccttctcagcaatcagcttgtgaaaattggacatcggatcgggagttgttatgatggatattacatgctcgggccattagcaccccaataattggtcgaaaggcttttccttttccatcaaagtagtactcagacatttcctgaagttctgttgttgatatgagcagttcctttctaatgtcctcatacagacctttcaagtctctgcaaccgaatttgaaaggatcggtgatctgtatatttctcaccactgtgtgttttactgtccggggttgtgtgataaaaccgtgatatactgtaaaa

SEQ ID NO: 89616 - DNA, 936 bp, Homo Sapiens
agctctggaaaagggggtcgaccacagcatcattgtcaaagtcatcctcacacacatcaccaacgccattgcctgggcagagtgaggctgggtgctcaggaaggccctggccactgccattaggcaacaataccatctgttgggcctgcattcctgacatctttccccaccttgcccttcctcacttcccaacagggcttgctgcctccacctgggcaaaggcaacaccagtctaacgtgctctgggtccgcaggcttaccatctgagtccttctgattgggattgggtaccaggcggcagttatcgggaccaggaggcacataatctgggatgccatcattgtcatcatccccatcacactcatctccaagtccatcgttatcagagtccagctgggagctatttggcagctgtgggcagttgtccttggtgtcctgatgcccatccccatcgctaatcagaagaacaggttggtgaaagtcccgaactttgtctccccacccagaggacaactggccaggaaatctgcctgtttcttgtctcaccctctagtccacactctgcctaacactacgccctacctcacattcctattgacatctgctgcagatcacacccttgtgatggacaaactgctcagtacagtcccacccacccagcctccttgtcctgggcacgaggtttttgcctccctgatttggagtatttggcccttactagagagctgccagatgagggacatttccttcacctggagaaggatggggaggagtcagcacttgacatctgccaccctaccccagaatcagtgccacccttcgccagcccacccaaacctggtctcgtatatcatcccgcagctccaccaggatctggttgaagaggaactcagaggctcctcccggctcacctgcatcctcaaatacgctgatgaa

SEQ ID NO: 89617 - DNA, 474 bp, Homo Sapiens
gtatctcagcagaattgcaacttctgattttaggttcttgtcaatctattctaactcttagcaaaagattcttgctgttcagcctcagaaacacttttatcttagtcgactttcctgaaatcatgctgtattgagctatgattcttactcaaatgtagttcctatgtcagaatctcatcaatgagaaatttcgcaagattgcgtgccaaaatatccagtaccacgcttgcatatttttacttcaaacagaattaacactgcatcttagacacagcgtggtttaccctgctagtcatctcaaacactgaagacggtgactgtactacatgattatttacctgctcagctcaggttcccattgttcacattcacatcaagacagatcagcactggcacaaccactgcttttattgggtatatcaagtgttaacagatccttcaatgtgtttctcaaaatctctgttggcctatggt

SEQ ID NO: 89618 - DNA, 470 bp, Homo Sapiens
  misc_feature (73)..(73): n is a, c, g, or t
ttaggaataatagttccaatgtattggcataatttgtttgaatgtctttattttgatattaacaccggcatanatctatttttgctaccagatgatagctattttcatttgctctattttcctctgcattgtactaatctgttactcagtgttagtcttcatttttctgtgttggaaacctgcgtcatgtaaatatctgcaaatcatgacagtctaaagtgcaaaccattttcagagactttggggaatgcagtgatcagaagtggctaatttattttatttctgattattttatccagagggtacttttttaatggatatttgtaaatcttccacttaaccactgaaaattattttgttttaatcccacccttccatccatacctctgcctccccaaaaagctcctattaatttgcttatccccctcatgtagctagttgaatgtgaataaataacatggaaaaaaagg

SEQ ID NO: 89619 - DNA, 520 bp, Homo Sapiens
aagcccctggaggctgccagcctgtggccagctctgactctggggctggtgagcactggctcactctgtcttccttgaaggactcatgctctcagcagagctgcagaggccctgcaatcacacccacgctcagggggcctgaaggctgtccttaaagtggaataagcggtcctcaaacttgcagggccgcttttctggaacagatcactcttagcaacttgagaaaagacgtccattttcaaattgaggggccacgctgggctcgctctgccggctgaagggacagacgcttgttggggagatggcagccgggaagaggcaaggcctccctggtgaggcagctcggcaccctcctgggaggcagatgttttcgcggggctccgggggtcctgagcggaatgaaggatcctggctttccaaatcttaaaggagtagtttcccgttccgatgaattttcaaaattttcccaagcctctgcttggcggtcgcatgccctttttcgtacgttttccctcgtgcc

SEQ ID NO: 89620 - DNA, 539 bp, Homo Sapiens
tttgaaagtggaaagattattgtaatacagggtagatatttgcatttgtacatacttgagggtaagtacaagaaataaacacttgtaatggggattacttaagcaaaatggatgacaccgacagcctttctgtacaacaaataattgctgtgcttctctactccagtaatgaatgtagtgccctgctggatctgggacagcaagacttttgagtccagattcgccatcccatttcttgttccctaacgtttcctcagaagcgagcgagcctcttccacaatttggggacacttgtggaagaacttcttgctgggggagttctgcagcagtcgaaggtacaagaatataaaaactggtatctcgacacagctcttacagcatattctcaacacaaggaacagtaatgtgccgcagcaattccttcggtggaaaaaactgactgtatccgcgtaagaggagtaattcttttttgaattttatgaggcttcagagctgtatttcggccaacccagtctttgttcagtttctagcggcttcaa

SEQ ID NO: 89621 - DNA, 537 bp, Homo Sapiens
gcggcacaggctgtcggctggcccatctgcagggacgcgtacgagctgcaggaggttatcggcagtggagctactgctgtggttcaggcagccctatgcaaacccaggcaagaacgtgtagcaataaaacggatcaacttggaaaaatgccagaccagtatggatgaactattaaaagaaattcaagccatgagtcagtgcagccatcccaacgtagtgacctattacacctcttttgtggtcaaagatgaactttggctggtcatgaaattactaagtggaggttcaatgttggatatcataaaatacattgtcaaccgaggagaacacaagaatggagttctggaagaggcaataatagcaacaattcttaaagaggttttggaaggcttagactatctacacagaaacggtcagattcacagggatttgaaagctggtaatattcttctgggtgaggatggttcagtacaaatagcagattttggggtaagtgcgttcctagcaacagggggtgatgttacccgaaataaagta

SEQ ID NO: 89622 - DNA, 419 bp, Homo Sapiens
ctcttgcaattactctttcccttctgccctccttaccaacaccaagctgcaagtgtgtccaggttttaatcagcatgacaatcctacctgcactgcagcatcacccagcaaatgctcaagcctggaccgcttcccccactgtttcctctgtgaacatgcttccattcatcctgtctgatgtgctgtaacctctcagctgatgaacctgcccacccccatacatttgccgccaggtattcattgttttgtatactttccaactatcattttgacgatgcccgacgagggggaaagtctccatttgccagcctctacaaaattagaaaaatacttgtaaatgtcctttggagaatatcaccaagttttatgagaaagaagggctataaaaaataaaaagcaccggctaatagcattctaaa

SEQ ID NO: 89623 - DNA, 517 bp, Homo Sapiens
  misc_feature (88)..(142): n is a, c, g, or t
cccactctctgccactggtggtaggacgatgcctgtgtggagagctggcttctctgctcccgcctggtccaccacttggctagagttnnnnnnnnnnnnnnnnnnnnnnnnnnnnnnnnnnnnnnnnnnnnnnnnnnnnnnnttctagaggcaaaaccttcttccagatgtgaatgaaacctgcaggcttcattttccttctgagcggtgcttcttagctctttggagacacgaagcccttggaaaatctgatgaaggttacggaccttccctaggaaaacagataactgacgtagactcaaaaaccccaagcaatttcaggagccactggactccctgaatgaaacccatccctggactccaggctaagaacctcagccctggggacttcacctgctgccctttccttacctgtcacacattgagcctcgagtcaaggccactgtacaagtagtgcccctccctccccctggccaagcctccttcccttgttcaggaataaagaattccgaggagc

SEQ ID NO: 89624 - DNA, 370 bp, Homo Sapiens
gatctccatgacctctatggttccttagactgcactttgagaactattgacgtacagggaaaaatgctcttggtgttccagttaagcacagaataaaatctggactgtgtcagtttgtaaagatcttatgtctacttggtcatcagccaagaagggattccgaagatagaagaggaggcatcaacaccgtgaacatcatggctgagttattttgtgagagggataagcctaaagtaaaaaccttggatttgcctctgtccttgaacatgctatctggaaagagttttcttaaaagtattgttgtgaacacatccattttcccagtatagttgaatgcagggtttaataaatggaatgaatctagttttaa

SEQ ID NO: 89625 - DNA, 825 bp, Homo Sapiens
  misc_feature (248)..(268): n is a, c, g, or t
  misc_feature (286)..(768): n is a, c, g, or t
ctcattaaaatacaggcccttaggctctatttttcatgtatgagtcgtgtgtaatttatgtaaaaatgtgtgtacagactcactgatgcagcactgtagcccatcaccttggagcactgactgtacatagtgtggtgaagaaaagtgaacgcccttgtagagcagcccgaccacaggagcatggccgctgccagcccagacgctgctgacgctgtgtaaatgtgcacaataaacccgtctcaccccgnnnnnnnnnnnnnnnnnnnnncctcgttccgaattcttnnnnnnnnnnnnnnnnnnnnnnnnnnnnnnnnnnnnnnnnnnnnnnnnnnnnnnnnnnnnnnnnnnnnnnnnnnnnnnnnnnnnnnnnnnnnnnnnnnnnnnnnnnnnnnnnnnnnnnnnnnnnnnnnnnnnnnnnnnnnnnnnnnnnnnnnnnnnnnnnnnnnnnnnnnnnnnnnnnnnnnnnnnnnnnnnnnnnnnnnnnnnnnnnnnnnnnnnnnnnnnnnnnnnnnnnnnnnnnnnnnnnnnnnnnnnnnnnnnnnnnnnnnnnnnnnnnnnnnnnnnnnnnnnnnnnnnnnnnnnnnnnnnnnnnnnnnnnnnnnnnnnnnnnnnnnnnnnnnnnnnnnnnnnnnnnnnnnnnnnnnnnnnnnnnnnnnnnnnnnnnnnnnnnnnnnnnnnnnnnnnnnnnnnnnnnnnnnnnnnnnnnnnnnnnnnnnnnnnnnnnnnnnnnnnnnnnnnnnnnnnnnnnnnnnnnnnnnnnnnnnnaaaatcgaagccatgtcagaggtgggaaacccgacggactaaaagatacaggcgttc

SEQ ID NO: 89626 - DNA, 519 bp, Homo Sapiens
taccagcgttgtcccactttagcccttgaggccacaaatgcaggaatagctacactcttgaagcaactgtaaccaagttggtaacaacgcaggggaattcttcggtaaaattccttcctcttacaaaatccagctcaccctgcacagtcaacctaattgtcaccgaatataggagaatggggaaactaggatttgcgtgttcaagggcggacaagccagtccaaacaggcattccagtcattgggtgggtgacagccaaagaagatccacctggtcacatcccaatttccccagggcatccgaagcaggtttgagcagccaaggataactacttagtctcctgctagaaaatatctcagttgttatccccactttatagatggtcaacttactttatctatttgatgattggctcctacagccagtaagtggtgaagctgagatgtaattccaaggctgctgatctccaaagccagttgtctttccaaatattagaatatactagtgtctgtggtctgt

SEQ ID NO: 89627 - DNA, 408 bp, Homo Sapiens
ggtggacaccatcccatacataacactaacacttggccatacccatcagtgccacctccaagggacctaaagatgcctgggggaaattacggaacccaaattgaattaggactccttgtgtgtgttacaccaccccatatgctgggttcactggaacaggggagaaagagaagaggcaaaagaggaaaagttacttgcagactggagtcagtgtcacggccaccgtcggcgcggggcaaacctccccggccccggctttgtctgcctggcgggggctggcgtcggggcgcgacccggtccacgccgggcgccgcggggcgaggggcgccgagggcgggcatacggcgcacacggccaggcagtgcacaccgcgccgggtagggctcccccgcggcagcgccgagaagg

SEQ ID NO: 89628 - DNA, 445 bp, Homo Sapiens
tccaagaagagtgccactaggcatcccctgggaaatgggccccctcaggaaccaaatggcccaagttgggagggcacctctgggaatgtcacatttacatcttcggctactacctggatggaaggcacagggattcttagtagtctggtttactcagataatggtagtgtaatgtctttgtacaatatctgttactacgctctgttggcctccctctcagtcatgtctccaaatgagccctctgacgatgaggaggagtaggaaggctcctcagattacaagtgtagactctgtgaacagttcagacacactgcaaattcgtgaactcacaggccactaatggcccataaaagttgccattttttaatgagaaacacatttttggtcttaataaagaaaaacaaaattccatggaaataaataataaacaatttaaatgagaaaa

SEQ ID NO: 89629 - DNA, 569 bp, Homo Sapiens
  misc_feature (40)..(40): n is a, c, g, or t
  misc_feature (44)..(44): n is a, c, g, or t
  misc_feature (48)..(48): n is a, c, g, or t
  misc_feature (82)..(82): n is a, c, g, or t
gcacgaggcagcgtacaaggtcttaagaggagaaagtacntganaggnccatgagtgtagcgatgtgattggcagcgaggtntgctcggaagggctacgggatatgccatgggactcctggcaacggatattccttcctgtccctttaccgtctcaagcaggataaaaagtacctccaccgagcttgcaagtttgcagagtggtgtctagattacggagcacacgggtgccgcattcctgacagaccctattcgctctttgaaggcatggctggcgctattcactttctctctgatgtcctgggaccagagacatcacggtttccagcatttgaacttgactcttcgaagagggattaaaaggtgcaaaaagacaactaaaatacccatttggaccaaaagccgccagattgcttagtgcctgacacagaaacaactgggaatcctgaaagagaagcagacaccgtcacaggcccctctggttagactagcatgagtgaccgaagccatccatcaacattttctaacagcaccctcatcaatataaaatatgacttcttcacaaacaaa

SEQ ID NO: 89630 - DNA, 350 bp, Homo Sapiens
aactccactctagtctcccatagatagagtgagcgagctcaccctcctcctccagccaccttccttttcccaggtcctccacattttccccgtgccctactgaggacagagcacacccctcagccattcaggaccccccatgagtatctggctacctgtctctagcccccaagtgactcattctccctgaacaaagcaggccctatctttgtcccccagtgcatccttcaaggcccagatcatccgctgcctcctctctgaagccgcccccagatccctgagggagaatgaatcacttgctccactgtgctccgacagttctgagctcattctgatgttggagcggccgc

SEQ ID NO: 89631 - DNA, 603 bp, Homo Sapiens
gggccaaactcagaagcaggcattgctgactagacagtgaattcaactcagtcattctgagtttgactcttgcttctgccttcgtctcccactaccctgcttcccccacccccaatagtgctgtgcaagtcaaagaagataaataaatacaaaataaaataagatctcaacacaaatacatcccctttctgtgccaccaaaatgctttctgagcgatttgtattcattcaggaccaatgaaaaggaagcctcctaccctatagctgtatagttgtggggtcccaactgcagaccctcccgtgctccctgagttgttcttgggacacctaaggacctcaccacactgttgctgagacatgatgtgctgcacatatgataagaaggccagacaggctgaagcatctggagaaagatctcgggcgttcactgggagaaggagttgatgagtgcatttttcttagtttcctctgcacaggtccccaagctcaggctgggtaagctttttaggagatgaaacttcatgaaagatagcaggctggagttcccatgataccagcaagatgaggcttgattataaaaagtgcgcctcaaggcagtgataca

SEQ ID NO: 89632 - DNA, 576 bp, Homo Sapiens
tttcatgcactgggggccctgaaaaatctttgctcattccatggttgcaaggattttctcctatgttttcttctggaggttttatattttcagttcttgtgcttaggtctgtgatccattttgagttatttttcaacatgatatgcccaaagttcactttttccacattctagttctactggtgctagaactcaatgttctagcatcacttgttgaaaagactaccatcctccccattaaagtattttgccacttttgtcaaaaatcaattcaccctatacattgaatctatttttggtctctctactctgttccattgatctatatatgtatcctatgtcaataccacatttttctggattattttacctttataataagtctcaaaatttgtacttgtccaacttctccttctttttcaaaactgctttcattattctaggcttttggcatttataggaattttagaatcagtttgtcaatttttttaaaagcagagattttggttgacattgcatagaatttatagagcaatttggggagaactagcatcttaacaatattgaatttcccaag

SEQ ID NO: 89633 - DNA, 557 bp, Homo Sapiens
gcggccgcggggacgcgggaagaaaaacctctgccctcgccagggagggccttatggcgggagggggcagcgggataggaaagagaatctgagccgagacggcgccgacaggcctgggcgaaaggggtgccacccacctgcgcgacctcttcgccatccttcaagtaccgcataggagcaggctgggcggggacgcgggtcagcctcctccagcctccggcgaatgctccttctccccgatcctctagccgcttccctcgctccctctggaggcggccgagtgcggaacgcacgtcctcgacagggcaggacggagggacagcgggggcggaccgcgacccgaccccgaccccggcccgcagcgccgctcttagccccggcccggcccggccagggatacccccaacatgtcaggaggcgcgatcccgccctccgccggcttctcccgccgctggtcagcctacctgccctggccccagcccggctccgccacaggcgcccgacccctgccctctcccccgcagctagcagttctgcagggctcgcagtctcctgca

SEQ ID NO: 89634 - DNA, 456 bp, Homo Sapiens
tctcagaatagaaagaaaacacaaagagaaaatatgaacaatataaagcacttaaaggaagaggatgatttcttccagcttttccacactctctttatgcgcaggaacaaacagctgttgagtgagctgctatgactttggtagagaggtgcaatatgttttttgaaccagctataaaagaaattaagaggtacatgtgagggtagaaacaaatatcaaggatgagaatggcactggctgtcccatatggtatccaggagccaccaatgtctgttgagtacttcatacatgcctagtctgaattgagatgtgctcaatgtataaaatatataccagatttcaaatacctacttcaaaaaataatgtaaaatatctcactaataacttttcctttgtgtattgcaatgataatatgttggctctattccattaaataaagtatgttattcatttaaa

SEQ ID NO: 89635 - DNA, 518 bp, Homo Sapiens
aatcctcctctctctgcccgtcagcttccattcattccccacctcccatctccagggaaggggtgaaaggatggagacagactgacgggttgcctggctgaggcttgttttagggtgtggagcaacccccagcccaactgaactgtctgggcttcggggagggaggaagaacccagtcagtcctagagcccacagaagtgagtggtggggttcagacaggcctggactgtccggcgatcacagacctcagagctgaggggttcctataagatcatgtggtccaatctcctcttcccaagagccaaggcgatgctgccttgccaagaccgtaagcctcagagggccaggctccaggaggggacctcgatcagggcccaggggaccccgggccgctcacttgcagacgctgacccactcggtgatgcggcactcttcgcagaccacgaaacagcaccagtggaagcggcagtggcagcgctcgctgcgcgtctggcgcaggatgttgtggccgcggccgc

SEQ ID NO: 89636 - DNA, 630 bp, Homo Sapiens
gcggccgccaacagggtgtcggtgtcgcagcggcggaacaccaccacgggtgcttcggccgcttccgccgcctcggccatggcctccctcacggcctcgcgggcccacagcctcggaggcctggacccggccttcaccagcacagaggacctaaactgcaaggagaacttggagcaggacctcggcgatgacaacagcaacgacctgctgctcagctgcccgcacttccgcaatgagatcgggggcgagtgtgagcgcaacgtgagcttctcccgggcttccgtgggctccccgagcagcggcgagggccacctggcagagcccgccctgagcgcctaccgcaccaacgccagcatctcggtgttggaagttcccaaggagcagcagcggacgcagagtcggccccggcagtacagcatcgagcatgtggacctgggcgcccgctactaccaggattacttcgtgggcaaagaacatgccaattacttcggcgtggatgagaagctggggccagtggctgtgagcattaagcgggagaagctggaagaccacaaggagcacggacctcagtaccagtacaggatcatcttcacgacccgcgagctcatcaccctgcggggctccatcctg

SEQ ID NO: 89637 - DNA, 901 bp, Homo Sapiens
  misc_feature (842)..(861): n is a, c, g, or t
gggcgggcagccgcgggccgagcgcagccgcctccgccaccaatgcgcctggtggccagactccaagtgggaccggcggacacgcagcctcgcgtgtcaggggaagctgatggagaatcgagctctggatccagggactcgggactcctatggtgcccaccagccacccccccaacaagggggccctggcgaaggtcaagaacaacttcaaagacttgatgtccaaactgacggagggccagtatgtgctgtgccggtggacagatggcctgtactacctcggggaagatcaagagggtcagcagctctaagcaaagctgcctcgtgactttcgaagataattccaaatactgggtcctatggaaggacatacagcatgccggtgttccaggagaggagcccaagtgcaacatctgcctagggaagacatcagggccgctgaatgagatcctcatctgcgggaagtgtggcctgggttaccaccagcagtgccacatccccatagcgggcagtgctgaccagcccctgctcacaccttggttctgccgacgctgcatcttcgcactggctgtgcgggtgagccttccatcctccccagtccctgcctctcctgcctcctccagtggggcagaccagagactcccatcacagagcctgagctccaagcagaagggccacacctgggctttggagacagatagcgcctctgccactgtccttggccaggatttgtagactccctgagcctcagtttcctcaactgtaaagtggagatgggtttggtgtcgggaataacgggaccaataaatgatgctttactattaaaaaagaaaatccatgtnnnnnnnnnnnnnnnnnnnnctcgagactagcctcgtgccgaattcgccacccaggcctc

SEQ ID NO: 89638 - DNA, 667 bp, Homo Sapiens
agaaattagaaatctacacctaaagtgaatttctggggtagaaaaatctgggccctactagaaccatctttgcctcccacaccaggaaagccggcagtaagtacaggtgctggtatattggcagtgctaaaaagttgcatgggaactacaggaagtctaaaatgactcttaatcacttagctgtttctgggctacaggaaaaaggaaatgaatattactttgaaatcttactggaaaagtggctaaactggtttatgtaggtaagtttttgtaagcagacaaaaaatttctaagtgcagtcttctctgtataggaaagctaagtcagaattaggtaatattttgttgtttcaatagatactaatattttgaaaaatatagttacttgttattgagtatatcagaagttaattattatatcaatagttggttttttaagtaggctggtgatatttgcctcatggtaggtcactgtggcatttctgggtgttaggatgctgttactccttaaaccctgaaaaagtgaaaacattaaagattcctgtcaaatgggtactaacgattctcttctgtgtgtgagatatgttgctaggtatggcgtgttaaagtataaaacagaacatttatgtgtgtctatgtaataaaacataacatttggaaaagaaaaa

SEQ ID NO: 89639 - DNA, 670 bp, Homo Sapiens
ttgatcctcctttagaaggtgcgccatagtccaaaggaataatcctcaagaattcacctgcttatgtgcaaacaaagaaggcatcttcctgagtgactttttacccaggtttacagcaacccccctccttcccccgtggaaaagcagtgctctttaatggagtttcttcggcaacaagaggtctctatcagagaggacggtggacaagtgctttgggagaaagaaatacgatattgatcccaggaatggaatcccaaagttaactccaggcgacaatccatatatgtacccagaacagagtaaaggcttccacaaagcaggatcaatgctcccaccagtgaatttttcaatagtgccttatgaaaagaaatttgatacatttattccacttgagcctcttccacaaattcccaacttgcctttctgggtgaaggagaaggccaacagtttgaaaaatgagatacaagaggttgaggagcttgacaactggcagccagcagtgcccttaatgcacatgctacacctttctggtgctttggactttccaagacaatcctgagcataaacaggcccacaaaacatgtgctgactgcactctggcgacccttttccagttgatgttttttgtcatgtgactgttctaaatccagtgtttgacccttaaaaaaaa

SEQ ID NO: 89640 - DNA, 169 bp, Homo Sapiens
cttctattctattagccccctcattttcaaaggcaccattgtttcaggagaactgagtattttttaaaataaataaagaagtgaatacaatcttaagattccaacttattaacagaaaacatgtgtagacctaagaattaaaaataaatatgtctttaaagatgaaaaa

SEQ ID NO: 89641 - DNA, 1212 bp, Homo Sapiens
tgacgctggcaggctctcaataggccagtgacagaaacactggtacaaaagcccctcgctcagtttggctgggagaaaagcagccgaaagagtcatgacatgaggtgtgaggacatgaaatgaagaacaagaaggtgccttagaaagaagacaaatgggcaactccagtctaagagtctcaaccaccgcatagaaaaatactttttggggcaacaaaatgggttgcggagaacagaagtatttgacaggagtggacaggcgaggggcagctcttctgtgtcctaggcacatctccctaccctggagaacctgtcctgcttgtgagcctgggaagagacttcaaatggacgccaccaacaaccctgaatcaactaattacctaaggcggcgtcctacacaggacaaagcaaaggcacgcgtttccgagatgtccctgggataaggggtagcttctcccagcgtgcgcatcatacatttgtaatgtggctgatgtacgtccgagggaagcttgccacaagtaactaaaatcctaggatcccagagcctgccttctgtcgtcatggtcaccagcgtacacgtcacggggtcgacaataagagtcatcatcgcacgagtttgatctctaccaccaccgacaacaaaggcccacacactcctccacggtcggccaaccacaacgagtccgcgaagcgactcccgcgtgtgaaccacacacagagaatacaaacgcgctgtgcgcaatgtcttgtctgcaccctttgtgatggggaagatgcgataacccaatgaccagaagccacaacagctacgaccaggaacagaacccgtgccgtgaacgtggcaccggcaacagaaaagcttggccacaaagtaggacaccatccgacacgatgaccatgcaagggggcgaagccgcacacgcatgcccacatggggggcacgaggtgatccccgccaaaggcagcaaccgcgcgatgataccaaaagaggcccacagggggacacaaggggggcccaacaccagcgggcgaccacacagaccaagcgccgcaaacaccacgcccgcaaacaacacggcggcagccccgaaactcagacataaagacagccccgcagtaagcggccgaccgaacacgcaaacgccacacgaagggcaccacacgagctgaggagagatacaacagaggagccagctgcgtgagcaccaccaga

SEQ ID NO: 89642 - DNA, 443 bp, Homo Sapiens
ccatttaaggcaatcaaaaatggttccacatctcatctgatttccacaattgttgctgtaacgatggactactgaggagagagacaatttctctggcacatcttcccacgttttagcaacatgttcatggagagccaatattcagtaattacagcccaattcctcacaatttcacaattcgctaacaatatgcattttcacaaaggaaagccgatttttcctttaaccaaatcaaacatgaaaagatagctgcatgcaatgggcaatctagatcattagaagattgatgtaaaattagaggacactgagactggaatagattgcaaacttcagggagctcagaaaacttgtaaactctacattttgaggaaatatgttgtcgatgcttttgcaactctatgcagtaacttaacaaataaagccttaaagtaacttaaaaaaaa

SEQ ID NO: 89643 - DNA, 664 bp, Homo Sapiens
ccttctgtgctgaatgtttatatagtccatccaatgtcttcttcagttcctaaaagaatgctggaaacagaataggcatttaataagtattcttgtgttttaaaaaattatttgaatttttacaatgggagcccttcatcacagctttgtagttacctcaactctggctgttgagtaatttgctcagttaaatctgtttgtgggtgtagtgaattacaacctcctctggttccctcgagatcaagtctaacctggtgattgcgtcatctggtgggagagcacggctacaacagcaggtggaaaccatgctcgggtcctggccactttgcctaggatgaaagctgttgtggcaaacaggggaaagagcttcaagctttgtagtaaaaggaatctgggcttaaattcctcttatcagcactgtgaccttggagaattaatcattcttggttgtggtgagggttaattgagatcaggtatttaaaggacatctgacagtgcctggcacgggataggtgctccataaatgcctgtagctataattattactgttccactagctgtttacttaagtaacattgaatttccacagaatgcatttcgaatcaggtggactatgattatactgatttttaaaataaagagctgcatctgttaaaggataaaa

SEQ ID NO: 89644 - DNA, 470 bp, Homo Sapiens
tgtcatttgaaacaacatagatggaaatggaggtcattatgttaagtgaaataagccagaaagacaaacatcgcatgttctcacttacctgtgagagctaaaaattaaaacaattcaactcatgggcataaagagtagaaggatgattatcaaaggctgggaaaggtagcagtggggcgggggtgggaagaggggatggcgagtgggcacaaaaaaattagaacaaataagacctaggatttggctagtacaacagagtgactgtagtaaaaaataatttaacttcatttaaaattaactaaaagaatataattggatcatttgaaacacaaaggataaatgcatgaggtgatagataccctgttgaccctgatgtgattattatgcattgtaagcctgtatcaaaacatctcatataccccataaataaatacacctactatgtactcacaaacattaaaaattaaaat

SEQ ID NO: 89645 - DNA, 668 bp, Homo Sapiens
  misc_feature (203)..(213): n is a, c, g, or t
cggggcttctgtatctggcaatcaacacaaatcttcaaactctcgtggatgttttaaatgatgggagatattaaaagatctccaagtgatagactactggtgtttgtccacaaagaaaaagacaagaattttgaagtgagagatagcttttagctaaaaagtgatccccacctccaccccctcttggaaaaatgaagaccccnnnnnnnnnnncatcatagcttgaagggtttcttagttgaggactgggagattcttagtgttcttgcatgtgcaaatacaactccctggtcattcaaatctgaacaatctgtgctgaatcaattcagtattgtttatctgaagatttgtgtgctctgcccatggggggcattaaatattacccactggatgagtaaatttgttgtgggagttttcagccagaccagaatctgtttctaaaagagctgattgactttaaaataaataacatttggaaaggactattttgaatgcttgggataggttttattgatgcttttttttcaggttggacataaatgtttttgaatggcaaaaggctgacagttctcagaccctctattattcaggtgaagattgtcttggtttcctcaattactggtacaattattgtagtgctaagaatgacttctccttaaaaaaattct

SEQ ID NO: 89646 - DNA, 340 bp, Homo Sapiens
cccctcacctgtccggagttcggcccgggagcaccccaccccgcagagggcgccactcccggcttcctggagacgcaggaagccctgggggcgcagccatcccacagcgcggccgaggtgggactgggggtcccgcagcgaccgcttttctttggtgggtctgcacgcacctatccgggcaggcggggaaaggggccgggcggccacctatctcctgaggcccgcaaagaccgcccgctctcctccaggtctggccagctactaagacgatcctccgcccgaggctgacggaagtgcttcgccgaggcccgcgccatgctctcctcctcagaaagcgtga

SEQ ID NO: 89647 - DNA, 398 bp, Homo Sapiens
  misc_feature (150)..(288): n is a, c, g, or t
  misc_feature (295)..(354): n is a, c, g, or t
caacaacaaaaaaccccacaccactacctcactgatgccataatgtttaaccatgcctttcacttaaagaattccaggaaataagccaggtgtgtggctcgtgcctgtaatcccaaagtgctcccaaagttgcaggcgtgagccacctcnnnnnnnnnnnnnnnnnnnnnnnnnnnnnnnnnnnnnnnnnnnnnnnnnnnnnnnnnnnnnnnnnnnnnnnnnnnnnnnnnnnnnnnnnnnnnnnnnnnnnnnnnnnnnnnnnnnnnnnnnnnnnnnnnnnnnnnnnnnagaatgnnnnnnnnnnnnnnnnnnnnnnnnnnnnnnnnnnnnnnnnnnnnnnnnnnnnnnnnnnnntacaatagatattggggaagttggggccctaatggggagggtct

SEQ ID NO: 89648 - DNA, 603 bp, Homo Sapiens
cagccattctgacaagaactagactttgggctccttgagaatattcagttttgtaagttttaatatcctctcaccatattcagcttaaaataccatacttaatgattatccttggcaagacaggtgtgaaaggattgctgttgtattacaatcatggtgcaaaaataccagtcaccagtggagggtatacaaataccccttcaaattaattatgcctgcctatgaaaggaggttcccaacgtgtcctttgattcagacattcatggccagtgacactgtgaatgaattcaagagtgaagatggggctgttcatgtcattgaaaggcgctgcaagctgaatgtagatgcaccaagactgatgaagaaagatagcaggaagttgattacgttttattttgtccaaaagaaactcactgaattctcgggaacgtactttgcacattgagggtcataatgaaacattttccaattgctataccgttcaccctgaaaatgaagattggacccgttttgaacagtctgcaagtttagatattaaatctttctttggttttgaaagtaccgtggaaaaaattgcaatgaaacaataaccagcaacattaa

SEQ ID NO: 89649 - DNA, 951 bp, Homo Sapiens
ggcgagagagtatgaagtcgacggcgcgccgaattcggcacgaggcggcacgaggcggaaccggcggtcgagctacggtcgcggagcagtggaaccgagactgccccgcggagccgccggtatgagcgcccctcgccaccccgtgtcccaggcccggcctttctgacaagagctagacttcgggctccttgaggatattcagttttgtatgtttgaatatcctctcaccatgttcagcataaagtaccattcttaatgattatcctcaacaagacaggtgtgagagggttgctgttgtattgcaatcatggtgcagaaataccagtccccagtgagggtgtacaaatacccctttgaattaattatggctgcctatgaaaggaggttccctacatgtcctttgattccgatgttcgtgggcagtgacactgtgaatgaattcaagagcgaagatggggctattcatgtcattgaaaggcgctgcaagctggatgtagatgcacccagactgctgaagaagattgcaggagttgattatgtttattttgtccagaaaaactcactgaattctcgggaacgtactttgcacattgaggcttataatgaaacgttttccaatcgggtcatcattaatgagcattgctgctacaccgttcaccctgaaaatgaagattggacctgttttgaacagtctgcaagtttagatattaaatctttctttggttttgaaagtacagtggaaaaaattgcaatgaaacaatataccagcaacatcaacaacaggaaaggaaatcatccgaaatactaccatcgccaaatagaacgaagaaggcatacacctttgtgccccggcggagagccgcctaccaatcacgaccctcttcaaaagaatctcaacatccaccagaacacagcaggctcaagggccgacgcatccagaagatggcccag

SEQ ID NO: 89650 - DNA, 685 bp, Homo Sapiens
  misc_feature (214)..(214): n is a, c, g, or t
agtgtgaagttgcccgaaggaagcttcaggagattgaggacaggataattgatgaagatgaagaagttgaagctgacagaaatgttaaccatctccccagtcttgtcctttctgataccatgaaaacaggtttgaagagggaatttgatgaagtttttacaaagaaaatgattgagtctatgagccgtccttccatggagcttgttctctgganacccctccctgaactcctttctgataagccaaagccatcctctaatactaagaactatacaggagagagccaagctaagcatgtagctgctggcactgccttccctcagagaactgaactgttttcggaacctcggccaacagggatgtctctttataatagtttggagacagctactagcacagaagaagagatggaactctagaaaccaatttctacactaaagttgtcaaatgttagaagaatcctgtggtcagttatgagactctttgcatagtatagggacttgaaagttttatgagacgggtgtaataatatctccacctgagatttgggggtgggactcttattttgggtagccatttattgacttcacctttttgccaaggacgtttgtctcaagggaaaagcagttttctgtggggcttattaaaggaatgttggtttacattgtcttcagaaaatgaactc

SEQ ID NO: 89651 - DNA, 599 bp, Homo Sapiens
agcatggagatgaggcaaggaatagtactcactgaagttgaaatgactgcccacttcaaaatcttcattgtgtttacacaccagtgtatttatacaaatcagaggcattttgtagatgctttgctgacttgttcagctctgtaaaaacacagaaatcagacccattttgtaaagcggaaaatcatgttacatggaacatgtcctgtatatatcacatacatggtaatggagtcttaatgataagtgcaagataataatttaatgatgggattagtctgatcgcttaatatgcacaatcctggaagtgaattacttgcatcagatatagtgatatttattattctgtacagagagaaaaatacatataaaacatatgcttacattacatgcacgcggatttcatgctccataatcttttctattttttaatttacctttctgtaaatgatgtgcatggaatatgccttatagaaaaatgctgttcataatttgactacgtggaaaagtgcctatatggtggtaatgctagtaaggcaaataagacaaattatcatgttggtttactacatcaccagttaacattttatattgtgatgttt

SEQ ID NO: 89652 - DNA, 464 bp, Homo Sapiens
  misc_feature (411)..(411): n is a, c, g, or t
actagcccgacagccccgactagcccgacaggcccccatgcctggccctgcctgagccaggtgggtggagggagggagatcatgagggacttggagggagctgggagttcatccacgggagaccctgccccgatgagaaggggcagggactgggggctctgctttgcgtctaacctttgtgggggagggccagcaaggcagtccccccacgcccgagaaagcctgggggacccagacacctgtccccacagtcaaagcctggggacccagacatcctgtccccacagtcagcctcctgtccctgctggtgcccccacacccacctaccctgtgctttttgccgtcgggcctctgcaccgtgggtccatggggtctgcgggggtctgcgggggttctgcctggcctgtttgngtttctgccggttggggctctcaggagtaattaaagtgttcaccccttttcct

SEQ ID NO: 89653 - DNA, 502 bp, Homo Sapiens
cctgatgaagtatacaaatacacctgaccagaaactttgtctcccacataagtctcttctaggcactgtcggggtacatactgagctgctgctttggctgtattttctgtgcctcagaataaccattgtcctggtgttcatacccttagagttcagtacaaaatgttggatatccatttaataggttccaggttatcttagttggagtttggggtatttgaaaacgtcatcccttcaggctatcatttccctcagaaagctaagtaaatttactgcattcatttcccaaaaaggtaaaagggcaggttgtatgtgtctatgaacatttaaacatgttaaaatgttaaatttaacattttaaatttaaacatttaaatatgtctgtaacttgaacagtgtagtttcagaaaggacccctgggctagtgtaatgcagaaaatgctgggtctaggattaggaaaaaattgtgtttagtgtgtatcaataaacagcccgtggcccc

SEQ ID NO: 89654 - DNA, 629 bp, Homo Sapiens
caattccattccagcgtagggattgagtgctgctgttagtttagagaaggagagatgtctaacccttgaggtgaagggctctgggagggtccaagaagacgtaggcttcattttcacaccagcccacaccattccagtgctcagcctagcaaatgtgctttaatgcacacttctcagagctgtgatccgtgtatcttctccccagtgacagaagtagagaagagaatggaaagcagcacactccgtcccctctagtctggagctgttaacagaatctgctagaaactagctttattctaacataccgtaggatctaaatcctcctacctggatcatgaattcctttgaaataattcatattttcattgactctcactaaatgtcaaataaccctgtttttcacttggataggctcaacctacctggcatatttattttgcagtcttgttgaaagttcatgaaactttgtactttttaataagatgatacactcgaaggaaacttttaatctctgcagtttattctctcttaaggaataaacactcccactgtttgttctcttcaatgtgtaaggagattaaatgacattttagaaatattacaattaaaaatagtgatgtagctgtaaa

SEQ ID NO: 89655 - DNA, 582 bp, Homo Sapiens
agcaaaatactaagcgagaaactccgtccaaagcaactggaactcgaggttctttactaatgagagttccagttaccatcttcagagaaaggagctcaaaagagggagtttatttttttgcggaatgtcttccttgttaagaagaaaattaaagattaaaaaagaaaatgaagggtctggcaactatgaacctaatggtgccctaacgtttgctattctaaggccgagaatgccagatggggagaacgccatgagcttttgagcttgtgtattttgcgagaggctcgagtgtgaacagtagactacaggccttgagactgagaaggaagctataaaatgtgggccaagggaatgtctgcaggaccgggtttcagagcaccctatcgtggcggataaagagccactaacagcttttttctttatttagtagccaaattcttggttggcgctttgagaaaggagtaagcattaagcgaatttaaccaagtaaaatgtatcgtcctgccctttgtagtcccatagttcactatcctagagatacctatttttcactattttattaaagtgtattgaaaacctaaa

SEQ ID NO: 89656 - DNA, 232 bp, Homo Sapiens
cttacaatatgctgtcattcaaaatgtacctcagaagcaactcaactcatgcatacagtaggcactctataaatgttttaataattaggtgttttttggaatgactaaaaatccagatgtaaaatcccaattgggaagtgcataatcccatcgtagacaaaatatataactttacaataaacatttttataagaatttgccccaaagagggaacacttaaaatttggaaatt

SEQ ID NO: 89657 - DNA, 425 bp, Homo Sapiens
ctccccgtcttcttctctcacacacctactccgccctccgccccagcccgcgcgctagctccttctctcgcccggggttcctgccggtagctctccgggtcttggcgcggcgggggcgccccgggggtgccctcgccctcccgttgcgggcgggcgggcggtatgtggcgcctggtgcccccgaagctgggccgcctgtcccgctcgctgaagctggcggcgctgggcagcctgttggtgctgatggtgctgcactcgccgtcgctgctcgcctcttggcagcgcaacgaactgaccgaccggcgcttcctgcagctcaataagtgcccggcgtgcttcggcacgagctggtgccgccgcttcctcaacgggcaggtggtattcgaggcgtggggccgcttgcgcctgctggacttcctcaacgt

SEQ ID NO: 89658 - DNA, 1050 bp, Homo Sapiens
  misc_feature (154)..(154): n is a, c, g, or t
caatcatcaataggaaaggagattcagatactgaattcaccttatacccttctacagatattttctccagcatgaccatcaaacactagataaaggatacccaattattccttcccctacttctgccctttctgataacacaaggatctccccnctgaaatcagaaatgactcgcacacaatgagagattttttaacgttatgtggtccccactatcaaaattataggaaagcagttaatgggggctttgagaaaagcatagtcccatgtacagtaatatgcatctaaatagagttttctttcgcctgtcaattattttcacaagattagcattaaaaaatacaagcaaacatatgacccttaagcttcacacacaaaaaattggtctttgttcattctcagatgacaggatgtcccaagagtaacaaaagatgggagccaatcctctcatagctgtttcttcaatcatcccatcaacagctcttcatttcttgaactaccttccttttccaaagaggtaatgctgagatcagtcagaaaggctttctgagaaaactggcttggatttctgggtctgttccagtcgattcaagatgaactggcttgtatcaatgaagcgctcaacgcagttcacaaaacaggcctcagcccgactgtccaactttggcccaggcttgtccatgcacttctcccaacaaagttcagtcatctggtgcaccagctgctggaagcgctgcttttgagtctctacctcaatgaaaatgctgcaactgcgggtccactgcacccaaacccgccgcagaggaagagcaggaggaatccatcccaggacaaccaagcttgcagagacgaactccgcaccaaccttcacgtgtctccacgacctagttaatcaattttaaaatgaggtcactagggtgggccccaatccaatatgactgataactttataaaaaggagagatttggatacagaaagagacagagtgaaaaccatgtgaagaaacataggaaaagatggcagctacaagccaaggagaagcttgcagtg

SEQ ID NO: 89659 - DNA, 437 bp, Homo Sapiens
aatggtctttacatcaaggtgctgcagccagtggggcatgaggcagagttttcacctgggtcagaaggttttggaactcttccactgcctgtgaatgtgccttggggttgagcaccaggtgttggaagagattgaccggctcagcattcctaaatgtcttagggattgggatggtcaggggcagaaaattgttaccaatgaggaaatgatggagggacctttgctggaggccacggcccaagaaccagagaatgtcctggagccgctgagagagcatgttgtgggcccagtccgtgaggggcagccgtagcaagaggtgcatgagagctgttttaaaatggtaagaagtgaggatggggcgggatgctccatggggtaagctctgatgctgccggagacttaaaatgatctggaggcacttgaggtgacaggtgttc

SEQ ID NO: 89660 - DNA, 442 bp, Homo Sapiens
cctaaaggagaaacctgaatcattacatctcctctcctcgctacaaatgcaaggcatgaatcagttttagactggagttctggatatgggtaccaatgttgctgactgcaagagcttccagccaatgccacctcagggggcaagcctacctcaggcatctcctcatcttcatcttctgaagacacgtcttcctgtgtgcactgcagcaaggaagggaaagatggagatcagagccccagtggcttgctagaatgcagcctccaacctactcccctgagcccccaggtctggaagttgtgcgcctgcctgtaatgctgccagtctctccaccagccagatctgagtggaagcaacagcccagggaatggctttgctaccagcccattatttttcgcctatcactgccaaagaataaaagaaaagcaaaatggctgtctctgtc

SEQ ID NO: 89661 - DNA, 453 bp, Homo Sapiens
actgatttcctccagatacaaacagggcagctgaatggggagatggcctcccccatcagaggcagttcccagccagcttccttggatggccacacaggaatcactccacacaccatccctgagaagcagaaccacagggaaacctcttgtccctctggaaactcagttacaatcagttcagcacttgaaggaaggatctcgaaacattacagcccgaagaacaagagggtgaaactgtggaggcctcagcatcttctacccagagtgtgcccaagctataccctggggcagccaccagcatcaagagcttcaggccagtagggagctaggggacctcttggtcccatttccttgataacatcagaaatctgaagaacaactctccagcaaggcacgggcttcaactgaagccctcttcccaagtcatactaaaacaagaactgaccccaaaaa

SEQ ID NO: 89662 - DNA, 364 bp, Homo Sapiens
atcaatgtgtcagacacatggtaataatgacaacagcaattctggaggtgcagcccccggagcgagtaatgtctgtgctttccctcatttacttctcacatggactctatgaggtaagggaccttgagttatctccatttcacagagaggtgaaatgattccctcagactctcccaaccagctagcagtaacatagaaatctgaacccagagtaactgtgtcacacacccaggcaggcacaagcctctcgtaaggcaacacacgtctatggggagaggggactcccacccacgaaggagctgccaccagaaacataatgagaccctgagctctttagaccccacctgccctgctcttctctcat

SEQ ID NO: 89663 - DNA, 422 bp, Homo Sapiens
tctcacacctggccaaggctgttggtacccacgaaatgacagcaaagatgagaggaaactgaattgcaagagcaatatgaaaccccaaccaagaggagtactctgcagttctttggctttggtatagagtggccactttctctaggacctggaagaagagtttgatggctaagaacgattgtgatcctaggtcttctttgtacgcatctccgtatttaggccagatctgcctcctgggaagggaaggggccaatgtcagcctccaggtgatttctttaatctgacattacaaagagaccaacagactgccaattctaccacattcccctggtgggtactcgactatgtagttttctctatgcttctggtcaactctgacacatcttggaattcttgtaataagaaaagaaatttttaaaaaa

SEQ ID NO: 89664 - DNA, 387 bp, Homo Sapiens
tccagagaagacacacaaccaaccaaaaagtacatgggaaggtgctcaacatagtaactagagaaatgcaaatcaaaccacaatgagaaattaccttgtaccaggccaggcacagtggggaggtagagataagagaagttgatgaatgggtacaaatacatgatttgacagaataagacttactgtttcagagagcagtagggtgactgtactttacaataatcaattgtacatttccaaatagctataagagagtaattcaaatgtttctagcataaaggcaaatcgtgcagatgatgaagacaccccaagtatactggtttgatctctacaacttgtatgaatgtattaaattataacatgtaccccaaaaatatgcatcaactg

SEQ ID NO: 89665 - DNA, 426 bp, Homo Sapiens
cctggccgatggggtgccaggcattagaaaccttccctccaatcctcaccatgtctccattttgccaaagaagaaactgaggttaaggtcgcgatgctctggccagcatcacaggttcctgtgcgcccaaacttgtgccgggcaccaagacgagaataagacagcagggcagaagttgtggagaagctgaattgtctctctgcaaggaaaaatttcctgacacaagtatctgtccagagaggaagattcaactgcaagagctttcagcaggcaatggtgtccaactagaatcgaaacacattgttattgttttacttatttttataattactttttattttggcaagtaacgggtggtttcgcagttactgtagtgctagaaggcttttttaaaaaaacaataaacatacttgagtaagaaatagt

SEQ ID NO: 89666 - DNA, 453 bp, Homo Sapiens
gcggccgccgcccggccgcccgcggggcactctaggacatggagtcccgccgcccggccgcccgcggggcactctaggacatggagtcccgccgcccggccgcccgcggggcactctaggacatggagtcccgccgcccggccgcccgcggggcactctagggcatggagtcccgccgctcggccgctcgcggggcgctctgggagatgcagtccccgtgcgggtgcggcctctcttctcggccggccctggaggcggcaccgcacctgtgcattgagcacaggtggggaaacttaggcctgagcgaggccctggccatgaagccccgcccagtagcgtcagttgcggaactcgaaattcatggggcgactgcgagcccggggtctcagcttcagacacccctggcgtgccctccactccggaaacggaaccgtcggcgcccgaacggggggt

SEQ ID NO: 89667 - DNA, 583 bp, Homo Sapiens
agagatagctgcattctcatgtttattgaagtcctgttgaaatagccaaaatatggaatcaacctaagtgcccatcagtggatgaatggttaaagaaaatgtgattgatatgcaatggaatattattcagccataaaaaagaatgaaatcctggcggggcacagtggctcatgcaagtaatcccagcactgacctcatgaagacagagagtagattggtggttaccagaggttgagaaggggagaggagaggagggatgaagagaggttgattgatggatagaaatatacagtttgataatgataaatcagtagggtgactatagtttataataacctattgtatggttcaaaatagctaaaagagaataattgaaataacgtaagacaaaaatttaagatgatagatatcccaattacactgatttgatctttacaaattatatgaatgtattaaattattacatgtatccccaaaatatgtacaagtattttgtatcaataaaaaataaaatttaagataaagtaaatgtaatgattagcttatatttcctagatcggaaataaatatttacttaagtaat

SEQ ID NO: 89668 - DNA, 599 bp, Homo Sapiens
ggagctgtgcctgctaaaatggatcagtgagagaggttcctggacctgtgaactttgctgttatagataccatgttatagccattaaaatgaaacaaccttgccaggtctcattgttcatgaaggagctgcagtttacagagtgtttaagcgctggcgagctgtgaatttgcactgggatgtgttaaattatgacaaagccacagacatcgaagaaagcagccggggagagtcttccacaagtaggactttgtggttgccattgacagctctgcggaacagaaacttggtccacccaactcagttaacctcaccaaggtttcagtgtggctatgtgttattgcacctgttcaatcggatgaggccccatgaagacttatcagaagataacagctcgggggaggttgtgatgagagtgacttcagtgtgacaaaagcataagatgatgcagtgtggaccaccctgcacattttgcaatgtaattgcagtgaatggcaaaaccatagcacttctaaaaacacatctatgaactttttaaaatttatgctttttatatgaacatttgaattgcaaatacatttttctgagaaaaagaaaaaa

SEQ ID NO: 89669 - DNA, 709 bp, Homo Sapiens
ccctgttgtcttatattgatttcctaaaaatagactctgaggtggagacttatgtgcagaaggtctcttggcgaatgctccagggaggcgtgcgtgtaaggaagtgagacagacccacctcaggcccctgggacttccactggccagacgccctgtgcctacttgtgtcatgggatacagggcccatctcttcccatctccacactctgaccacacgctagtagcttgaaatcagccatggtgcaactattggcatcacaaaaatggacaaatgcttcaaactggggcctgacttattgttttgttgattgccaggcttaaaaagtgatggaaaggatgctaataatgcatattaaaccaaaaaagtgcgtcatgtctgtagctgtgacattgtgaatagcacaagcattgaggttacatgcttctgatatttgaaaacccttattggattcaacaaagaattcactcatgtcattgtctatcaggtgaagctctgatgcacattttttgctttcacttttgccttattcattaatataaacagaatgtcaatcaaccttcatgttgtgtctacgctcaatcatccctgatgaccctacgctgactacagatgcagaattcagcaaaaaccaatgaaagcattcggtgagaatcaatggctatatggagcttacaataaaccgtattgtgtattttattattacgtaaa

SEQ ID NO: 89670 - DNA, 185 bp, Homo Sapiens
gtgaatatgcacattactaagacaaaaaacaagtgtaattcagaactacttgattttttttagttaaatgcaataattattatgcttagttttataacctgctctccttgtgaattcttccttcaaatgattacttaacgcagtagtaatagctagctagtaggatgtcctttaaatttttgtgc

SEQ ID NO: 89671 - DNA, 475 bp, Homo Sapiens
tcctggagatgcactcacaccagactgcacagacccctccacattatgccacacacggcctagacgttgtgtttcctcagccattttccctctgctgccccagtttactctgtccaaaaccctaaggttcttctctcacttgaacacagacgaccttgcttgggtgatgagacatcccctttatctcttcctctactgctggccaagacctgtcactttataagaagctcagatgcagcagtgctggagagctctctctttatgcaaaaatctcatttcaccaggagctttcagaagtttcacctgggctaaattcagcagcatttctgttaggatatttagatggaggttttattttcacacttggattcttgctctgtaccaatatttgcctccttttctgtgactgaactgggtttttctgacatgcctagactcctaataaaggtatttcttccttggtgccttcaaaaaa

SEQ ID NO: 89672 - DNA, 553 bp, Homo Sapiens
  misc_feature (524)..(524): n is a, c, g, or t
actatggcccttacatggggtttacttatcttgaaatggtgggcaactgcagctgcagacctcaatctatggtatgtgtcaggcaattcaactttttcttgtactgtcattacttttctctgcttcttgggagcacttccagcatcactatggtgtgattcaaggtttactgtattgtaccaaacatgatgaaatgtacaggagaacccaaagagatcactttttactttgatacacaaattccttagcatcacacagcatttaagcgaatactcacagcaggggaactcactgcaatagcaactgtaggtggctacaaaattattataatagaacagtatgtactacagttaattttatgcagctatgatttaacactgcatcattacttttaaatatttctactgtaaatggtgccatgtatggtctctttgcataaagtttaataaatttgctttctataatagatttgtgtatattttatggtagcaaatcacaaaatagactagtacctacatatattntatggattcatgacatacccctttttcta

SEQ ID NO: 89673 - DNA, 429 bp, Homo Sapiens
caggatttagtggaggccattattggataccaggggcaaaggtcagcccagggtaaggtgagtccaggagaaagcccagcctgtcctacaacagccctgcggcatagaaccggtggtgagcctgccatggtttgcttctgggcagcaggctggaccacctggggagcatggaagactgtgtctgtgttccctcaaccatccccaagtttacagcagccccactgtgagtcaggagtcattcctgactcacggtagggacagtttgcatttatggaaagcaaactggaaggagtggcctgagcccatattgcccatggtaatgactccttgcaatgcgaataaccaaggtgaggcaggttgggcaggttttatcctccccacaaaggcgagcctttgtgggtggagagagtaggtggtatggccccctta

SEQ ID NO: 89674 - DNA, 1572 bp, Homo Sapiens
  misc_feature (1429)..(1513): n is a, c, g, or t
tggtaccggtccggaattcccgggatatcgtcgacccacgcgtccgaggaagtggagctgcctgtacgcgcggccctagtcggctcctcaacgtggagcgatgggaggccttgagaagaagaagtatgaacgaggctcggccaccaactacatcacccggaacaaagcccggaagaagctccagctgagcttggctgactttaggcggctgtgcattctgaagggcatttatccccatgaacccaaacacaagaagaaggttaacaagggttctacagcagcccgaacgttttaccttatcaaagacatcaggtttctcctccacgaacccattgtcaacaagttccgtgaatacaaggtgttcgtccggaagctccggaaggcttatgggaagagcgagtggaacactgtagagcgtttaaaggacaataagcccaactacaaactcgaccacatcatcaaggaacggtatcccacgttcatcgatgccctgcgggacctggacgatgccctctccatgtgcttcctgttttccaccttcccgcggactggcaagtgccacgtgcagaccattcagctgtgccgccggctcactgtggagttcatgcactacattatcgctgcccgtgccctgcgcaaggtcttcctgtccatcaaaggcatttactaccaggccgaggtactggggcagcccatcgtgtggatcactccctatgccttctcccatgaccacccgacagacgtggactacagggtcatggccaccttcaccgagttctacaccacgctgctgggctttgtcaacttccgcctttaccagttgctcaacctccactatcccccgaagctcgagggtcaggcccaagcagaggcaaaggccggtgagggcacctacgcgttggactccgagagttgtatggagaaactggcagccctcagtgccagcctggcccgcgtggtggtgcctgccacagaggaggaggccgaggtggatgagtttcccaccgatggggagatgtcagcgcaggaggaagaccgcaggaaggagctggaggcgcaggagaagcacaagaagctttttgagggcctgaagttcttcctgaaccgagaggtgccccgtgaggccctggccttcatcatcaggagtttggtggggaagtgtcctgggacaaatctttgtgcattggggccacctatgacgtcacagactcccgcatcacccatcagattgtcgaccggctgggccagcagacctcagtcattggcaggtgctacgtgccagcccagtggtgttgactcagtgaacgccaggctccttctccccgtggcagagtaatctctggggtgcagtgcccaaacttcaccttgtgaccgaaaggaggaattagtcacggaaaatgactgtgggccggagggaaggaccggactnnnnnnnnnnnnnnnnnnnnnnnnnnnnnnnnnnnnnnnnnnnnnnnnnnnnnnnnnnnnnnnnnnnnnnnnnnnnnnnnnnnnncgaaaaagggagagagacgcaaaagaaaacaggaagccggagacaggccccacggccag

SEQ ID NO: 89675 - DNA, 632 bp, Homo Sapiens
agtgggaccatgtgagacatcttgaggccattcacgttcctgcttaaagagcccgggaccagcgcagagggcctgatgcctgatctgtcaagtctgtccgaccgtgcctgtctgctgtccccccagctgttccagtggtggattggcaggaccgggtgcctacccggtactccttaccaaagggagcccctggtagtgcccacctagcccaggacaaggagtggaacgggagctgcagctgcagtggtcacgaaggcagcctggaggaggtggccatggaggatagccttcgttatcgtcagcctctgtttccaaggaaacaagactctaggtccactttgccgtccagacctgaagcggacccttcatacacagccctgtgatacttggagcctgcttgcctcaaaacactgcttgctttacacttcacctaactccacccttcccttcaattctttaataacctttccctttgttcagccagatcactatagttcctctgctgggtggtttccctcattggaataagtcaacaactgggtttgtttctggtggttttaggctgacttggcgaggactagcctaaaaattaacccaaaagagaaaaataaaattgtatgcatgaagatgga

SEQ ID NO: 89676 - DNA, 926 bp, Homo Sapiens
cattttctctgaactgtaggagtagttttgtagcaaacttatcaccaaaatcccacaaatgttaagcattacccttcttagaaaggaaaagcctacttacttttccccattggaagacttcaattttttaagattcaagaaatccccaaaagtcatgataaagaagagggaaaacagactgagcatacccatccccttttaaattcaaatttattttgtttttttctgcttagctacagggaaggtttgatcatatcacatctgagttaggccatatgcacccagggggaatctcaagagcaaactaatctaaactccaagaaatagaccactaagacccacccaggtagtactcactgaacgctcttcctgcctctcataagaaccaaaaatagcggtttcccgcagatgctcccagaagcaaagtctacctaccacacacacaatatgcagaagggaaaaacccaagccacaagtccctaaacgcctgagtcgtgactcatggaggctgtcctccacccctgccaagtataagaaatgatttctacccacccacttctctaaggagatggtccctcattcctctctcccgagcaggcttcacagcccccttcatagagatgaagccctagtcattaaatgcccagtgatgttacgactgccaaattctatgactatttggaaagttttatcagccttcagacttggcctgaaacattggtcctccttgggttgtgagcctgcaggtcctcagactgaaactatccatcagctctcctggttctcaggctcctggattcaagctggaagtacacatcaggtctcctgggtcctcagcttgatgactcgagatcttgggaattctcggcctctataactgtgtgccccaattccctataataaatctttgtctttctctctaaaaa

SEQ ID NO: 89677 - DNA, 374 bp, Homo Sapiens
  misc_feature (51)..(76): n is a, c, g, or t
ttaataaaggctttaatttcatacacacaaaaaaactctatgcataatttnnnnnnnnnnnnnnnnnnnnnnnnnnccgtaaaggatacagaggaacagttctgctaaaacacagataaaagtgccgctccatacaaaacataaagaatcagaatcaaaagtcactctgaacatagagatcaaaaatcatctcacaaataatgtggccacagctgccagaaaacctggtagtggctcaattaggcaaagtgtaggaatctcatttttgtttttctctccttaagtttaaagaaacaacaatgacaataggccagagaagttagggagggaaagaaaagctcaaagggagggaaacctggggacaagaggtgtgc

SEQ ID NO: 89678 - DNA, 603 bp, Homo Sapiens
aagtctccgaagggtgctgtccctgtcaatgaaataagcagcggctagatgatgtagcgtctcaagagtgaccgaagagctattggtggtgtaatcacttccttcagctcgtttgctcaacttccgcttgtccacaaaaattgttagttttgggttgctgagagcataaatgtgaaaataggcaggagttacagaattacagagttcctctacattaagaataactttcaggcccatttgctttttacatcctactggtgtttaacctggagtcttttgctattttacgaagagtattgaaacatgtctctctggagtcaaatatttcatttcagacacctccctttatgatgtcaatctaagggctgagctaagggaaataaatgtgattattgttatgagggcatacagtgagatggcagcagcctgtaagccagaaacagaagcatcaccagaaactgaccatgctggtaccctaatctcagacttccagatttctgaagaacttcaaagaaacaaaagtctattgtttaagccacctagtctgtcacattttgttatggcaatgtgagctaactaatacactacctttaaaatataaaa

SEQ ID NO: 89679 - DNA, 416 bp, Homo Sapiens
  misc_feature (316)..(316): n is a, c, g, or t
atatgtgtgagccactacacccagccccaaatttcccctttatatcaggacaccagcccaccctaacaccctcatttaacttaatgacctccataaagaccctatctcctaataaattcacgttctgcaatactagggttaggactcaacatacggtctcgggggcaggggacataatgtaacccataacagagggcatcttcatgctcttcgtgggaggcctgaacccatttccacgcaaaagagtggatcctagtgggtttagtcaaccatggagggatgggggaaggcgaagggatccgtgcattcctcctgnggagccgaggggaaggatgctggtcaaactggtttcttagataaaaagagacatagaggaagagatgcttctccctctgtccacaagccttcctggggca

SEQ ID NO: 89680 - DNA, 364 bp, Homo Sapiens
taaggaaagagctcttattagttgaaagaaaatgtagattcatgtttccttggagactagtctagtttccaaggatagacggcagtgaggagtcgggtatctagatggaatttctgttggtttggattccagctctgctgcttaccagctttgtgacctcaggcaaacaacttaacctctccaagcctcaatttccccatctatataatggtgatatttataagtttcaccttatagggccacggtggggattccatgaaatagtgtatgtgaagtgcttagcacagtgcctggcacatactcaatgctctatgcatgtcagctagtacttaatgatgctaataaacatgttatgtccctaaaa

SEQ ID NO: 89681 - DNA, 306 bp, Homo Sapiens
ccacagttgggaggaaatgcattctgctaacaactacatgagcttggaagaggaaactgagcctcagatgaaaccagctctggctgactccttgactgcagctttgtaagatcctgagcacagcacacattgaagctgaggctggacagtgggtgttgttttaagccactaagtttgtgataatttgatacctagcagcagaaaactaatacacctcccttttgcaagatgtatcccatctaccctctctgtcccttttcgccactttgtttttcttcatagcccatatacctttcatatttcaaa

SEQ ID NO: 89682 - DNA, 539 bp, Homo Sapiens
tctgatgcggttgcgtacgttttcagcgcttcccgctctccaccggttggactgaggcttttaaactgcagtctgctcccgagtccggcttcctactcggtctggtgccccctggtgctcgtcccctccacatcttgagtagttgcgaagagcacaggggtccaggcagacaaggatgctttcaagaaaaacattccatggcggcaagccgcatggatccacatttcccgggcccagagcctttgtagacattgcatgtggacattcaggagctctagagaaagagggggtgttgtttcacgaagccaccagcagaagaaaggtggaaaataagtttcaaccaactacaaaggcagaagtcagcccagccccccaagtgtggtcaaagacccatagatccgtagaccttatcttttcttgaatccaccgctcccccaaccccccttttattatttttcagacaaagcaaagatagagttcactaggatccccgatttcagtaaggcagcccttttttgagagccagaatatccgtctcg

SEQ ID NO: 89683 - DNA, 834 bp, Homo Sapiens
  misc_feature (693)..(693): n is a, c, g, or t
  misc_feature (750)..(751): n is a, c, g, or t
gtgatccagaggtctcatggcagaatgaaggaatttaccaaagccaagccctttgactctgggcctatctatttctttgatcagttgaaacctgaacggaaagatgggaaaagataacctgtgaagaaagttatcccacccaaaatgcacctcaagagctaagtgttggatctttcaacatccttactcaaaatgggaaattctgaagtggaagacagtccccagtatagctgtgaagagactacaagtagccataattcaaatcaaaatagaagaagcaaagcaaaaaaaagagggcgtcaacaaacaacttatccggcgccgctatgaggacctggaaggcgtggaggagagcagggatcagcagtgctcacagagtttctggctggagctgctggagaagaagcctcagatgccaattgtcaaaaaggctgaccccaacatgaaaaaattccattacgctctggtggatggctcctctctgacctactatccttctgggcacctagctgtctgtcagagctattctgacctcccttcaggtggtgtgtacaccagcgtattcagtgacttgccaaatccagttatccttggaacctttacaccttttggatgtggcagcatttcttttcctaagaggtactgatatgaagtgaactgccaaggatgttcagaagcatctgagatcagtgntcagtttcatctgtagcaggacgagctacagacaaaacccctcagacaccgagttanngaaggaaggactttattcagccgagagcttcggcaagactcacgccttccaacaaccgagcaatttcctgtccccttttaacg

SEQ ID NO: 89684 - DNA, 409 bp, Homo Sapiens
aggaatttaccaaagccaagccctttgactctgggcccatctatttctttgatcagttgaaacctgaacggaaagatgggaaaagataacctgtgaagaaagttatcccacccaaaatgcacctcaagagctaagtataggttggatctttcaacatccttactcaaaatgggaaattctgaagtggaagacagtccccagtatagctgtgaagagactacaagtagccataattcaaatgtaggaagccctccatagtctttataatcatagacttttataaagcatatggtttgatgggcaagaagaaacgcagagcatgtggccccccagacaagtcaccttatcacgatacctgcctattgtatctgtaatatgaaaacatatatacacagctgcacacacaaaa

SEQ ID NO: 89685 - DNA, 920 bp, Homo Sapiens
tttctcctcagctgcacacaataaacaaagagtttttaaaaacactttttgataagtacagcagcactggcaacatcctactgcttggtatcatcttcacttgaatgggtatttttctttcttctcttttaaactcaagattaagacactgtctatactgatcacattgcaaccttctcctccagaattccatgctagagcaaaaatactcattagccaagtagttttgaacaatataaaataattattaaagagaaaatttatgctgccattcacctagctacctaaaaatatacttaataaaatatacaaaaacatattgacacacacaaattttggtaatttctatcactggaaaattacaagctaaagctaaaataataaatacataaataaatgcaagctctaaagtgaacccaagtagcatcatatttcatacacaggggaaaaaatcattaagtttaaatagcctggcagcagcaaaataaataatgctagtttcagaaacaatttaaaattcttagccatcaaaccatgcttcaactttcctgggtaactatttcttacctatctccccaaaacaaagaaacaaaaatatcaacagattgttttatgatagctcttcttttggagttctgacttatttaaaaaggatatttacacataacttgagagatgcctaacatattttaaaatgttatccattattaaattgattatgaacagtaatacagatctctgtacgcaactacataatttgtaaaagacaaatctgcgtacagcctaaagtgtttcaggagaaaggtcacgagtaataatggcagcaaaacattaaatgtcacttacccataaatagtatgtgaactgaagtgcaaaaatagcaatgccttcattatcaaaggatccagctactgaccgag

SEQ ID NO: 89686 - DNA, 511 bp, Homo Sapiens
cgttttctgtcctaagtttgtgaagatgaggagcagtgatatttacacttctgcttaaagttaagttgctgatgacttttcaaaaagacaatttggtggatggttccacatttggcctgtgccaatggctgcccagaagtggtaacttttctggtgcacagaaaatgccagcttaacatctgtgacagtgaaaacaagacacctctaacgaaggctataatgtgccaagaagatgtgaaactattctgctagaccttggtgctgatccaaatattaccgatgtctatggcaacactgctctccatatgctgtctataatgagaatatgtcaatggtagcaagactgttttcacacaagacaaacatcgaagtgaaaaacaatgtagagcaaccaatgttattttcaaaatatttgaaatccacttgttttaacattgacatatgtaagggtcagtttttgctatttggaagcttaagcaatccctgaataaaaataatttgaaataaaaaa

SEQ ID NO: 89687 - DNA, 690 bp, Homo Sapiens
  misc_feature (433)..(442): n is a, c, g, or t
tgtctatattaagaagtatttactctgtggagtaaaaaagagcgtaattaaaatactagcaacattttacataactcaggaaatgtatatgtggggaaagtgtccgggagcacttagaagttagtgtgagtgctccaagatcctgatactctttaggatggaagttaagataatgaatgactttagatgttgttaatctaagtacttaacagaaaattttcagataacctttaaagaatagcaatacaatataactttcaaaccagtagagaggaaacattctgaaataagggaaaaacactttagaaatcccaactttgatagaccacaaaaatgcaagaaggaagaaaaagcatagaaaaagcaaagaaatggcatagtatataataaatggttacaataaatataaattgcctatctcaccagattaatnnnnnnnnnngtctaccttgttcaatatatacagtttacaaaagacagtacaaggacagagaaagacaaaaagtagaattagggaaaataaaacaagcaaatatacctggttaggatagctgtatcagtattagccttacaaatattaaagtgaaaagcattaataaggataaggagactctcaaaaataataaaaatttcaactgaagtaggtataacagttctaaacaaagttattaaagtaaaaatgtagagggc

SEQ ID NO: 89688 - DNA, 546 bp, Homo Sapiens
  misc_feature (93)..(103): n is a, c, g, or t
  misc_feature (191)..(221): n is a, c, g, or t
gttctgaatttgagggtttaggaattgacttttgtgtaaagaatgctacggtattataaagctgtggaagttttttccactagtttcaggtgnnnnnnnnnnngttgttgttgttgttattttgaactacttaccaaaattagaagttaaaatctaattagaaattaataagatactaaaattcatgacannnnnnnnnnnnnnnnnnnnnnnnnnnnnnngtatttcttgatttgggcataaaaggcacacccattctctcatgcttggaagaagctgctattcctactggctatctaagaagaatggaattattaattttatttgacttattaattttaaacgagtttaatttgggatcatttagtaagtactcttttctttttgagctgtgatagattatagtctagtttaagttgctcctaagtagacagatgaagaaactagggaggctttagagaggaagacagatgcttgaagtatgaacaatatatacccttagaagaatgggtcaaataatttgggtttttaatttaaaataggagg

SEQ ID NO: 89689 - DNA, 895 bp, Homo Sapiens
  misc_feature (795)..(843): n is a, c, g, or t
ttgcgtgatacaggagtgccccgtgagaggcctccctaaaagttaaattccaaaagattggcttaattgtgactttaagagctggaaaatcagtaccattaatctaccttaggatttacccaatgtgacttacccatgtagaactcttaactgcatctacacactatattgctcttgtaaccaaagatgctaatgagtgtatttgaattagcttctcctaggaggggtgactactctgctaaagagtatgaaaaatgttttgatggaagggacaagtttggttggtagtagagtgtttgtagcttatctggtaaaggaaattgagtgcatctgcatgcatagcacaagtaatccatcttctggcggttaactagagaaagcttatagtcagaggctcttgtgaatgcactgaagactgctgtgtctcaggagtttctcttgatgatctaccttttctgaattacttgaaaaggccaatgtgcttggttcgagttttttagtgaatatttacaatttcctgcttttatctagaaaagaagcaaaagggaaatatgaaagcagtatatataaaatctgtgctttggaattgatatttgcatttggtgattgttttttatttgattcagctaaattttatgtgttgaatacttactctagaataactacttttggaactggaagggggaaatctgtaaatggaaatttatttttatgttctgaaatttgagggtttaggaattgacttttgtgtaaagaatgctacggtattataaagctgtggaattttttcccctnnnnnnnnnnnnnnnnnnnnnnnnnnnnnnnnnnnnnnnnnnnnnnnnngaccgcgtatgcggccgcaagcttattccctttagtgagggtaattttagct

SEQ ID NO: 89690 - DNA, 663 bp, Homo Sapiens
ggcagtcacaggttcagcagtccatttctgaagcttgtgtaagaaagccaggccacagggtacaaggatgtggtgaaaagacccatggacttaacatagcctgaagagaaatctctctaagggtcggattcgcaccatggcccaattcctgcgagacctgatgctgatgttccaaaatgctgtaatgtacaatgactctgatcatcatgtataccatatggctgtggagatgcggcgagaagtcctggagcagattcaggtactgaatatctggttagacaaaagaaaaggctcaagtagtctggaaggagaaccagctaacccagtggatgatggaaaacctgttttctaacctggagctgctatcctgactttttctagagtttgaatctctcccggaactctgacctagagaggatcctggtacttctttgccatgtcctcattttcttttccaacaagaataataccttaactcacaaccaacgagtcaaagatgcatgtggacataatataaagaaaaaaaggggaagctgaggtttggatttatgccataaatgttgcccacatctttgttccatcggcttgatttaaagacaattccattagatcttttctaagccttttactctataaataaatgtatttacacaataaaaaaaa

SEQ ID NO: 89691 - DNA, 460 bp, Homo Sapiens
gatgttacagctcccatttcccgacggcctgagcagggacctggcacctaagttatctttaacttcccaaacaagtctgaaataaggacacttaggctcagaatgaggcccaaggtcacaccgatcgtgaacatgacaggtgcaaatttgaacccagtagtgtctgattccaaagctgaatatacggatatgttaggatgcccacctactatgtcacctcacttactccacccttgagatggaaccatctctgtcaagaaataaggattaaaccaaatcaagtacaaatgaaaacccagactgcaagccatcatagaaagtaagattcaatgtgtgtatgtatttgcatgattaagcacatgcagagaaagaatacatctagatatcaagtggtaattttgaaattttctcctttatacatttctgtttttctcaaatattaaaatagatgattcttatt

SEQ ID NO: 89692 - DNA, 1396 bp, Homo Sapiens
taaactttatttatatatttgattattaccaacgcttccgcatgactacctcaattcccctacggcattcccgggatgtcgagatggaggaagatgcgaccggcagacggcattcgctgggaacgacggatagactgggggctgcggcctagaggtccgggcttggagttcgcctcagacgcggtggagccgccggagtctgagaaggtcttcaggcaccatggaggacaaacgcaacatccagatcatcgagtgggaacacctggacaagaagaagttctacgtgtttggtgtggcaatgacaatgatgatccgtgtcagtgtctacccattcaccctcatccgcacccggttgcaagttcagaaggggaagagcctctaccatgggaccttcgatgccttcatcaagatcctgcgagcagatggtatcactggcctctaccgagggttcctggtcaataccttcaccctcatctctggccagtgttatgtcaccacttatgagctcacccggaagtttgtagctgactacagccagagtaacacagtcaaatcactggtggctggtggctcagcctcccttgtggcccagagcatcacagtgcccattgatgtagtctcccagcacctgatgatgcaacgcaagggtgagaaaatgggccgctttcaggtgcgggggaacccagagggacaaggcggtagttgcctttggccaaaccaaggcacatcatcaggcagatcctgcaggctgatggactacgcggcttctatcgaggctatgtggcttcaacgctaacctatatcccaaacagtgctgtctggtggcccttctatcacttctatgcagaacagctcttcacacctgtgtcctaaggagtgccctcacattgtctttcaagctgtctcgggggcccctggctgcagccactgcctccatcctcaccaatcccatggatgtcatacgaacccgtgtgcaggttgagggcaagaactccatcatcctgaccttcagacagctgatggcagaagaagggccttggggccctcatgaagggcctctcggccagaatcatctcagccacaccttccaccattgtcattgtggtgggctatgagagcctcaagaaactcagcctccgacctgagctggtggactcgagacactggtaaccagtggtggggagagaagcctgctgttttccacactaccgtgggtcaggggcagagtggagaggacagcaccctctccaggtgctcccaccacacacccagccctgccctgggccaagtggcctatctgggatagggatagagactttgaactgctcttgctgaagaagctccacgcctggatcccttgcccccactatttaaaattctcttctgagctggaaaa

SEQ ID NO: 89693 - DNA, 389 bp, Homo Sapiens
  misc_feature (354)..(354): n is a, c, g, or t
tctcaaaaggccacatgtagaatattcaaaaagtgttgaaggttcaaaaatcttctaacattttaaatgcctaatagacataaaacaaaagaccaaactctcctgcctgctcagcagtacatatggcttttgaatagccacactcaaatgacagcccctgttccccagttcaaactttctgagactgcaagcctactttgcaagaggaaaatctccacagctatgtcatctacctgcttatagggtgtaaaattcaatctatgactaacaaatcaatattgtaaattatattacttggatactcatttgtcttacatttatttatttagcctgctctgtgggtcaaataagagngagaatcttaataaacattacttactatctattaa

SEQ ID NO: 89694 - DNA, 733 bp, Homo Sapiens
ttttgttcgaagttcaattttaatcagacaacccacctacccgcacttgcacccctagcttaaaatgctcgaatggctttttattgtccttaatgatgaaaaggaaatattttatgtgaccaaatatatttgacctatgaggtcagatatattagggccactatctaaagcatagttccaagcattaaaatagttactgtctcagattaaaacagtggctggcacatcacctcaatagaggttacctattcttgttgccacttagcctcatatgtaccatgttttacttaataccttcattgtcctttaagtattcggaatgagaattacagtgcttcattcagcataagacttttgttcatgctgtttctttggcctgaaatatctatcccttcccaattgcctaattaattcctatttgtctttcagatcttagctagttcatcacttcctcagggaaacattccctaatttctgtcacagagtaagacccgttgttatacgtctcacctgacccatgtacctctacttagcatttaacacgtgtaattttgtatgtattggtttgattaatgtcagaaccactagattgtaaactccatgaggaccggaattttgtttctgtcattgtcattgttcaactttgtattttttatgcctcaaacagtgcctggcacatagtaggtgctcaattaactttattgaaagaataaaatgaatggatgaggtatcc

SEQ ID NO: 89695 - DNA, 576 bp, Homo Sapiens
  misc_feature (98)..(107): n is a, c, g, or t
aaaacttgagaaagtactttaattctgtaggcaaaggttcagcaaatcagctagcactaatcttgaccaaatgggtgagtcagcctcatcacagagannnnnnnnnnaatttagatgaaatttcacatttaaaaacatggtaactccaagcattcttccaaaaacaaagaataaacattggaatagtcacttacaaggacttaacgacttgtattaaacatattttacactaaagtactagatggtctctagttcattttagctcaaaccttccttaattcttcgagtaacttcaccagactattctttaagtcttagtaattacaaatagaacctgaatgagaaagaaaattcagaattaaagttgttatcagtaagcctaattaaacagtgcagacagaaagatggcagtagaataaagcattctacattaggaaaagggagaatataatcagtagttcacagccccatgaatgaagcacagcatacaacaaagtctggctgggatttgggataaagtggacaatatctgtgctgctcttgagtggtaactaacaaactaaacagggatataga

SEQ ID NO: 89696 - DNA, 516 bp, Homo Sapiens
tttgaagattaataattaataactaactagcattttatattttagcaataaaaacgttcacttaagaggccattttcatttcactgagagatctaggaataatgccttttttctttagtttttacacccaagacaaattttcctgttttgggcaaactacccatattttcaaacagttgttgtaccttgtattcaagaactactgtaatgcattagtggtctggcttcattttgtatgatgccagatccttaatttacccagcacaatcatttcagtagtttcctatggctcctgcaaaaatgcaaacagaaaccaccacaggaacagccccttgctgcctcctgttgctgaggtagtagtcgctaaagaaaattgaaggctccttacaatctatatttgaaaactagaacttctgtagaaacacacagatcccgatcttagaagttgtacaggacaatctggtaaaactgacataattgtgatttattaacatgaattaaaatgcccaaccagtg

SEQ ID NO: 89697 - DNA, 409 bp, Homo Sapiens
gtttggcctaaaggcacatatttttacatctcagatacctggggttaaaatgtgacctatgaccacaagacgggccagaataaaatagaggaacatggaagaaaatgccaggggaaagccaggcatatctgcaggcccagcttccactctccccagaacaccctaagctgggagactcatcttggacacccccggccgtcccaccttcccctttgtgggaaatgttctctcccatccttcagccggcaacttaggctcagtactgcaagcctcggctcacccatcccattccagaagcctcccgacctttagacgaggccagaccccctggctgtgctcatggtacccttctgggcttcccctttctctgtgctactgtgaccacttgttttaaaattctgtctcaaaa

SEQ ID NO: 89698 - DNA, 555 bp, Homo Sapiens
ttttttgagacggagtatcactctgtttcaaaacaacaaaacaaaacagagaattcaggatatgatgtctcacattatacaaggatataaggcaaaactgtcaaaaagcaatttatatttcacatatcctgacattttgctgttctgtgtatacttttactatctaaagtgagcaacactaactgaactgattaatatatggaacaatgtaggagaaagaagaaattcaggagaaagaagcagaggttcctagtggttattgaggataactgaaaaggacagaaaaaaggaacaggaagaggaagaataattaaaaatgtaccaatgcaaagaattatgacagttacaattaagactgcaaataaagtagactgactttatgcttaactcatacattaggtcttatttctgttacatagagcagtcacctttctgcttctttcttcttttccttcatcctaataccccaaagacgagaatctacacattaaaatgagtaattagcatcataaacacatattctcaatagtttgagtcaaaaatagcaagttcctg

SEQ ID NO: 89699 - DNA, 281 bp, Homo Sapiens
cagtggaaaaactaatacccagaaaagggaagagagttaacccaaaaattacatctagtgaattgtctgattagctttacaattgaggcattgtagagctctttgaggcattagtcttggttgtctgagtgcctggctattaaaggctgtctttgcctgttccctctttctgttagctgcctggaagtgcagggttgcttcacttttagcaccttgactctgtacctgacatggtgcttcaacaggatattgctttgttaccacaggccctttgaacttgg

SEQ ID NO: 89700 - DNA, 775 bp, Homo Sapiens
  misc_feature (213)..(248): n is a, c, g, or t
gagatgggtttccaggccactgaccttgacagcaacccttcagtcctcagaagacatatgatgcaaaaaggcatgaattcctggaagacctgcagaagaaagaagcagaaatgagacacatgtttgttatgagagtgaagaagaaagaagctgaactaaggaggcagagaaagagcttcacgagaagtttgaccttctaaagcggacacaccnnnnnnnnnnnnnnnnnnnnnnnnnnnnnnnnnnnnagcttgaggaggaggtgaacaacttccagaagaagaaagcagcggctcagttactacagtcccaggcccagcaatctggggcccagcaaaccaagaaagacaaaggataagaaaaactgaccatctgcctcttgagagagagagaagtgggcatccttcctttaaattcaggaaccactgttgttttatttgactttttctgttacttgcatcccttatataagttgttttggatttgggactatgttttgggggagaaaaactccagttagttctgttttttgtattggttattcagcttacttttggtatcaaaattatgccagttttaagctcacttgagtgaagtttaagtcacaagattctgtttaacatgctttccttgttttggaaacaaccaaaaacttcccttttttgttacgggattttgacctacaaatcctaatcatgtttaaaatgtgccggtgttgggtagatgacttttctgcctctggggttcaatttatatttaaagataccttaaaata

SEQ ID NO: 89701 - DNA, 453 bp, Homo Sapiens
ctttggagtgttctattgatacaatgtttttatttttcagctgaccatctgcctcttgagagagagagaagtgggcatccttcctttaaattcaggaaccactgttgttttatttgactttttctgttacttgcatcccttatataagttgttttggatttgggactatgttttgggggagaaaaactccagttagttctgttttttgtattggttattcagcttacttttggtatcaaaattatgccagttttaagctcacttgagtgaagtttaagtcacaagattctgtttaacatgctttccttgttttggaaacaaccaaaaacttcccttttttgttacgggattttgacctacaaatcctaatcatgtttaaaatgtgccggtgttgggtagatgacttttctgcctctggggttcaatttatatttaaagataccttaaaataaa

SEQ ID NO: 89702 - DNA, 808 bp, Homo Sapiens
gcggccgcggccggaggagctttagcagcagccgtggcggccacggggcgaggcgcggcggtcggtgaccgcggccggggctgcaggcggcggagcggctggaagaagttggattccatgggttccaagagaagaagagctacctccccttccagcagtgtcagcggggactttgatgatgggcaccattctgtgtcaacaccaggcccaagcaggaaaaggaggagactttccaatcttccaactgtagatcctattgccgtgtgccatgaactctataataccatccgagactataaggatgaacagggcagacttctctgtgagctcttcattagggcaccaaagcgaagaaatcaaccagactattatgaagtggtttctcagcccattgacttgatgaaaatccaacagaaactaaaaatggaagagtatgatgatgttaatttgctgactgctgacttccagcttctttttaacaatgcaaagtcctattataagccagattctcctgaatataaagccgcttgcaaactctgggatttgtaccttcgaacaagaaatgagtgtgttcagaaaggagaagcagatgacgaagatgatgatgaagatgggcaagacaatcagggcacagtgactgaaggatcttctccagcttactagaaagagatccctggagcagcttcttgaagccatagttgtagctacaattcatccagacgtctcatttgcgaactttttcagaaactgccttctaagtgccatatccagattattatgcaatactaaagagcctatggatctaaac

SEQ ID NO: 89703 - DNA, 936 bp, Homo Sapiens
tgcggccgcgaccgtgggcggtggggcaggtgggtcaggcggcgcgtgccctgtcccctccccgggctccggccacacgagcgggccggcgctgcgctgctggcaacgtgtcgcgggaacgctcctaccccatctgcatgccttacatggctcgaaagtaaaaataaaaagaattacgctgcgggcgaggcttgtgggggtgagaagaggagattccacgtctccccagtgctgcgtcctgataggacccccagggccttccgagccctctcccagcgaccacctcgtgtcccggagttgcagcaagagatgtgagaaggtgtcaccctgaagaggaagtggtggaccagccctgcctgatgtggacagcaggggacacatgtctgcctgtcggtctatctgaaatgggggaaaaaatgctgaaagccaaaggagggcttaatgtggccttttccaccttctaattccatagaacctcagctctgggacttgcttcctgacctagggtgcaggggccaaatttgtttgggaacaaccccattcacaattccccatgaactttcagaaaggacccttgcgtcttaggtcctgagaagtcacaaataagcaagctgcattgtctaatgtcttgtctacactgttttacaaacacatttaacagccgaattgtatatgtgccctagaaatcactttgagaaacacttatttcctgatagaggacttgatgggaccattctgcagccccatctgagcatgggctggagagtacataagtatctgggagctggaagtcctcaattccaggcttatctgcccccatcagcgtgggacctcagttcctcctccaaggagaagagcgcccctcccttgatgttttgtgcattcttttgctaaatgtttctctggtcaagaactttaatccccctacaaaaaaaa

SEQ ID NO: 89704 - DNA, 362 bp, Homo Sapiens
ttttgtatttaataaaatggcaatttgtaaattctggtgaatactcaaaattgtagctaaaaacagctatctgaatataggtttaaaacctcaaagacacagagctaagaaatatggaatacattgtatattgctttttcaatagagtagacataaaattgatgacaaatgtttccaaaccctcaataagaactcaaaacatcatactatgccaagctgaattacagaagggtatctaagaaagaagacagtgcatcagttatctctagataaagagccagtaaaatcaagttgcatttgatgtatacatcttattgggagtagttttcagaaagcaatttccctacaaacagaaaaagcat

SEQ ID NO: 89705 - DNA, 556 bp, Homo Sapiens
  misc_feature (453)..(472): n is a, c, g, or t
tgtagttccctggagttggggccattacagctagaaatatggaatgcattcacccacagaggtggcaattctgcaagtagatgatgacagtggcgaccctctgaatttggttaaagctccagtgtcaaggtcccctccaagggagcaggtaattgaagacaatatggtccctcagggaatgcctgaacaggaaactacagttggtgccatccaggaccacacagaatccagtgttcacaactaagaataaatacctagagctacttgtgagtgaatcattggcttctagaaatcagatgcccagatgatccaagactagtttgttatctcatctggaacctacaccaagagatgcagtcagcatcttaaagtaaatgttcatggaagctaaaaaatttacctcctttccttttccctttccccttaaaacaccagacaaatcgataacaactnnnnnnnnnnnnnnnnnnnnctgtaaaaatgtattttgttaatttttttggccaatttattttctcccactttgtcattaaaatcacatgtctaactggctcac

SEQ ID NO: 89706 - DNA, 653 bp, Homo Sapiens
tcctggaatctggagtgagtcccaagttaccatgccacacatcagagttgcgcacgatgaacaacaaaggactggtcaggaagccccagcccatccgcctcagtggagtagattttgtctttggcagggttatcacagctcagccaccaaagtggaccgggactttcagagtttcagacaagtcagccttttgcaaaatcattagcagggagcaccagtggcccattggactgaaggagcctcagattcagatgacagtcactatgtgcaaacagatgctgcgctctatcctcttgctgtatgcaacttacaaaaagtgcacctttgccttgcagcactccaagtaaagggtcctcatttgatccccatttactcacaccatgccctttggtatgtacctaaagcttacagaaacctgtccatgtaaatgaaactgtgacattgtcccagccatcttgcttttgtttcaagcagtgatgattcaggagcccctttcatcccttcccctccaaaaaaggaccaatgatagagaacaaggaagaacattcccattgtaaggttgaaccatttagagtcaaactagcattgacatgtccatgtgacaaccgttaaacaaatgatataaaccaatgagcctagtgtgaactcacaaa

SEQ ID NO: 89707 - DNA, 445 bp, Homo Sapiens
tggacccgctggaattaattgccttggcaaacagattttgcctgccacacttggttgcacttgcagaacagcatgccgttcaggagttgaccaaagccgccacgagtggcgtgggcattgacggagaagtgctctcttacttggaattggctcagtttcacaatgcccaccagttggccgcctggtgtttgcaccacatctgcaccaactacaacagtgtatgctccaagttccgtaaggaaatcaaatcaaaatctgcagacaaccaggaatacttcgagcggcaccgctggccccctgtgtggtacctgaaggaagaagatcactaccagcgtgtgaaaaggtgaacgagagaaggaagatattgcactaaataagcatcgctcaagacgaaagtggtgcttctggaattcatctccagcagtggcctgaagaggaagagaaa

SEQ ID NO: 89708 - DNA, 461 bp, Homo Sapiens
tcttagaaagagaaaaaaaccctatcaacattgtcttaacaatagtactctacccttcgagagtaagagtaatggttgatcgtgaattggctgacatccatgaagatgccaaaacatgtttggtactatgttccagagtgctttctgtcatttcagtcaaggaaataaagacacagctgagtttaggaagacatccaattatttcaaattggtttgattacattccttcaacaagatacaaagatccatgtgaactattacatctttgcagactaaccatcaggaatcaactattaaccaacaatatgctcccagatggaatattttcacttctaattcctgctcgtctacaaaactatctgaatttagaaatctaacatacgtcagtgtcctaagttccttaacaatgcttaccaatgtatggcttagaagttaataaaaattcacttcatgtaagtttt

SEQ ID NO: 89709 - DNA, 480 bp, Homo Sapiens
gcggccgccagatctactcgcggtaccagaccctggaactggagaaggaatttcacttcaagcgctacctaacgcggcgccggcgcatcgagatcgccaacgcgctttgcctgaccgagcgacagatcaaaatctggttccagaaccgccggatgaagtggaaaaaagaatctaatctcacatccactctctcggggggcggcggaggggccaccgccgacagcctgggcggaaaagaggaaaagcgggaagagacagaagaggagaagcagaaagagtgaccaggactgtccctgcctagcccctctgccccagcaaatgcccagcccaggcaaattgtatttaaagaatcctgggggtcattatggcattttacaaactgtgaccgtttctgtgtgaagatttttagctgtatttgtggtctctgtatttatatttatgtttagcaccgtcagtgttcctatccaatttcaaaaaagg

SEQ ID NO: 89710 - DNA, 435 bp, Homo Sapiens
cctttaaggaaaaaactggcaaccactgccttagagcaatgagggtctctacagaccaagcgtatatgtcttaggaatatggatctcctcatctttagtgtgaaaaacgatgctgacaaatgcaggaaaagaaatggaatgatggagatccacttttaacaatgctggtttatgtgcagtgaacttgacagtaactactttttaatttactgatgccatgaacagtccaaggaaaaaatccttttctagattagccgatttcactgtattaaagataatttttaatgtacatcaaaagacgtcatcaagagaatgaaaagacaagccataaactgggaaaaggtatttccctcaaaacccacaatgagtagaacccagattatgtaaagaactcctaaaaatcaatcagaataaaaaataatcaactggaaaaaa

SEQ ID NO: 89711 - DNA, 545 bp, Homo Sapiens
  misc_feature (234)..(242): n is a, c, g, or t
agacactttcctcctccccgaccccggacatctttgggctttcttatgagggaggcttatttttgcgcaggtgtaaggttttatccagctgccagacaacttgtactgatctttctttgctttgcctactaatcacacacaccctctcttctagcctgtgaagacttaactgattttctacggatgaaggtttcagtgtcccaaggccccataccgtatctgattttactttannnnnnnnngttaagcctaacagcttctgaggagccacgtagagctcaagaagcaaaagctactgagagtagatgctatgtaaactgcacaagacgttgacctttgttaaatccgaacactgtttaagataatgctatctcttacccacgaggctgtagcttggaatattcagtgctctgaaccaaattaaataaattagtgctttatccgggaggggaggagaaatctatgttgtaacattgaaacacattgatttgatttctctccaggatgttataacgcattaaaagatattttaaatatttttcacg

SEQ ID NO: 89712 - DNA, 450 bp, Homo Sapiens
tgggccagtttctgaaagagccactttctgagcatattaaagaaaaatctcttgtaaaaacaaagagggcttagtgttaatgctcctttatgaattgtgttagtaggaactgattgttcaatcatggggcagtgcaaaacgttagctgtgttaactctgagcaaacaggggagatccttcaaggacctggaacactgtttcctagaaaagcttttaatcatgtgtccaaatcactgccacactcttctttaatgataagaattggatttagatttaaggctttagataaatgattctcaaccttcaagatgctatgaaatgacctaattaaggaattattttttcctaggcctatccagagattccagttcagtttgtggtatgaggctgaagtatggatatttttttcaaagctccttaagtatataaattgataaaattactttggaa

SEQ ID NO: 89713 - DNA, 419 bp, Homo Sapiens
gtttgtctgtggcccgatgaggcgcgcctcgcagcctgctctcccggtcaccgccgtcgccgtgacctgtggcctccaggaaacgagagggaccggggcgccccacccgcgagacggacccgcagtctcccggcgggcccgcgggcggcgagacgcggcgttcctggttttcaccttcgctgtctagtgctgcagtctctcactctctgtaaatttcatctgttgagtgtatttaactaaaaagggtaattactttagataaaaatcctttcctgcctagtgggaaccttggcggagatgatgcctaatgagatattttgcttttgtctgtttagagtaaaattagaagatgttaacgctgataacggttttctccagatcattaaaaatgtaacattgtaggaaggggcacgtcttgc

SEQ ID NO: 89714 - DNA, 358 bp, Homo Sapiens
tccccatttaccaacccaagcaagtaagcccacctgagccacagaaccttctccctccctacaaaaggctcaggagtaggaggcaccagacagcttttatcgtctctaacactaactcagttttgaataaattgaagagcgaggaagagtcaaaggaaaaaatgctgggtcagtgattacccttgaaaatactttgcaattacaaaaacaaacatttaatgaactgatccagttagtcaccaacagaatacttaagtacgcctcttgattcctttattggaagaactatgacccatccaaatcattcttcaaagtcagtctgtctgtgaagaataaaacaatgattgctaataaaaaa

SEQ ID NO: 89715 - DNA, 494 bp, Homo Sapiens
atgatttcctctttctgggaacgtaggacggtgcagaaggaggagaacccccgatccccacccaaggaagcaaagttactcagaccaatcctggtgatcatggggtgacagatgttacagccttcacatctggcctcttttgtagctttgaactaacctgcctaagaagagaggaaaactgttgatgtagtgggaacgctccctcctcgagcattaaccgggttgaccccacccctctgtcctcgctgtcttcagtccaatcaagatcggaaagcaggatcaagagaaagatgatcagaccggaacaggtaaacgttccatatagagatgcttcggaagtgcggagaagtgacagcttatcccctctcaggccgtcatgttctctcagcagaccctctgaattactgatgtcagaacttattggctgggctacagcacataagcaactcctagagttttaagacattaaaagaaggtgatttcagacaagaaaa

SEQ ID NO: 89716 - DNA, 1091 bp, Homo Sapiens
  misc_feature (79)..(113): n is a, c, g, or t
agactatatgacctcatatggcgcctcgctctacagccgaacgacgagcgcagcgagtagtgagcgaggaagcggccgnnnnnnnnnnnnnnnnnnnnnnnnnnnnnnnnnnncagtcgacggtaccggacatatgcccgggaattcggccattacggccggggacttccgaagagagaaccgccatgaagagagaagggggtgccgcccacctctgctccgacagcctcccggagtcccagcagcaagacggcaaccacgcacccaacttctccagccacggctcatgccgccgtcgccagcggcgccgacatgacaaggcgctgcatgcccgctaggccaggtttcccctcatccccagccccggggtcgtcgcccccgcgctgccatctgagacccggtagtaccgcccatgctgcagcgggaaagagaacagagagtcctggggacaggtaccgtgcagagggcttgagaaggggccgggtcgcgggggcaagggtatgagggtagggctgcagaccgccgctcttccagttcccgccatcctccgcgagctcaggcgttggcatttcggggccttggcaaatccccgccccgcctccgcgcaggggctactgggagttggagttgcttctctgtagttgggcagctgctcttggtctagtgaccaccagcctggacagctacggagaacccgccttaggtagaaagaaagtgatctctttccttttgcaagaatttgacccgggaccctaactgcttaatgcatattcagatcgtattctggtacgttgtcagttctactgatcctagtggtttagtaatataaaccttttctatgttgtgggtgaaattatgtaacctgtgatgagggaatcccttccacgaattactttgtagtccagcgtgcacgctagttcatacttaaaagaacttgcagatttggaatgtgacgtgttttctctttcagtaacttcacgcctctccaagaggctaatttttttgtaaagattttgtgggagctatgtaatgagatggggagtttcatctaatgacatcctctgacaataaaacatgtttaaattccctcc

SEQ ID NO: 89717 - DNA, 293 bp, Homo Sapiens
attaatacagagcctcaagaaagacaaagcaggttaaagaaagtacaagcatctttgcccaccagagtgacaaccctagacatcaccgaggatgggcaaggcacatccaatatccttctggcaggagtaagaattagccccagctctttggaaagcactttggcactgtctagccaacctgtgtgtactgtgtgaccctgacattctctgtcttggtatagatgtgagcaaagttcatactcatgtgcgttgggacacgcgtataagaaggtccacagggcattgcttatagg

SEQ ID NO: 89718 - DNA, 491 bp, Homo Sapiens
tttgtttgggtgctcttcctcagttgttgtcatggagactagtggccagaaactagagctaggttcatggtggtcaggaaataaggaagagaaacttatatttacataatgcgttcattatgtgccaggaactggactaagtatcctgtgctcacaaaatctatgtccttgattttattaaatccacacaattctggaaggttggtgctagtatctccagtttatagatgaggaaactaaggctcaattaagtcaaaatgtttgccaaaggtctcagaggtaagaagtggcagagatgggtttgaaacctggatctgcctggcccccaagcttgaatttttcccattataccacactactccaaatccattcagggtaggtcttgattgagaagaatgggaatcaagattcctgtcacagaaagtgtgagcctttagaacactagaagctttggggtctttggatgagtgactgctgacgcgaataacaag

SEQ ID NO: 89719 - DNA, 426 bp, Homo Sapiens
  misc_feature (114)..(211): n is a, c, g, or t
gcatcaaagcgggatgtgctgctcgttgccctgctccgtatgagggcaaagaaatggccctgcgctgtccgctgtgcaacccacagacccagatgcttcatcgcaaaatttggnnnnnnnnnnnnnnnnnnnnnnnnnnnnnnnnnnnnnnnnnnnnnnnnnnnnnnnnnnnnnnnnnnnnnnnnnnnnnnnnnnnnnnnnnnnnnnnnnngagcagggatttgaatcctggtgtgtggactcagcacatgctgtggagttgagcaggcactgggagggggatggccttgggcctgaatccgagcccatcatctcccactctgggtcccctcaagcaaattacttaaccctctacgcttcgggttcctcatctgtaaaatgaagataaaaacacacatctgcagacaacttggggagaggtgaaaa

SEQ ID NO: 89720 - DNA, 828 bp, Homo Sapiens
  misc_feature (68)..(68): n is a, c, g, or t
atggatgaccagaggagtcttttacaaagagatcaacacagaagacactgctttggggtaaagaactntttgcaaaataatgctttgtggagtttaaaaattcagggaaaaaatcggcagaccattagtactatggattatttttttcctttcaaacacggtaaggaaacaatctattacttttttccttaaaaggagaatttatagcactgtaatacagcttaaaatatttttagaatgatgtaaatagttaaccttcagtagtctattaaggcattaatacttctctggacatgcgcgtttgagggtggaggggtcctgtaaggtgcttcatcgtctgtgattactgcttgggatgtgttctttggcagcttgtgagattactttacctagtgtttataaagtaggaagttaagtgaatcatagattagaatttaatactcttatggaaataattttttaacatcttaattgacaatggcgtttttttatacataaccatggatgtagtgggaaacaatgttgtttggtaaaaataatgtacttgatcaatgtaaaaaagtatataaaatagtcttactaaaaatctaggttttttttcctccatgcaaatctgtttttttaggccaagtcagtataaagaaactctactcttgggctgggatggtggctcttcctgtaatcccagcacttgggaggcgacaaaggcggtcacttgaggtcggagttcagaacagcctgaccacatgtgaaaccctctctactaaaaatcaaaaattgccggcatgtgatgcactctgttatctagcactcggagactgaggcagg

SEQ ID NO: 89721 - DNA, 572 bp, Homo Sapiens
  misc_feature (545)..(546): n is a, c, g, or t
agcatgctttccagaaagtcacactctcagatctgtgtcaagttcaatgtgagccctggcaaggctggcatattaacacctgccttctggcttctgaaagtgagatttgtatatgggctgcactcacgcatatacgagttggtttatctttgtgtacatgactataacccagtgatgctgaggtcatgtgctggaatgctgtatttggaccacacatttcaaagttgccctatggaaatgaatcctacttagtgacaagtcatcaaatgtttgtcacatgtgatgaagacaaatatgtatacctggcatagagaaaaatatatacctggtacattggagaaaaataattacactttcaaagagaattccctttgcaattttatgtttggatcaccactgtaagcacactttatttgcatttgatctgtatttgtatatgctgatgcaatgataaaaatcactgtaatacttcattgtgttgtactggatgcaaagctagaaaatattgcaataaatgagaccgatgaaagacttctccaaaaccnnaacccctctccaacccctaatcttgt

SEQ ID NO: 89722 - DNA, 607 bp, Homo Sapiens
gcattgatacacggggaatgcattgatacacgtggaatgcattgatacacgtggaatatattgatacacgtggaatatattgatacacgtggaatatattgatacatgtggaatatattgatacacatggaatacattgattgaaaagcaattaatatctattttccggggagatccttcagcaccggaggggtctggtgatgacaccctggcctggtgcgtggaaagacctcacagaagaggaacactgatgatttgctgagactttgtctcaactgaggcaacaaactcactggccccgcggtgccctggtgtcttcactctgccccacctggccctggccctgctgcgctggactcccccacactggctcctggagaggcccccgcacggtctatgcctggatcccgagcccacctttcccccaaggacgcatccacattgtcgaaatccaggaaggaaaacgaaaccacagacgttttctctcctcctctcattaaccccatgcgatgacagttaaggagcagaagggaattaaccaggcgtgagggagacagaacctggctttcacagaaaaaagattcaacaaattcccgggaggtgggaa

SEQ ID NO: 89723 - DNA, 566 bp, Homo Sapiens
aagtggtgcatctcaatctctttttttcttgataatggataataaggcttcttaattcaagtcaattcagtcatatgagtctaaaacgcagccttttttgggtaacaacaacaaaaagtcaataatttgaggattcttcctttaactcttatttccttctctgagggcgtggtctaagtttctgacaggtttgtcacctctcctgtccctcagggaagggagtctcatcccagctgtccttgttctcactggcctcacttgacacgtggccatccccttctggcctggagtgacagcctctattccagctgccgatacccatggctctgccctggcctctgtccaggccccctagcctgccatgctctgtcccctgtctgatgatgtccacagctcttgggggtccctatgttcctgggaggctgatcttagggtccccactgccaaccgttgctgtcctattctattactcagacagattgtagtgtcctagctatatcttggatgccatgcaaaaccttttttgttctggaattcccataaacctaataggatcactctgaaaa

SEQ ID NO: 89724 - DNA, 319 bp, Homo Sapiens
tgcacctcccgccggggcccgggccaacggaaacttctggtggcccatcccccgggacgccagccgagtgagccctgccccgcccggtcctgcaaaggtcgacggagcagccgcagccgagcgcaccggcacgccttgccgggacccaatcactggcgagaacacccagccaacaaaaaataggcgcgaaattcccgtgatccgcggcgggctccgggtctccccaacggcccgcgcatcactatcccttttcgcctgatttgcgtgaagaccaaccgtccccagtaggcgcctaataaatactgactgggtgattgtc

SEQ ID NO: 89725 - DNA, 312 bp, Homo Sapiens
gttcttccaaaaagggccatctgtgaccctgagagataaacctggcagaccagggctcacatcttagtaaatcacctgtaaataaagcttgcaagggcagtgactggaagctgggagagagggtcaacagctgaatctcagcctgatggaggccaccatttaataagtaaatacatgcacggctatttagatcctgcatcagacaggtcatcagaaaacatgaagctaaatgcagtaaagaattactctcttgaactcttgaaaatatcaaaaacatgaagctaaatgcagtaaagaattagtctcttgaaa

SEQ ID NO: 89726 - DNA, 448 bp, Homo Sapiens
  misc_feature (180)..(191): n is a, c, g, or t
tttaatatcacatatactttaataatattgtgtattattgtaacaatacacaatatcacatacacttcagaattgcaaggaagtttctaattagctataaaaagctttgcttttgtatttttcttggtattgttctgagtacttacagtttttaaaaagagaaaaatacatctaggagannnnnnnnnnnngcccttcctgaacacatataagaaagaaggtcattctatagggtaataatagacagagaatgatggaaagacatccaggtggttcagccaggtgaggcgaaaggagtcatgatttctcctgagatctcaagtcagtagagagagccctgtagtacaagacaggaacaactttggtgatgttttcaaaagtttcatttctcatgttagggagatgcttctgacgcttctcactgaatcttctggtttcttaacagatt

SEQ ID NO: 89727 - DNA, 488 bp, Homo Sapiens
atactggacatcacaggaccctctccggctggataccaggctgtagaaccaccagatgcttcagatgagaaaggttggatctgtttcacagggaaggggctaaactgtttcaagaggcgaccacacgctgggcactctgtactttgcaacctaccaagtatcatcacaagagctatgaaagtgaagagagacatacgttatctaagaatctgagagagatgactcagtcagcatcctctctcttggtgtacaatggtagggacagctactgtgtcatctggagcatgacaatgagaacacagacactggatcgtcctgatatagcctgcagtccatctgggcctctagacattcatttgcatttgcattcatgcgcatcccctactactccaactcctacaccttttggcaggatatatccacacagctggattggaatcacaagatgtttttattttttgcctcattaaactagtttctctcaaaaa

SEQ ID NO: 89728 - DNA, 480 bp, Homo Sapiens
caaatataggggttaaggaaaaaatacgtgagctacatgtgtaagaaggccctgcatgtgtatgagtcctattctgggcaaatagattcttaaagtggctttcaacttcaagatgaaggagcttaataatggttactcattttatcaggggaatttcagggaacgtaggcgtcaaagagccagttatctttagcagatattaaaaattgaaaactttggagaactcatttcaagttatgattcagtgcattttcaacattgatttttgatagactgaagtgccagatcaaaattgttacccatttgaaagaatattagttgtatataaaattagattagaaagactttctaaatctctatctctttatatatgtcctattcattcacaatggattatacaaaaaaaagtgtattgcaagtgaaataatattgatttctgccctcagcttcaaataaagtaaattgaaatgggaacaaaaa

SEQ ID NO: 89729 - DNA, 500 bp, Homo Sapiens
  misc_feature (54)..(112): n is a, c, g, or t
agagggtgtggattctgcaatgctgcacagaaacctactgcagcctcagaccannnnnnnnnnnnnnnnnnnnnnnnnnnnnnnnnnnnnnnnnnnnnnnnnnnnnnnnnnnttctctcaatgctgagtattgaatacagataatcatgaggcccaagaccctaaggaacagtgcagccaggagtcggaaggagcctgggtttctgaatcatcacatggaggggagctgtcttcagctgggagagctgtcttcagttggatactgggaggaagaaagggagctggttaggaagcaaacttgagtttcccatgctctgtggctgagcaagtcacttcaccattctcaggatggaagtggggatggaggtggcatcggcctcatttgaaccacatggactaagaggggctatgggagtattccccaaaggaagactgaggggcgttactagaaaatgggagaatggaagcagagtgggcaaaaccaacagatgttccctata

SEQ ID NO: 89730 - DNA, 339 bp, Homo Sapiens
aagtttggcgcgcactattatggattgagtgtttgttgctccccaaagctcatatgtgaagccctaacactcaaggtaaccctctagactacatgggagtcgagattatcctccagtggagagaggataatggagaaaccctggaatgtggggtattatatgaagagagtgaacatgtagaagaaaactgaaggttcttttcctgtttccaacagtcaatatttcagcctcttgcaaacatatgagtgacgcagccagcataacatgaaacacaaggctcattaagtttacccaaaggaagcacaacaaatactaaaccattgttgttttaagccaaaa

SEQ ID NO: 89731 - DNA, 1333 bp, Homo Sapiens
  misc_feature (154)..(154): n is a, c, g, or t
  misc_feature (291)..(291): n is a, c, g, or t
  misc_feature (436)..(436): n is a, c, g, or t
tgcgcgggacacgcccatgtacttagatagtatgagggtgcgtcggccgatccgggtgccgccattggcagtaatccggagccgcacctgcgtcggattagcagtcgccggctctgatcttgtgcgggccccccaatctccgctcccagcgtcnctcgagcgggtggctgtatataagaagagtgtgtgggcgtcggaagtccgccgccccccccgcacaggggtctgataggcgtgcgtctttacgcggatttgtgttggttgcgggcggccgagcctcgatttccgttngtcgctcgtgctgattgggggaggacaaaacaaacccctgttgctccttgcctgtcgcagagtaagccagtcgctaggagcgtcattcctcggtcgactaggatcgcatcgtggtgcacagcggatctacgtagtctcaggctcnagttcatagaccgcccttcctgtagcgcgtcccacatccatagggtcgcgcgctcgtttttcgcggtacctcccgcccccacaccccggacgacaccggggccgctgcggttttctttcttttgcggtgtgtcggaggcccgtctgcaatatttggcgaggtgggtcttcactgacacgtgtccgccacaggacagctgggcgagctcttcgtccgggacaaaaaacgcgccccgcctcggctttgtctgttgctttctgcgcccaaccggcactccccgcccccgcccgcccgcacattggtctcgttgcacctgacccccgtcggaggtagtcttcgggcaccacgcttgccaggggggtttgtgtactcctcccagccaggaggtaagatcctccacgggatcaaaaatcttatgctcgatatggcagatcatggtagccccccccaaagggggtggagacttgattgtgccagctcgaaggatacaaccggaatatgtgagggcaatgaaattactccgcaaacgttcacaagtctggaaaccaaaggtaattcgtatttctgcccgaagtggagaggggatctctgaaatgtgggataaaatgaaagatttccaggacctaatgcttgccagtggggagctgactgccaaacgacggaagcaacagaaagtttggatgtggaatctcattcaggaaagtgtgttagagcatttcaggacccaccccacagtccgggaacagattccacttctggaacaaaaggttctcattggggccctgtccccaggactagcagcagacttcttgttaaaagcttttaaaagcagagactaataaaattcatcctgtataataattttacatatcatttcataaagtattttaatagaaa

SEQ ID NO: 89732 - DNA, 468 bp, Homo Sapiens
agaagaaaaatgaggagaatgctgtctcatggaagacaagctagcaaagcttggagaagcctgaacaagctggtcaccctcactgtcaaagactttcatttccacggaagggaaactgatgacctgggaccattggaagaactatatggatgaagcagttctaaggactgcaaagctgcgcagcgggaaccaactccctactgcagttatcattcgcctttaaagtctccgtgtcaagacacacagaaagtgtctacaccaaatggacaaacgttccagggggtttccttcccaactgcttattaagaaatccatcctcttcacatcagtgggacttcattctactcaaattccatcaattcccaatagctccaacacgaggacaaaccctaggagatgagggtgccatctcaagtctcttattttggttatttaactgaataagaaaatgtgtataactgcaaaaaa

SEQ ID NO: 89733 - DNA, 436 bp, Homo Sapiens
  misc_feature (12)..(12): n is a, c, g, or t
agcctcacatgntgatacacactgttaggcctgcacctgcccatccagaaagcagcagctgccttgttagtcctccccagggtctagctttccttcttcctgctgcagggtgctgcctgaggggtcctgggtaggaggggcgttagagccagcagggacctcccatgtctccagattccaggtgcaggttcttagcacctccgcagccgctctctcttgagtccatcctcagtctctcctaccccttgaagtagggggaccctgaatttgcccatccacctgggtcactttgagagttgtgcaggggggctgggagcactggtgttcacgtgggaccacaggctgcaccataagacccactcacaataaaaaaataaaaggccgagccgggcatggttgctcactcccgtaataaaaaaataaaagaacaggcaaa

SEQ ID NO: 89734 - DNA, 491 bp, Homo Sapiens
ctcctgtcaacagccattttagaagtagatcttccagcctcagtcaagccttcagatgactgcagccctgtctaatagcttgaccgtaatttcatgagagaccttcagccagaaaacccaaggaaaccattctggattcctcatcctcagaaactgtatgagataagaagtgtttgttgtagtacgccgctaaatttggggcaatttgttacatagcaatgtatagctcatacaatttctgggaaaaaaatagtttattttagaatcatttttgcataatgcaagaatataaacttgtcacagaataatttatccttgttttaggtggtccaaatatttcattgtcagttatatattagctcaaattaaattttagataatatatattattattaatggtaaagaatgtgtcacatttatctttatagcttttctgtacctaatattgtgtcttgtgcgtaggatgtgctcaataaaaattgattgaataa

SEQ ID NO: 89735 - DNA, 395 bp, Homo Sapiens
gctgggaatgtgactttctaattttaaattatctttaacaagggcaatgaaaagaggaaaagttgacactttgagaagttatgacgaacttgtcgagaatgccaattgacaaaggcaggtaagggagtacttggaaaaacagcaagaataggtctgaagggcacggtgagctgctttcctagggtgtaaagggaattggcaggcgtgtttattgactcttccaattaattttaaagaaacctgaagaaatggacaaagacagagaaaaggcaaccagatgtgattccgcccttccagaagcaaagaggcctcctatgccccacccccccaacaggcacgaagcatcaatgttcacaagcagcaaatgaataaaagttaaacgttcttcctacaaa

SEQ ID NO: 89736 - DNA, 1201 bp, Homo Sapiens
tttaagtttagggcatttatatatctgcaacccaataaacccctggtaccatgcagctcccccaaattcagtgcaaccaaagctgctgaaacaagtccagccccagaaggtgtagtggcactgtggtgttaccttatttttatatgacccttcaaaaaggacactgaaaacccagtgcctgtttgcagagatcatgtgtggaaattgaaaccctgtctttaaggaatgaccaaattcatgctacttaacctgaaaacttgggggcaaagtggttgtgattatctgaagggctgctatgtagatgaagtattaaacatgtcgtaggcaaggtttagaggagaatgtggtacttaaccttctatagatcccacaatgaaatgacctgccttgtgaggtagtgagctccctgtcaagagagattttcaagcaatgggtagaagaccacttggcaggagtgttgcaaaaagtgggctaaaccagatttttccaacctagtatggaggaagaggcagagtaggggaaggtcctgcccctatgagattctcctgattgcatgcaagatgacaggtaatccctgtgtggacagactagaaaagcagacagcccctaaaatagatggggagaacttttagccctgatatccacacaaactattttaggatagggtagcttggaaaactttaagcaaatgacgtcacctctcctaatgggactgttccagacacgcacagggaggcagccagcgcattgcaagatacaaagttcagctctgtgcagcaggagacccgggtttagttctgactctgccctgtatgacctggggctcctccttcccttttctgggaccctccataaaatgaaatgaacgtaggcagtccttccccttctaatgggcgttgcccctctgactggagcccccgatagcagatctagggctacagtttggggccttggggctacacttgtggacagccagagaccacctctggcggaagcaccggccacactcgaggcaggggaaaggcttctcccccgtgtgcagcagctggtgctgggccaggtggctccactgagcaaaacgcttggagcaaaggtcgcaggcatagggccgctcgcccgagtgcacgcgccggtggctggccagcagtgaggggtaggcaaagcggcgaccacagtcgtcgcaggcgtgcagcctcgtgcc

SEQ ID NO: 89737 - DNA, 538 bp, Homo Sapiens
tctgttgctcgtaaatagaccttttctccaaatttcacccactggtcttttaagagctccaaggtttttccaccatgactgaagtggcagaagttctgccgtgatgagtcaggtggagatgagccgtggaaaggaggggcgtagacggtggtggcagcagtgcgtgtttatgtgtaagatgcactgcttctgtaagtcggaggccctgattactcataatgaaaacctgcatggaaatttggagtgatgtgccagcaaacttatcggtctagatctgaaaaatacactgaggagaaagtacacccggcaacaaagctcgccttatctgacagcagaagagcagagaaatcaaaagtttttgaggattcggtctacacagccaccagccacaaacagtcttgctggattatctcgtgatcgtcagcagttgtgattttccccctttttacttacattcttgatggatggagcattttatatttttaggtaattgttaaactcaaatatactgactgtcattaaaacacaaaaattcaaa

SEQ ID NO: 89738 - DNA, 477 bp, Homo Sapiens
agtgcctggcagagaggcacagagtaggcatctcattgatatttgtcacttgaatgttgaaagaagagaggttggattccattcgatccattcctctcaggttggattccctcatcggtcaccagcagagctgagagcaggagctgggcttgaatcagaccttcccctcagcactcacacatccacctgcagctcccaggtgggggccccaccttcccggtcctctcatgcctgctgtctctcctcccatctagagcacattggagaagctcaagtcctccacaagcattcaagccagaacacagagaagaacacatcgaagccgaggccagagagctgaggggccataacactagcacctgccttgctcaagagcagccccaagggttcaggggtgtttccgtctccaccaccttcacagcagtacctgattccctaccgtaaaaactcttaataaataaaaccgtcttccctgag

SEQ ID NO: 89739 - DNA, 355 bp, Homo Sapiens
caatgtgctgaactctggggatcagtgaggaagaattcagacaagttcctgctgtcacggaacttacatcccagcaaggaggaatacagacaacaaattaaaacacctggggaggagtggagacagatactagtacattggagaagctcaagtcctacagatgcattcaagccagaacacagagaagaagacatcgaagccgagggcagagagctgaggggccctaacacttgcacctgccttgctcaagagcagccccaagggttcaggggtgtttctgtctccaccaccttcacagcagtacctgattccctaccgtgaaaactcttactaaataaaaccgtcttccctgaaa

SEQ ID NO: 89740 - DNA, 1368 bp, Homo Sapiens
  misc_feature (501)..(546): n is a, c, g, or t
  misc_feature (608)..(646): n is a, c, g, or t
  misc_feature (724)..(762): n is a, c, g, or t
  misc_feature (816)..(997): n is a, c, g, or t
  misc_feature (1105)..(1116): n is a, c, g, or t
  misc_feature (1252)..(1327): n is a, c, g, or t
ttttaatgtccatcaatatatattggaaagccaactcagctccacattgcccctgcttttgcactacagcagcagagttgagtagttatgaccagggctgtataatccacgaagccaaaggtatttactatctggctggtcacagaaaaattttgctgacctgtgccctaaatgacagttccttgtaggtcaaatggtggttctgtgcttcctttgcagaggcagcaggccccaggaggggacccagacaacagcgtgagagggaagggcatggactgcgccaccctcacatgcatggtgcagctggctcagatcctggtcggaggtggcctgggctttctggtcaacacagccgggaccgttgtcgtcgtggtgatcacagcgtctgcggtggcactgataggctgttgctttgtcgctctctttgttagatatgtggattacgtcaataaagagacaatgaccctagagaaccctaacccccaatcctacccaatctcnnnnnnnnnnnnnnnnnnnnnnnnnnnnnnnnnnnnnnnnnnnnnnccaacaaaatctttgcctccccgcctcctcctcccaaacttttcccaacacctccgtttcgnnnnnnnnnnnnnnnnnnnnnnnnnnnnnnnnnnnnnnnttgtcccgctcgcccatatacgcccgtcgcctccgggtttttgtatcacctcctctaccccgatccctcttctttcgnnnnnnnnnnnnnnnnnnnnnnnnnnnnnnnnnnnnnnntcaattgcgccgaaccgcttcccctgtccacccttttcccgcttacccttcttnnnnnnnnnnnnnnnnnnnnnnnnnnnnnnnnnnnnnnnnnnnnnnnnnnnnnnnnnnnnnnnnnnnnnnnnnnnnnnnnnnnnnnnnnnnnnnnnnnnnnnnnnnnnnnnnnnnnnnnnnnnnnnnnnnnnnnnnnnnnnnnnnnnnnnnnnnnnnnnnnnnnnnnnnnnnnnnnnnnnnngtttacaccccatatgccgtatttcccgagcgcccgagcctatctggacctcccccctctagccgccgccgcattcgcggcgcagacacatcatgtccgatttattannnnnnnnnnnnttttctatctcctgacattacccgcccctatatccccccctccgcccgctacatcgtgttccccgcctgaccgcgcgcgccctagtcgccctttaggctaacgcgtatccctctcttcacccgttcgcgcccgccnnnnnnnnnnnnnnnnnnnnnnnnnnnnnnnnnnnnnnnnnnnnnnnnnnnnnnnnnnnnnnnnnnnnnnnnnnnnacatatcgctctttatgtccgcgtccttatcccctcccccc

SEQ ID NO: 89741 - DNA, 465 bp, Homo Sapiens
gccagcgctgtcctgtctttctggcccacagatgagggctcctgattgtggaaggccacggaagggacctgaacacgatggcacgagacaagttatctcctgtgactgctcctctccagcaaccctcagctcaggctagactttccccctgtgttgagaatgccctgccctgtgtggaagcctgatgcatttagtgacagtgtgttagctttgttagtttctagtctggccagcaggctttccatgtgatctgccattggcttgcttcagtggccagtggagccaggggtgtccaccagagtcttggacacagacttctgaggtggcagcgggagggagcctgctccctgccacacacgtacaatttctaatccatacaggcctatgtagtatatacacacatacgcagagccttaggaattgtgaaaggccaatcaaaacttggggccctaatttcactctgcc

SEQ ID NO: 89742 - DNA, 358 bp, Homo Sapiens
gtatgagccactgcatctggcctaaacgtcttgctgtctggtagagaaagtcttcactttgttcttcaagattgttttagttctttacgttttctgttcctatacacattttagaaacagcttgtccattttctcatacctcacctccctcttcctacacacactgctgaaatctatactggaattatatggaatctgaagaacaacttgatgaatattaacatctttattatagtgaatcttctaaggattgagcctggtacattcttctacctatttcttttaaaaattgtctcaatcttttatggtcttctgcgtagacagttttcatttttcctttccaatcttcctcccatct

SEQ ID NO: 89743 - DNA, 283 bp, Homo Sapiens
gttctcccaacccttggaggaaattccttgagcagtctgagcctttaaggggaattccttcccttttctgactgattacagcatacatctgaccagttttggccagaagggcccagcctgggttctgctggaagctgatgtggaaggcttcccttcatggaaattcttgttttcacacaacacttggtagtttttccagcctccaagtcaccacctagtaactggctgcctcacattgctctggtttgtgtggtaataaaggccttatttttaaatctaaaaa

SEQ ID NO: 89744 - DNA, 756 bp, Homo Sapiens
  misc_feature (490)..(557): n is a, c, g, or t
agtggctggaagttacagctgcagcaaatgtgcagaatatgaaaagaatttagaatagaattagaccagaaacgatgttgttaaatccagccatgtgctacagagacctggcaaggttgcaggcatgtctaagtgtacagaagcaggtgacatatgaccgaatgtaggggccaggactaggagctgacctttgcaagacagtgacttagcaagtacaaaatcaacaaaaatcatcctgacctctctacttctaactcctgcacccaagctaacatccctgctcatgatgcaacctcagccagctggcagtaaaatgatcaatcttcaagagggtgacgccacagacatccccttccatccgcttctgtgccgatcagctgtggcatgagggctacagccccgacgcaggtgtaaacatccgtgtggctctgacactcctacacgagaatgcttcttggatttgccgtaaaacagactaaaagaacgacannnnnnnnnnnnnnnnnnnnnnnnnnnnnnnnnnnnnnnnnnnnnnnnnnnnnnnnnnnnnnnnnnnngaccctccaaacctgctccatagcgacggcaggacctgcctcccagcagagcagagatgagctagtcaggagcaggagaaatgatcttcagactctggggcccagcattccccaggtttcctgcaggtctcaaaatctatcttgaacaaactagcttacatcatctatttttaaataaaaaagaacccctattgggaaa

SEQ ID NO: 89745 - DNA, 487 bp, Homo Sapiens
gccagggtagaactgtgtgtcgctggccaccttgaggtcggtgttggtgagcgagatgggcagcttgggcagcgccacggccgacacacggtccagatcgttggtggccgataggatccgccatttgagaattgtgggctgtttgtcgccaaccacgggggagatctgctggaagatgttgttcacggggagtccctccttgcgcagggaccagcactccacgatgctgctggtctggctggacgcgcacaaaagcacctgctccgacatgtcccgggccaggaacttgaggtgggtgatggcggggaacttgtccttgcggttgaggtcggtggtgcagcgcatgaacagggagggcaggatctccgtgtcgatacggcacttctcgctcaccacgctcacgcacaccttgtagaactgcacgggcgacgcgctgctgccgtccgccgtggccaccacgatgttgccgccgccggtgaaggcgatg

SEQ ID NO: 89746 - DNA, 474 bp, Homo Sapiens
ctcctcgcccaccgtcaggtgcctctgggtggccaggcggctgatgagtctttctgggttttctgttgcgaggtcatcaggagaatctgtgtggagagcttcaataatcagagagaaggtgcccggccaggtgaagccgaaggggaagcggatggggttgctgaacgcggagtcggcgcccccgccgtcgggcagactgaaggagtcgacgcccagcacgggggtgacggcgctgccgtaagtgcagggcggctcgggggacaccctggcctggtagtgcttgaggcacacgcggaagaaggtccggcaggcgcacggcggtggccccgcgcccccgcggcagcagttgcggctccccagcagccccttcttgttgacgaactactgcagcttcagttcgaacaccccagagctccagaactgacacaacaacgcccaaagcaccgccactgccagcgcgcaccgactgcccat

SEQ ID NO: 89747 - DNA, 107 bp, Homo Sapiens
aaatgtatagtagagtggtgtctgtataagtgttacctgtagtggggttttgtccagcaagcctgaaatttatactttgaaataaaactactgggtttttaaaaaaa

SEQ ID NO: 89748 - DNA, 498 bp, Homo Sapiens
aagattgggcagagaatcatcccggtttctgcaagcgagcccgggtgggcggggaacggaactcacgcgtgggtgtcagaacccggcaggggaatggggtcccagattccgggcacgtgcacatgggtgaagaagctgttgaaaaaacagccacaatctttttctgctctcctcccaactcatcttgcccctccctacctctgaacagtcgccttccaacacaagcaacaataaagtttagtctacggtcctcagagctgccggaagagaagaatcaatggatgataaaataactagacaatgatgggtaggagtgatggaagttcactgtaagctcctataaccccccatcaccatcaccacatgcctaatacaacctgcagacacacttactcgcaacagacctgcaatctgggctctcttttccttcttgatggaggcctcaaaacctcagcagttgtacccattaaactaaaatgctttttccctcttagtaaa

SEQ ID NO: 89749 - DNA, 525 bp, Homo Sapiens
caaggccagtatgtttctttttttattatttttgggttggacttaaatggttgaaaggttttcatttttcatttataagcattacattaatttccatgcaaaaacccaagatcgcatatgtctgatttcaattggccaaaatccaacccttgagtttggacattcaagaccaaaatgaacacgttacttgccctttctatgagtagacatcatgggtgtcctttgaaagatcagcaggcctcctgacctcttaaacaccagcttgccatgagtccacaccaaaacagggagccaataccttccagcacctaatcaggcaagtaacttcactcatgaagacaggacacctctataccaaggctgccacccacagatatttcctgggtgctgctctatagcaatacctgcttttgaacagacgtggtatcttctatttggggattataagttcttcctgccagtttttctcaaaactctcaggaagagtagagattttacaaaaaagcttacctctatgaccccacc

SEQ ID NO: 89750 - DNA, 518 bp, Homo Sapiens
attcggccccaaggccggggggggtccggccaaaaaccgcttgtagttgggtttaaattctgcacgggaggaccttctgagtttacctgttgggctcctggctgcgcaggcacagcagctacacagaagagatgggagaagaggctaatgatgacaagaagccaaccactaaatttgaactagagcgagaaacagaacttcgctttgaggtggaggcatctcagtcagttcagttggagttgttgactggcatggcagagatctttggcacagagctgacccgaaacaagaaattcacctttgatgctggtgccaaggtggctgttttcacttggcatggctgttctgtgcaactgagcggccgcactgaggtggcttatgtctccaaggacactcctatgttgctttacctcaacactcacacagccttggaacagatgcggaggcaagcggaaaaggaagaagagcgaggtccccgagtgatggtagtgggccccactgatgtgggcaagtctaca

SEQ ID NO: 89751 - DNA, 412 bp, Homo Sapiens
  misc_feature (85)..(176): n is a, c, g, or t
caacatgttcaaatattctcaatgcacagttgttaatgagtaattgccgttaaaatatatttcataagaagtctcaatctcaaannnnnnnnnnnnnnnnnnnnnnnnnnnnnnnnnnnnnnnnnnnnnnnnnnnnnnnnnnnnnnnnnnnnnnnnnnnnnnnnnnnnnnnnnnnnaaatgttcttttggctttaacattctattaattatattttttctagattgaatactgtgaatgctaagttttattaatctggtcatcttattttgattttaaaaattaggatgctagttgcattctgaattactgtttctggtttgaaacatggagaaaaacattttaataattcatatttcatgttggatggtttctaataataaatatctcaaaagtgacttaacataaaaaaa

SEQ ID NO: 89752 - DNA, 421 bp, Homo Sapiens
gatgccctgcccgagctgctggggctcgaggctggcagccggcgccaagcccgcagcagggagagcaacaagccccggccctcagagctcagccggatgagcgcagcccatagacagcagcttctcgaggaagaaaggacccggtttcaggagctgttggccagtccggcctacagagccagccccctggtggccatcgggcagacgctggcccggcagatgcagctggaagatggcggccagctctgaccagggcagcgggcatgccacaactcctcaggacacatgtgggccaagtagagagcgccggcccctcaaggaccatggcctgagcctggtggacgcccttccctttggtcggttgtggggctcaataaatggctctgtgaacttcccctgcactgccagggccgttcccatg

SEQ ID NO: 89753 - DNA, 362 bp, Homo Sapiens
acatttaaaggcataaagtatttactcaactccctggccacagcccaccgttaccttctcaatcccaacttcgggatataattattgatatatttataacgagtttatgaagaatgtgaaaaagatctgaccaccctagctatggactgaagttggagcctcttttctaatataatgcaattgaccaagactgcttgggagcagctgtcagtattgtttaaagctgtcattcaatatggccaaactctttgttatctaaaaccccttgtctgatctgttgcctctgtttcacttttccaattagatgaatgacagaaacaaaaaatcgtaataaatattgtcaaatctgattttaaaaaaaa

SEQ ID NO: 89754 - DNA, 781 bp, Homo Sapiens
aaccccagacaccaccaacattaggctaggtagcgaggcgggtgttgaatcggcacgagggcaagaaggactggttaagactattgcaatagtcaacttccaatacaacagcagctggagatttatagctaacgggcgtgggtgaaggagttaaaggatgctaaattactaagaggaagttaagtatcaagagtggggggattgttactaaactggcttagctggattcttgctgaagtgctgttcgcaggctatggaggaggcctggccaagcaaaaagggctcagaggagcctgactaaagcttggtctagggactccttgtcagccctgccctgcttggatagaggcctccgaacaggagtaaagaatggctgttgaacatccacaaggcacctgcatagaggcctccgaacaggagtaaagaatggctgttgaacatccacaaggcacctgcaagactatgaatcaaagttgagaccaagaaattatttctgaaaaaggatatggaaaaccttacaaaacacagcattgagtgttcaagtttcagagatcccccacaggcgctgcctgagacccagctctgtgtctcctcgtcgtacagcttgtggagctccgactgcaaggccatcagcatgcccaggcaggggttaagctggagggccatggaggaggacaggccagcaggatgccgcttctgctccagggcatgcaccatgcgtgagatattctaattatatacacgttcataaacatatgctcacatgcacagagtaaaaaaa

SEQ ID NO: 89755 - DNA, 742 bp, Homo Sapiens
cggtccggaattcttcggaatcgtcgacccacgcgtccgcataaacctgacttgtcttcaaaaactcccacttctccaaaaactcttgtgaaatcgcacagtttggcacagcctcctgagtttgacagtggagttgaaactttctctatccatgcagagaagcctaaatatcaaataaataatatcagcacagtgcctaaagctattcctgtgagtccttcagctgtggaagaggatgaagatgaagatggtcatactgtggtggccacagcccgaggcatatttaacagcaatgggggcgtgctgagttccatagaaactggtgttagtataattatccctcaaggagccattcccgaaggagttgagcaggaaatctatttcaaggtctgccgggacaacagcatccttccacctttagataaagagaaaggtgaaacactgctgagtcctttggtgatgtgtggtccccatggcctcaagttcctgaagcctgtggagctgcgcttaccacactgtgcgtccatgactcctgacggttggtcttttgctctaaaatcatccgactcctcgtcgggtgatcctaaaacctggcaaaacaagtgtcttcccggagatccaaattatctcgttggagcaaactgtgtttctgtccttattgaccacttttaactcttgaaatataggaacttaaataatgtgaaactggattaaacttaatctaaatggaaccactctaaaa

SEQ ID NO: 89756 - DNA, 527 bp, Homo Sapiens
ttctcgtgatacagatatgtgctacatgttcatcatctcgttggtcttcaccatgataactgtggagtaagaattataagcaggtcacagattagggacttgagattgacagtttggcttccctgttctgggtggcaaagcctgtggagtactcacctacctgctgcatgaaggcagcatggagggactgtggtggattatctgcaaagatggccaaaattctctcatccctgcaggcacatacaagatgccagaatcagtcaaaactaagctcactgtccttgctaatattctgccccagagaagaactgaagctcagctcttcaccctacagaaagcctgaattttgtaaatgttctgcttagaatgaggaagaaagatgaagaatgaggaggaagaagggaggaacgagagagaggtaaagccaacaagcagaacagacctacatttgcagcatctccaagtttctgcaacagcattatgttgttgttatgttttgttttaataaaagcacataccattttaaa

SEQ ID NO: 89757 - DNA, 455 bp, Homo Sapiens
tttggtcaagcacaatacccttgaggtccctccaggtgtggcatgtatcaacaggccatttcttttttattgatgagcggtgttctattttacgggtacatcagagtttgatcaaccattcactagaagaagacttctgttgttaccattattttttttataaacaaaagttgctacaagcaatcgtatacaggtttttgtgtgaacacattttcatttatctgggataaatacccaagagtaaaatgctggtaactgcatgtttagtttcataggaaatgaccaaaccgctttccagaacggctgtaaccttttgtcttttcaccagcaacctatgagtggtctagttactctacatccttgccagcttttggtgttggcactatttttcattttagctgttctgaaaggtatgtagtgctatctcatgcagttttaatttgctaatagctaat

SEQ ID NO: 89758 - DNA, 807 bp, Homo Sapiens
actttccctctttttatgacaggcaataaacaaagaaaaagtttaccattcttcaagacaaatcatcttaacatctcccttaccatccggaagtatcgttttacaatcatgagccaattaaaaattagctcctccaagagaaattagtgaagttaaaatggccactggttactttaaattttaaaccacaagttacttgatctcaccaagtgggatactagctttgtctctaaagctactctaaaacttacagtatctagacctttacactcaatttcaaatcagggtcttcaacattttcatgttcagtctttctcctcccccatttatcatgtaaaaagatctttcaggttaaactgctaacgattattttgcatttcacaattcaaagaggattctaaagaactagattcagaatattcatttaaaaccactttcagtgttcaaaaatttcagaaacattgatttgaaaaaccaaaattggtacttaagacagattctgtaaaatcaagatatgcgcaactgatgtaacatgtaccactataggaaggctactcaaaaaataaaacaattttactggaaaaatgcccttagaaatatggtcgaataaaccagtatctgatttcagatgtactatgtaagtctgcccaacactattgtttacgtagttctgcacctttacaacacaagagctccgcagaatgaagacaaatatattctaaaatacacaaaggtttgtgcgcttactggtttgttcttcaaaccactacacttaaaaattacccttccgacatttttctaagatta

SEQ ID NO: 89759 - DNA, 495 bp, Homo Sapiens
agggtacaggaggggcatccctcagcctatgggaacacccaaactaggaggggttattgacaggaaggaatgaatccaagtgaaggctttctgctcttcgtgttacaaaccagtttcagagttagctttctggggaggtgtgtgtttgtgaaaaggaaattcaaagtgttgcaggacagaatgagctcaaggtaaggtagctttggcagcagggctgatactatgaggctgaaacaatccttgtgatgaagtagatcatgcagtgacatacaaagaccaaggattatgtatatttttatatctctgtggttttgaaactttagtacttagaattttggccttctgcactactcttttgctcttacgaacataatggactcttaagaatggaaagggatgacatttacctatgtgtgctgcctcattcctggtgaagcaactgctacttgttctctatgcctctaaaatgatgctgttttctctgctaaaggtaaa

SEQ ID NO: 89760 - DNA, 475 bp, Homo Sapiens
ctaaacaatcaaggaagtgcagtgggctgtgtggttcttccccagccttcatcccctccctgggctgtgtcatttgctgtgtgattttgaggttcctccttctaaagatgagttatgctttaaaccatacaaacagaaaactaacattggaacctaaaattactgtcaatgccaagatcattgtggttggtgcatccagtgttggaatttccttcctagagacattggtattttggtgagttgtttcactctattgattgattggtttttaaataataaaaattatcttcctacatctgaagagaacaccatcagagaacagacctgagattgtttggtactccacacaccctgcctatgtggatggatgaatcagtagaagaatattctagatcaggggttagcaaactatagccctgaggccaggcctggcttgccaactgcttttgtaaataaagctttattggaacacaaa

SEQ ID NO: 89761 - DNA, 831 bp, Homo Sapiens
  misc_feature (135)..(135): n is a, c, g, or t
  misc_feature (137)..(137): n is a, c, g, or t
  misc_feature (634)..(693): n is a, c, g, or t
tgggggaacaccaagcctcaaaagtttgttcccccccaaatgtctcgggggaaaagggcccctttgccggaaaaagttttgaggcgggggccaaaggggggacggcccccggcggttgctcccggaaacccccgngngatcttcgtagggtgcgtctaatcccagagctgagttgcgggggatagatacgcaaaagagctggggcgttggtttgtcttccccgccccttgctgcgaatagaccgtggctgcttagacaaatgtgtctaattaagcgaaaccgaattagattccttaatcctcttcaataaggaccggtccgcccttctcgtcaaaacttgacaaagctcgggtcagccactcctaatgctaatcgcaatgggtccgtatcccgaccggcaacgtggtacccgccaaccagaaggggtaacaccgtaccgcctatgggacccacacctttttatctcttgttagtcgcctgtccgtgggactagcgcagaatgcctgcagaatgaatcgtttctgttgttaccatttcaaagaacgagaaggaagaaagggtgcgtgtgtgcagtccttttttcaaaagttttccctaaaagttactgatacaccaggttttgaaaataccggtnnnnnnnnnnnnnnnnnnnnnnnnnnnnnnnnnnnnnnnnnnnnnnnnnnnnnnnnnnnnaacacctttattacttttgtaatcatgggtatgagttgattttctggtcagaaatttcagtagagctaatttcatttaaatgtgtgagatgtggtaaagttttgacaataaatacaaattttgacaaagcaaaaaaaa

SEQ ID NO: 89762 - DNA, 2979 bp, Homo Sapiens
  misc_feature (2847)..(2883): n is a, c, g, or t
tgtagaggctggggttaatcggcacgaggcggcggcctcgaggtgacaactgtctccgtcgcaggctccggcgggggcgcaggaggtcgcccggcgcgtcactgtcgggtcggcgagccacgggggccgccgcagcaccatggcgaccaccgtcagcactcagcgcgggccggtgtacatcggtgagctcccgcaggacttcctccgcatcacgcccacacagcagcagcggcaggtccagctggacgcccaggcggcccagcagctgcagtacggaggcgcagtgggcaccgtgggccgactgaacatcacggtggtacaggcaaagttggccaagaattacggcatgacccgcatggacccctactgccgactgcgcctgggctacgcggtgtacgagacgcccacggcacacaatggcgccaagaatccccgctggaataaggtcatccactgcacggtgcccccaggcgtggactctttctatctcgagatcttcgatgagagagccttctccatggacgaccgcattgcctggacccacatcaccatcccggagtccctgaggcagggcaaggtggaggacaagtggtacagcctgagcgggaggcagggggacgacaaggagggcatgatcaacctcgtcatgtcctacgcgctgcttccagctgccatggtgatgccaccccagcccgtggtcctgatgccaacagtgtaccagcagggcgttggctatgtgcccatcacagggatgcccgctgtctgtagccccggcatggtgcccgtggccctgcccccggccgccgtgaacgcccagccccgctgtagcgaggaggacctgaaagccatccaggacatgttccccaacatggaccaggaggtgatccgctccgtgctggaagcccagcgagggaacaaggatgccgccatcaactccctgctgcagatgggggaggagccatagagcctctgcctcgatgccgttttgcccccgctctttggacacgccgacccggcgctccccaaggaatgctgtcccaacaagattcccgtgaaagagcacccgtgtcgccccctcccgtggacttctgtgccgccccgtccacacctgttcttgggtgcatgtgggttttcggttcctggcggtccaggacggggcgggggctcccctcccatctcgtgctgggaggtctcagcgcgctctcctgtccctgggacgtgcgtctctccttctcatgccgttctggaaaatgctcttgctgtagagagcagctgcttctgccagggtgttggaggtggtggagcgccttccgattccattcatggcattttgtgatgtgatgtaattggaatagagctgttgatttaaggcacacacaatccctcacactgtgggttttttttagaacttcccagacgaaaactcacgcccttgccctaacgcgctttgctgtgagcctggcccctgcccagggcttgggtctggtgagctgagcagcttcctgtggatggtgtgcggccggcctcctgccctggctcacctggccactgtccagccagccttgtgacagactccggcctgaaggcagaatgaacccacacctggagtgaggaagggggcctggcacgggtggccaggctctgcctgatgccagccagcgggcatctgaagccgggtccttgcgcccgcgcggaggctgccgtccgtctctccgtgctgcgctcgtgccagctccgtgggtgtcctcccagggagcttctcttctcaacaggccttgcgaggctggggtgagaggtgatagaggcagcactgtgcatgattccgagagggtgtggtggcactgccagccgactgctgacagcttgggagctgctgtgcccaggacgtgggttcagcgtgggcgaggaaagcctggcgagcgtggccctgtaaaagctttctgaggcgggaggcgctcacttacctctgactgcctgggcgctgcgtgtagcatcttggcctacaggacagattttaggtgacacctggttatgacagtcagaaatttgagaagcttctcacaagtgatgcactttaaataatctgcatgccattgagacacctgcatgtctggtgtttgtggttcaagtgtcttgccgccggccttcggatgtaaacccactgataacggacagaaagagaatgcccacaagtgggtcttctgtggaagatgcagaaggaggaagttagtgcttacattttagtctttttctccctcaaaaaaataggttaagtttcagtgccagctagaaaatactgctttctgccatcgattgggggtggtttttgtcaaatatactgttgataaatatttatttttgtaaacttgaagtgtgtggtggccgtgggggagggacatgctggcagcaggcgccttcttcagctgtgggtcctaaaggcctttgatcctttgaagaagaaagacatggtatttgttcagcagacgccgaccactcagacggaggggcccctgggattccctgtctcagatggcctggtcttacgcctgtgtagatttcttctccattgggaatgaaggtgtcaggcgggactggaacgttctatatggtatgttccgtgatattaacaactctaacccaggacagaccacaagccacactcaaaggcctcactgtgctgggggcttccgtgtccaggcgcccaggtgtggccaccagcaccgggtttctggccttcgcgttgctggggttgcaggagactgccacacgcgtgcacatgtgggctctgtggggtgtctcctaaaaaaggacgtggccccctgctggccaacccttgaacaatccgcnnnnnnnnnnnnnnnnnnnnnnnnnnnnnnnnnnnnnccgccctcgctgggaggggaaaaccaccccttttggccattgaacacggctggcccccatcctcttaagggtgtcctttttcacgaagcggctgta

SEQ ID NO: 89763 - DNA, 1003 bp, Homo Sapiens
  misc_feature (199)..(199): n is a, c, g, or t
  misc_feature (209)..(209): n is a, c, g, or t
  misc_feature (218)..(218): n is a, c, g, or t
  misc_feature (302)..(302): n is a, c, g, or t
cgcatcatagccccagctacatatgtccggtcttgtgttgaattgacgatacatcacacagaacagttgactgatcgattatcgactcattagggattgcctcgagccagaatcgcacgagtgaatatgagaaatccatgtatctgagatagagatacaacttgtaaatctataaatgcactcagttactctctccctntactattccntgctgaaantacacaacaaaaatgtaacaggggaaattatataccgtgactgaaaactagagtcctacttacatagtgaaatatcaaggagtncagaagaaaattggactggtgaaaacagaaaaaacactccagtctgccatatcaccacacaataggatcccccttcttgccctccacccccataagattgtgaagggtttacgcctccttccatcggcctgaccccttcactatgactacacagaatctcctgatagtaaagggggctggaggcaaggataagttatagagcagttggaggaagcatccaaagattgcaacccagggcaaatggaaaacaggagatcctaatatgaaagaaaaatggatcccaatctgagaaaaggcaaaagaatggctacttttttctatgctggagtattttctaataatcctgcttgacccttatctgacctctttggaaactataacatagctgtcacagtatagtcacaatccacaaatgatgcaggtgcaaatggtttatagccctgtgaagttcttaaagtttagaggctaacttacagaaatgaataagttgttttgttttatagcccggtagaggagttaaccccaaaggtgatatggttttatttcctgttatgtttaacttaataatcttattttggcattcttttcccattgactatatacatctctatttctcaaatgttcatggaactagctcttttattttcctgctggtttcttcagtaatgagttaaataaaacattgacacatacaaaaaaaa

SEQ ID NO: 89764 - DNA, 494 bp, Homo Sapiens
cgagtttggccggagggatctggtgataggcaaatgcgatgcagagcccagcagtgtccatgtggccatcctcactgaggctatcccaccaaagatgaatcagtttctctacaacctcaaagagaatctgcaaaaagttctcccacacatggtagaaagtcagcccctggcctgatccttctctctgtgctgatggtccaggtatgtcctctgatcggtgaaatcctcgggcagctggatgtgaaactgttgaaaagcctcatagaacaggaggctgctcatgaaccaacccaccatgaaaccagccaaccctctgcatgccaggctggagagtcccccagctgacttctgctgatcagaaggaaagtccacatcttgcaaccttaagtctcccttagagtggggcttctgctaccctaaaaactttaccccaggctctgtggacataccatcctctcctacaataaactctagctctgaagggtgaaaaaaaa

SEQ ID NO: 89765 - DNA, 699 bp, Homo Sapiens
  misc_feature (539)..(567): n is a, c, g, or t
tgtaatttcacccttcagagctagagtttatggtaggaaaggatggtatgtccacagagcctggggtaaagtttttagggtagcagaagccccactctaagggagacttaaggttgcaagatgtggactttccttctgatcagcagaagtcagctgggggactctccagcctggcatgcagagggttggctggtttcatggtgggttggttcatgagcagcctcctgttctatgaggcttttcaacagtttcacatccagctgcccgaggatttcaccgatcagaggacatacctgactttctaccatgtgtgggagaactttttgcagattctctttgaggtgtgtagagaaactgattcatctttggtgggatagccctagaaagaaaggtagaggcacagaacagaacagagcaatccaggcaatattaaagccaggaggtatgtgttgagtatactttccacagtcttttagtcctcactcagccccatgccagaagtatcattgtcagtgatcatcaaaggggtagctcagacnnnnnnnnnnnnnnnnnnnnnnnnnnnnnctggttatattagaaacatggcaatagagcaccagattccagagtctttcccttacaccgtcctcccatgaatgtctggtacaatctaggtactcaatgaatatctgataaaaaaatgaacagacatccaaa

SEQ ID NO: 89766 - DNA, 233 bp, Homo Sapiens
gtgtgagccaccgcgcctggccgtgaatctgcattttttaaaaaccaacattttcaccaaaatgagcctacagttttgttcatcaggaaaaacaatggatattcataacattaaaatgaactgcgttgggatacaaaaatacagtatatgtgcagaataaaaagcatcttttctcctagatacttaagtagaagtagtaatcctattttacagttagattttggttttttgtt

SEQ ID NO: 89767 - DNA, 469 bp, Homo Sapiens
gatgcaagccaataatgggaatctagaaaactgccactaaggagttaagtaaaacagggaataatttactttatcaatgatccaaaccagcccctgaatcatcagatgatatagaccaagttgattcttagatttctatcgattcagttaacaacatacacatattacgttgctccataacaaagtatgacacaaaaacagtaaggaattagctcaactaatacttaactacagaaggcttccaaaacgtacaaaataacacaaacaagtgtgaatgtcagcataatagatactgttgaaagacttatttgagtatctcttcctgtggctagaaaacacatctggaaaaacacacaattacaatacaaacacaatccaaaaaaagtccaacccctctctactgtgcagggaaaggaggggctcaaggccatagaaggagctatgcttgaatttacaaaactaccagatg

SEQ ID NO: 89768 - DNA, 912 bp, Homo Sapiens
ctaggtcgaggcctgggtgtgtgaattcggcacgagggtggccttcctcaacgtgtctgtgagcgaggagcggctgctctgcgtggagaacaacaaggagggcagcttccggcggcgcggccggcgctcccacgaccctgagcccttcaccccggagatgaaagacttgatcaatggctacatccggacggtggaccaagccctgcgtgaccacaactggacggggctgcccagggcagtatgtgcccagatgataggcctggcccactgccgaccacccccgctgagtgactgcaatcgcaccacggggctgcgctccccactctgatgctcaggcccgtggcctcactgggacgaacggtgggtggggggctcaccctggtgctgcctcccgcacaaggagacctggacacaacagactacacatcacaaggtccgaactacaaatggacacagcatacctggccacgaacccacacctcctcagacactcagacaccactccaggctcatagccccgtcttgatgcagagaagccacccacgttggggtgtgccaggcacccccagataatcaaatgcagcacgcacagacgtaacacacaggtgccaggccgtgtgctcctggaggctggctggctgtctctctcacacaggatacacgtgcgctccctgtggatccgggaggccctgggcttcctgtgtgtagccctggcatagacttgctcgtcagggtgttcgactctgggatgctgggccgggcagacatttatgctctgagcagcaaggaccatttgggatggaggtgggcacaaagactgctgcttccagggtgtgcggccctggccgtgtgtctgacatcccataaatgtgtgtgtggtgtgactacgggcaccacaaactccgcaaaaaa

SEQ ID NO: 89769 - DNA, 507 bp, Homo Sapiens
cagagtatgtgtattatacatatgttctgttcaggaccttgagctgctggtggtgtggtcgaagaatggcatagtccttgcactcaaaagctacagtatgtttgggacaaccggtcaaaccctgaaaacggtgaacagtaaaacaggagatacagttaaccctctaatgctttgtggcaactcttgttgaatggccgctgagtattcttggtttgtaacacttggtgatggccaagtgctcttgaaacagctaacttaaaatctcagcagttattttatttccagaggaaggaattctctctccctcggcgagatccagtccacagcttgcttcactcttagaacagcggcatcctctattggtctcgcacggggaacttgctggggtaggggagaggtgttagagctttgaaaaagctttgcctctcggaggagtcaaaggggcagtaactgtatggggtgagaggaaggcctgcgaaataaaaaggcaaaggaaccgtttaaaaa

SEQ ID NO: 89770 - DNA, 505 bp, Homo Sapiens
cggggttgtgcaacaggcgccctgcgccgggtggttggtgttctagggagagagacgggcaataaacggagttaaacaaggtaatttcaggtagtgatgggtgtgaccaagaaagtaaaaccgggtgattgttgggaactagcaggaaacacttcggtttgtgtgtccagccccagccccacctctaaaagctcaacacaaggtggtcagggtaaaggccgtgattcagcagtgaactttaatagtcttggtcaccaccaaagtgatgctccagagtcatcttccacaaaacgacacccttagttctcctcgagggacgcaggaaagtgttcatagccattgcatttccggattagcttaccgccgctcttcgaatggcttttaaatctggattgatttaagacgggtcagatagcactagcgtggcttgaaaggaacagtgtggttcaagaatatctaagtttcatggaagctgaagaattgtaagcccttttttcagaaacgt

SEQ ID NO: 89771 - DNA, 438 bp, Homo Sapiens
tgccgcgggagtcagagaaaacctggggtcctgatgatgttgttgagctgctgaatcaaccatccctaaaccctatgctcccaagacttcttgtcatactactacaacagcttcttcatgatgtccaaaccccaatttggcctctctctgatccttcatctatgctgctgtcacatgggccttccggtgatcttatctgaagcattaaaagcaagaacacacttttgcagacttcttttcctggctctctggtaaccagctacatgtcttccacatgaagcctcctgagttcatcagtacatcattgcatcattgacatgaccctgctgaactatgccacgtctgcctttgcttaagtgggtaggactgaacctgcagcaaactttggagcactcatttgggtcacaatgataaaaataataatacttaataataaaa

SEQ ID NO: 89772 - DNA, 433 bp, Homo Sapiens
tatacttatgtaacacacctacacattctgcacatgtatctcagaactaaagtgaaaacaaaaaactttggttgggctcattttttctgaggtagaataattaagactcatgatgagtgtgactttttcaagatatttaagaatttagaataaacaaatatgtgaatgaattcattatacctttatacacaaagcatgtaactatttgtgtaaacatactacacttggtggtgtaaggaaagcctctgagtgattttacacaccagttaatagatgggtagtgttggatgagagcccaaaaaaggctctttattgtcattctttaggattacagcacagtttacgtatgtctcatttggccctttgcaatacaaataaggcctatatgtatgttctccctatgttttgctaatgaagaaatgaagactaaaaa

SEQ ID NO: 89773 - DNA, 276 bp, Homo Sapiens
actccttgactgatggactcaatttcagtgacaatttctttgactgaaattgcattttccgagtgagactgcatgaagatgtctgggctgaccagttctgaaattgcctttgactgttcctcatccattgaagattcttctgatgcatggggagtattactcaaagagctgcttctctggtcatcagctgtcactttggaaggggctacttctaccactgacagtcgacagctctcattccttcctccacccagttcctccatccaaaaaacgaaa

SEQ ID NO: 89774 - DNA, 329 bp, Homo Sapiens
ttagagcaagtggatcaattcctcaaaaatcgcaagctgccagagctgctggctgaaaaatcacaagaaatgttacacaagttagacaatgtgaccttcacccattatcttcatgctcctggaatctgtgatgcaaagaaccatctacagccagtcaatagcttatgttattttaatgaaccagtgtgggaacttgccccttctttctttctttcaaacccactgtaactgctgctaactggagcatatgttcagagccacctgaatctacgtcccccaggatgccgtcctcatacgtggcccaaataaaccctccacgtgaaataaaa

SEQ ID NO: 89775 - DNA, 463 bp, Homo Sapiens
ctgactgtgcttgggctctgaagcatcccgaccgtgaacccgggatgcaggtactcatttcctgcacgcaacaccaggtgaagctgggagtgaagtttctcagaatgcccttctcactacgaatccagggtgagatctagagacaaggaggaagacgccattgctcccacatgtcaagcgcctggcctggctgaaaaatcacaagaaatgttacacaagttagacaatgtgaccttcacccattatcttcatgctcctggaatctgtgatgcaaagaaccatctacagccagtcaatagcttatgttattttaatgaaccagtgtgggaacttgccccttctttctttctttcaaacccactgtaactgctgctaactggagcatatgttcagagccacctgaatctacgtcccccaggatgccgtcctcaaacgtggcccaaataaaccctccacgtgtaaa

SEQ ID NO: 89776 - DNA, 421 bp, Homo Sapiens
cagatccagtttgctgtgccacagtgctcagcatgatgtaaactccactgcggacagatgcagccaagaagacaggtcaccttctaccaactcccaccagaggaaactcttccccaggacccagtacgttggccctctgaccctgcacacagcacatgatgctgaggttcagtgctgaacaagagctactgagagccagagactcacttcttccatggagccccactcatggatggaggctctgtcccgggtccagtgccactgggaacactgggtctctggtttctagctctgtcctatggcagaggttccaccccacaataaccgaagtgctgagaaggtgggaagctcctgcccgaccctccactgagagctcagctcctaggctgaggaataaaacagctcaactttgtctacaaaa

SEQ ID NO: 89777 - DNA, 833 bp, Homo Sapiens
  misc_feature (719)..(719): n is a, c, g, or t
ctctccagcggccatgttaaccaggaaaccttcggccgccgctcccgccgcctacccgaccggccgaggtggggacagcgccgttcgtcagcttcaggcttccccggggctcggtgcaggggccacccggagcggagtggggactggcccgccctcccccatcgccctgccgcctctccgggccagcaacgctgccgccgcagcccacacgattggcggcagtaagcacacaatgaatgatcacctgcatgtcggcagccacgctcacggacagatccaggttcaacagttgtttgaggataacagtaacaagcggacagtgctcacgacacaaccaaatgggcttacaaacagtgggcaaaacgggcttgccagtggtgccagagcggcagctggacagcattcatagacggcaggggagctccacctctctaaagtccatggaaggcatggggaaggtgaaagccacccccatgacacctgaacaagcaatgaagcaatacatgcaaaaactcacagccttcgaacaccatgagattttcagctaccctgaaatatatttcttgggtctaaatgctaagaagcgccagggcatgacaggtgggcccaacaatggtggctatgatgatgaccagggatcatatgtgcaggtgccccacgatcacgtggcttacaggtatgaggtcctcaatgtcattgtgaatgggagctttgggcanggtgtcaatgcctacgatcacaaagtccaccagcacgtggcccttaagatggtgctggatgagaagcgcttccactcgcaagcagcggtagagatcccggatctgtaacacctg

SEQ ID NO: 89778 - DNA, 405 bp, Homo Sapiens
gcggccgcgtcctgcgtcaggccttcgccgaggtggcgcgccacgccgacttcctggagctggcgcctgacgaggtggtggcgctgctggcggaccccgcgctgggcgtggcgcgcgaggaggccgtgtttgaagcggccatgcgctgggtgcgccacgacgcgccggcccgccgcggccagctgcgacgcctgctggagcacgtgcgcctgccgctactggcgcccgcttacttcctggagaaggggggagggcggacgaagctgctgcaggcctgcgggcgagtgccgcccgctgctgcccgaggctcgcgcctgcttcatcctgggccgcgaggccggtgcgctgcggacccggccgcggagattcatggacctagctgaagtgatcgtggtcatcggcggt

SEQ ID NO: 89779 - DNA, 475 bp, Homo Sapiens
ctttgtgacaatgctaatcatgtgggaatggtgctgtttccccaccacaagctggccaattccggtctggcttctttaaccaggaagatgtgggctgagagctgtggagtagatgtcttcaccagatgagtacacagagaagtagagaatgtgtatctgcagagtaggatgaagcagagacaaggtgggatgggagagagacaggggctgcaggacaaccctaccatcaatacacccaacagtcgccatcctaccccacttatttattcacttagtaacactaattactctctaaaaatacttgactatttatttgtgtatctacacccacaggaatggatgtaagtgctatgagggcaggaagattgtttttcctaccactgaattcccaggacctcaatcaatgcttggtatatagtgggcactccataaacattggccgaataaatgaattctatttacttgttcaaaaaaa

SEQ ID NO: 89780 - DNA, 489 bp, Homo Sapiens
  misc_feature (27)..(27): n is a, c, g, or t
  misc_feature (41)..(51): n is a, c, g, or t
  misc_feature (127)..(128): n is a, c, g, or t
  misc_feature (133)..(133): n is a, c, g, or t
  misc_feature (138)..(138): n is a, c, g, or t
ggggccgagggcccaatggtcactgcntgggtctcctggcnnnnnnnnnnnggcacaattctgaatctaatcatgaagaaacatcccaggcaatcttgaattgagactgtctggcaaaataacctanncctgnatctntcaaaagtgtcaaggtcatgaaagacaaaggaagactgaggacctgtcagagatgagaagagtctcaattggtatcagaatcaaagaaactgtggggtcttggattggatcctggaccagaaaacgaacatttgctgacacatttggtaacatttaaggtctgtagcttagtttaacagtattggtcaatgttaattcaccagttttgattcttgaactatgattatgtcacatgttaccgtttgggatgctgagtaagggcacatgggaactctttcttcaacttgtttgtaagtctgaaattatttcaaagtaaagagtttatttaaaaactttctctattatctgaaa

SEQ ID NO: 89781 - DNA, 448 bp, Homo Sapiens
  misc_feature (348)..(348): n is a, c, g, or t
tttcagtttatgccaggttcagagtagaatgtgggtaggtgggctaacaccttgctcaggggtcatttatccagatggatgcctaatatgcccttctcaatgaaggaggtgactggagagggtaggaaaaagctaaggataatggtttcctctacatttcataatttaaaatagtactatattaataaaatagttcagagagaagaaaccactcaaccatgagttttcttagttgtatcttcattattcctgtcccataaaatcctagcttaggataagttatccattaggttttgtggtagcattctatcaccatttgcaaaacctaacttcctacatacagatgtnttatgtttcttgaactgagatatctgaatgcatgccatcttgactacataatcacaagtaggtcaacccaaataaagatcatctccatttaaatcttaca

SEQ ID NO: 89782 - DNA, 530 bp, Homo Sapiens
acagggaatgtctgtgtaaactcatccctgggaagacagagaagctgctctgacacctcaggggaacagaatggcaggggacagaccataagactgtgcaacatttctccttttccttgccttttcgccctctttcagaggccccacttctacaccccgttttcttccggagcacacaaatcccagcccttgggcgtcccctgttctcaggctgccatcgtgaggaaaatacctgataaactaaaccacacaaggatgaagagatgccctccagaaggtgcatacttttaaaaagaggaccccctagagagagcaatgtttaaaggaacccatctgatacagtagaatttcagaacctcaaggcaaccagagtttcccagtaccacttaaacatcacaacacacataaccttctgctctgctaggagtttatcaactgattagccgtaactcactttgtgtgcagatcttggaagaatgctaataataataactgatgtttactaaaatccaggtgttgtgtaaaaaaaa

SEQ ID NO: 89783 - DNA, 664 bp, Homo Sapiens
agtagtagggctagcttccaatccagaaagtctggatccaagactgttgatccactgtcctattcaccctattttgtgaaggaaaagaccaagttcaaattctccagagtccattgccaaataatggagtcagatctatatttctatacataattacaacacagtgtggtgggcgcctgtaactacttactgtctctacttggactcattccatggcaatgttcacacaaaaaatgcccctccagagatcttacaggtttctatttatcataacactcaccatgctttatatttttatatgttttgggaattctcttagcattagacagtgaacttccatgcagatgaccacatctaattcattattattattgttattcatgctggacctcaggtacaaaaggttaagaacttctcagttcattatatgatcatcattggtgcctccgagctctctctctctcccttgatttatttggtcccttttatctccagtccttactcccatatctaacctcttacccctacctcataggtaaacattttaatgaatttgatgtttccttttatttgcatagatcctctgtaatatgtagtagtgtccagtgtacatgtatttttaattaaccaaaatggcattaaattatagatctaattttgtata

SEQ ID NO: 89784 - DNA, 333 bp, Homo Sapiens
  misc_feature (229)..(273): n is a, c, g, or t
cttgagtgtaaacataacttatatgcactgggaaaccaaaaaatctgtgtgacttgctttattgcagcatttgttttattttggtagtctggaactgaacctgcaatatcaccaaagtatgcatatagttgcaaaaatgtgatttttgacatagtaaatatgagtatttgcaataaactatgatattacttttgtaagtatatagaataaaatgtaaataatctatagnnnnnnnnnnnnnnnnnnnnnnnnnnnnnnnnnnnnnnnnnnnnngaccgcgtatgcggccgcaagcttattccctttagtgagggtaattttaggttagcactg

SEQ ID NO: 89785 - DNA, 465 bp, Homo Sapiens
ggaatctgcctatgtggtagaccaaccattactacttgaacccccttagaaaagcttttccagcattccataactcaggttcctcatttataaagtgggaaactcataattgtcctacctacctcacaggggtgttgtgaggatcaaaggaacagatgaatgtatgagcactttcagacatgtaaggcactgtcatgtaacaagtaggggaaagactctggagcacattagtgctggtgtgtgccaagcccgtgggctgttgaccgtaagggatattcaagtaggaggaggaagagaagatggcattgctaataaaggttgtgatacacaaccataggattaactgcctcctcaagtccatcatgtaaataaggtgctatgtataccaacttctcaccacctttgtttttctgttcggtaatcctggtgtggacaaataaagttttcacttgtaaaaacaataaa

SEQ ID NO: 89786 - DNA, 373 bp, Homo Sapiens
atatttccccggttcaccacccccacgccccgggaaccgcgcctcctcccctcccccgcgctctccccggcgctttaagtaatgatatttgcatgcagggagcgattcataaatatgtcagggctggtgaaatataggcaacatttcaaactttctatttaaaaaacatgaattatggccgcggaaaatgtgttcccatttaaaggcgatacgaagtatttggtgtctcgtccccgggcccatccatcacgcagacaataaagagagtttttcgccctgacacccgcgatttatgggcgcccttatctgccctcatcactcacgcacaacggccggcctggcgacaggccccgcggagagacgcgcggccgca

SEQ ID NO: 89787 - DNA, 845 bp, Homo Sapiens
  misc_feature (640)..(675): n is a, c, g, or t
  misc_feature (720)..(747): n is a, c, g, or t
ctacaaagtttggactgtgtcttcttctgataagctgctggacagattgctcagtgtccggcctggtcaccaagaggtctccgtgccaccacaccttcgccatctacataatccatcatcaggacaaaattttcagcatctttccccaaacagacacaaaatcagggatcttcctttcactcggaacaacctagctcccctaccagatcaaaaatttctatctggagaacctctgcggacaaaccgagtgcttcctgcaattccaagtcaacgaagacacagcacagcagcagaagagagtgaacattctgccaaccccaccagtgatgaaaattaactgtgggccactcgctgcagaaatgtagatgaatatgtattttcaactctcaaaggacaagattactccagtttgtaagaacgaagaccaatttagtaagctgcattctataagccatcagttttataactcgaaattctttattccaaataaagatactccctaaataagcacttagaatatttgggtgtgcatattaagtctgtgaatttctgtgacttccacatgccaaaattaaaagacaaaatatgttatcagtaggaaaactgagctatgtttggtttgctttgtggcatgtgcacnnnnnnnnnnnnnnnnnnnnnnnnnnnnnnnnnnnntgaatgattttatgttttgggaaaaaaagtacgctttgctgaatnnnnnnnnnnnnnnnnnnnnnnnnnnnnccacatcccagacaaacatgtcttcacatttattgtcattctaacttgaactaatgaaacctatttaaaaataaattcctatgatcagtcaaaaaaaa

SEQ ID NO: 89788 - DNA, 510 bp, Homo Sapiens
  misc_feature (23)..(23): n is a, c, g, or t
agagtcccatgtttagtatggantaaagtcccatgtttagccactgccccaggctcccgtgaccccagaaaccaggtcacatggaccacagtgccagatcctcatcacgccggtgagcacctagaagtgagaacactgtattcctacaatggacacttggatatttctccttatttagtttctagtgaaacaaatcaagtaaggaactatctttagtttagatggaattatttgtttttaattgttgccggattcatctatatagctaatatttcaagataagtaatgaacaaaacccgtctaaaccttttgtttccaatgaatgaaagtcatgcactttatttataggctctatgttttggcttctgcaggacttttattatctatacataatttggccaaaaataagaaattggaaagaatgaaatgtttagtttatagtagaagaaagatgatgaccctaagttgtgaaaatatgttgtgatttttatgaaataaaaacaagtcctg

SEQ ID NO: 89789 - DNA, 502 bp, Homo Sapiens
agcattatgggacaacacacccacccagtttctgtaccgtggagcttcttggggaagtttcagactaggaaacaatggggctcaggacacatcaccccaaagtatgactgtaggagaccagaatacgccacccctaaatatgactataggagaccagaatacgtcaccccaaaatatgactgtaggagaccagaatacgccaccccaaaatatgactgtaggagaccagaatacgccaccccaaaatatgactgtaggagaccagaatacgccacccctaaatatgactgtaggagactagaatacgtcaccccaaaatatgactgtaggagaccagaatacgtcaccccaaaatatgactgtaggagaccagaatacgtcaccccaaaatatgccatgttgacatgttgattactttgagctaaaagcaactgagaaccagccaacagaaaaaaagctcttcagctccctaaaataaagcaaaaaactctcttttctaaag

SEQ ID NO: 89790 - DNA, 498 bp, Homo Sapiens
gcggccgcaacgcaacggacactggctggaaccccggaatgagccttcgaccctgaaatccttggggtgcctcgaggacgactggccgaaaagccgcattccctgcctcacaggccggaagtcccagcccagtccccgcgcgcgtccctcttcctcctcatactttcccttgactgagagctcctctaacccctgttctgatgggggagggcggtcttcccacttcctctccagaactccagaaagagcagtgtgcttatgcttcagtccaggctggagaggttggggccggggtagggaggcaggagccatgtcagttctgaaggagggtgaggcggtgggggattgcagggggcggctgagagaaaacctccttgagggccagggattccctttcccactctgaggctctggccagagggagagaggactctggacctaggaaaagaggcttttggctccaggtggtcaggacagtgggggttgggggtggggtgg

SEQ ID NO: 89791 - DNA, 579 bp, Homo Sapiens
  misc_feature (19)..(19): n is a, c, g, or t
aagaatttaaatactaaanatcagataaatgtggattttcctcccacttagactcaaacacattttagtgtgatatttcatttattataggtagtatattttaatttgttagtttaaaattctttttatgattaaaaattaatcatataatcctagattaatgctgaaatctaggaaatgaaagtagcgtcttttaaattgctattcatttaatatacctgttttcccatcttttgaagtcatatggtatgacatatttcttaaaagcttatcaatagatgtcatcatatgtgtaggcagaaataagctttgttctatatctcttctaagacagttgttattactgtgtataatatttacagtatcagcctttgattatagatgtgatcatttaaaatttgataatgactttagtgacattataaaactgaaactggaaaataaaatggcttatctgctgatgtttatctttaaaataaataaaatcttgctagtgtgaatatatcttagaacaaaaggtatcctcttgaaaattagtttgtatattttgttgacaataaaggaagcttaactgttaaa

SEQ ID NO: 89792 - DNA, 868 bp, Homo Sapiens
  misc_feature (585)..(585): n is a, c, g, or t
  misc_feature (599)..(600): n is a, c, g, or t
  misc_feature (609)..(609): n is a, c, g, or t
  misc_feature (711)..(711): n is a, c, g, or t
  misc_feature (766)..(766): n is a, c, g, or t
ataagggtcatcattcatcacctcatggacattagaagacgctgttagtgtcttttctcctggaaaaataaacctgttttacagagcatactctggaggtaattcacaaggattgctcttcctccgccccagccagagctacaagggcatcttcactgtgagtatctggtgagataactgtagataaaggccgtgaatgtggcaggcccctctaatactgaagctcttaagggattatcactctcaagatagtccatactcagattacagcaatttgttaacattgccatgtaagtgttctaagtgttcttatgagtttatatgtctccagtgtcttctacttctgataagcagaacttggttttgtctctctgaagtcttctatttcttcatatttgggtgtgacagctcttcctgcaatcttagttttctgataggcccgcaaaacttactgattttcagtttgttttatttttactgttgtgaagacagaagtgtctgtttcctagctatttgtctggtggtgtcagaactaaaactttcgttgctttttcacatttaaaaaagcattttagaaatgctttncattaataataacnnttgtgttgnttaaacatgtttgttctgatggtttcagtttaaaggatgttcttgattttcggcatcagtgttcaaaggcaggatcttgtgttgattctgagtcacataggnatatctgcaatgtttgtgaggctcagccaatgtcttcccctctgttgtgcgtatnttcttctttcctcagttttattttctaccgggtcaatctttgtcctgaaggtgaatctaggaattcctttttccccagggtcacaggaacacagcaattctc

SEQ ID NO: 89793 - DNA, 463 bp, Homo Sapiens
  misc_feature (379)..(388): n is a, c, g, or t
gcggccgccgctcacccggccgggaaagtgcgggctccgcgccccaccgcccgccggcagctcctctcgctcgctctgcgtcccactccaaactttttttatttgtcttttaattggttgttattcctccgaatgaatgatctttcttcttccctaaaagcaaacacaaactcctttggttcggaagaggtctcggcggtgctttttggtttctctggagatttttttcacttcacagcaacgatcttttaaaaggcaccttttagcttcttttaccacatctcatttccttatttctcttccttcctgttttcttgtcttttttttaaccccaaattgaaggggattataaaaataaaagagtgaaacgcttgcggcnnnnnnnnnnaattctctctcctttcaaactctgcgaacaccacctcaaaataatatacaagtgtgtgagaaagggggaagaaag

SEQ ID NO: 89794 - DNA, 1065 bp, Homo Sapiens
  misc_feature (470)..(497): n is a, c, g, or t
  misc_feature (504)..(527): n is a, c, g, or t
  misc_feature (566)..(596): n is a, c, g, or t
  misc_feature (843)..(853): n is a, c, g, or t
cggggccagaccacatgggagtgggctcggggccagcactcctatgacctgggtccctgccacaacctgcaggcagccctggggccccgctgggcccttgtctggctctggcccttcctggcctccccattgcctggggatgggatcaccttccagaccacagcagatgtgggacacacagcctcctgactccaggaagagccagagctgtgcagggaggaaggggtgagaggggggcccccacacctagactcagtaaggaagtcgggttggaccttaacatctgcattggacaactccaccccttccttggccttgcccctgcccgcctacactcctacgtgtccagggcttgggccgtgacttaggcagaggagtgcagaggagggtctggcaggggctgctcaggccgcctagctgcccctttgccaggttaataaagcactgacttgtttctcagcctccctccnnnnnnnnnnnnnnnnnnnnnnnnnnnncgcgttnnnnnnnnnnnnnnnnnnnnnnnnctaaaaaccgaggagggcggcgctttttattgtgtgtgnnnnnnnnnnnnnnnnnnnnnnnnnnnnnnnaacatgttgtgggggaggcgcgtgtgagaatagtctgccacaaacgagagtgaatcgacctccccaaggagggactattaaaagacacgactgttcttgtctgcgacaagagcggctgtgcgagagaaccaaatgaagcccgcctataaaaagcatgaagggagaaagggtggggccccccgcaaaaaagagggggcacatccatgcgaggggctctccaagaaagaattgttcgcgcccttttgtnnnnnnnnnnnaggcacacaaacgcccggggaggaggaggcctacccagcgaaataatttttttctctccaagaaagagaggaaagtttcgggcatgcgacccgaggtctctctacgaagcaccttttttccacacaaacggggggtggtggtgcacaacagaagggaatcataaacggatgctcgtggggaagtagagggagagaaagtttcgagaagcgcg

SEQ ID NO: 89795 - DNA, 540 bp, Homo Sapiens
caattgcttattatattttccaaaggactgagcatttatcttttattcacgaagatatcatatgaggatgataatgatctttaacagattttttagagatagaatttataaagaggctgatactaagaatactacaatcaaaattgaagctagagaatgtaaaaatagaaagtaaatagttctaagaatattctggcataaattatttttatttagccaataaaatagcctccaaatgtatatctcagacaccatagagctgctaacaatgagaatcaaggaagatgcttgcacttagatttcgtttgttgtatttcagtagttctggatgtcctttgttaaaattggaaaatggaaaaatgtctcgacagaaatgtcaatctggtgattctgtgaactgtaaaatgttcacttttaaaaataaagttgtaaacaagttactcatataagttggtattacagtagcaaaaacagaaaaccatgtgatccatcctgtattttgattgatgctttaataaagggtttgcacagctgtgtgga

SEQ ID NO: 89796 - DNA, 521 bp, Homo Sapiens
tgccatctagagcgctttctctgttaaagtagattttcagcctctctgatccctcaatttggtctgttttcaaaatatagaacgccaaactgctctcagtatagattaccaggatgtcccagacactttaaccctgtgtgtggcagtgacatgtccacttatgccaatgaatgtactctgtgcatgaaaatcagggaaggtggtcataatattaaaatcattcgaaatggaccctgctgatggagcagtttacagaaaagaagatggagagaccaccttcactggcagactagataaattgcatttcccctttttctcttttcctgtgtttctttacatgagatttgttaacacacattttctgagagcaggtatggaagacagccatgtgtagtgatggataatttaaagaaaaaaagaatccttgtttcttggcttttgctcctggagttaagcttactgcccaggtgacttgtgcattgctttatttagttgaaataaaatcagcattgaattcaaaa

SEQ ID NO: 89797 - DNA, 533 bp, Homo Sapiens
agagagagaagcaccactcctccctcacagcacagcaaggccaccactaggagggggtctcaggttggtcctcccaaaccttgtccaaagactggagttattagttggctgactcagccacataatgggcccaagaaatgccagcgtcctagcagttcccttggttctgggtcagctgaaagagcttggctcttttttaggaactttggtgcctgaacattaagagtagatcactgctttattcttgagctgttcaccctccatgaagctctcaagtcctgcatcctgaggatccagatggatgacaaggacacaggactgccattgagaaatgaagatgaactgtgtcacagatgcagtggattactgactgcccttgtaatagtccattttgcatctgttggtaattcattgaggcactcttggttttctatgagtttgtattttttgaattcaagaattgtaacatcactgttagatccctccttatttaatgagagaaataaaatatttgacacgagaaaattttaaaa

SEQ ID NO: 89798 - DNA, 473 bp, Homo Sapiens
tggaaccactgaagcagaaatttcatcaggcaataccccaggatcaacgggagtcaccagcagccaagaaggaaccactgtggtatcaagtggaatcactggaatcccagaaacttccatctcaggtccttccaaggaagcatctgacaaaaccactgctcctggacctcctaccacagtcactgcttccacaggagtcaaagaaacttctgaaactggagtgcaaacaggctccaccttggttacagctggagtgccaacaagaccacaagtatcccagccagaaaccactgtcgtggcaaccagagaagtagaaaccgaaaataaaacagaatgtctagcctcacttccaccagctccaggtaataattccacgacttcagaattgttccacattaatggttcctcttgtcaatcaaatttcagaggtcacgctaataaaagtcactagccatggaaatgttataaaaaaa

SEQ ID NO: 89799 - DNA, 442 bp, Homo Sapiens
gagacccttacagcttttcttagatgcctcaggctggacagaagggattcctggcctgctgggtacctgtccttttagaatcttaccatcatcctgaggattccatttgcttctgttgcattggatcctctatttcttggattccttattgttctccttgatttactccatcgatttggcaggacatatcctgtagtggtttcccgagaaagagcgtgttataggacttccaccccagctacctcccaggtcctgaggatttggtgtgcaaacttagagctacatcatcagctttcctggttctgaggccttcagacttggactgagccactcaactggcatctcaaggtctccagcttgctgacagcctgctgtgggacatctcagcctccataactgtgtaagccaattcccctaataaacctcctctataatatctaaa

SEQ ID NO: 89800 - DNA, 505 bp, Homo Sapiens
tttaagttggtgctaagtttcattctttatatttaattgatagaaactgcatgcatcaaagaaaatgcatactgagctttaatgtgcataaaatggatattagcattttaaagaggaagattaacacattaatccaagtaattttcatatattgcttctaataaaatcttcacagtataaaactcttaatgaagctaatcataggcattccatttagtgggacgattagggataacataaaagtatttctttttcataggttttctaagatttatgcttttgcttattaaaaataaaaatgggaattgcatttcggttcttcctaagaaaatgttgaaaatgcaaatagactttctcacgctatcacgtaggtataaattattgagaaggtactgcccattatggagaacttaagtcctgaggggtggcagttatgagaaggagggaatagagaaataaacaaatgaaaaagtatacaaaacttcaacacttcaaacccaggtct

SEQ ID NO: 89801 - DNA, 1120 bp, Homo Sapiens
  misc_feature (474)..(474): n is a, c, g, or t
cagtcgacggtaccggacatatgcccgggaattcggccattacggccgggaccgcttctgagcttgctgcagttttggggtgtgtgtgtattagattccttctcagttattctggaataaggcaaggagtgggttgtttttcatagctagataagatcttttccaaagtttttcttagaaccaaccaaaaaacaatccgagtaggcccaagaatttgataatgctggatgccttgcagacatcattcagtttctaatattgggcaacaattattattaaatgaattatttctgtagttggaatctgtaccttctgaacctctacaccaataactgctgcaggtgtgattttggtctgtcacactgtacatctatcataatgtgccctgtatctatgtggcagtgaccttggaaaatctggccaagcctaggggtttccttttccatttgccaagttccattgtgccaggactgncgtgctccaactgagctcctctgtcacacccaattcttgcccctcactgggcaggccatggcctacagcttgcagggagtacagcaggcccgctccctttcttcccatccacatactcctcttctgctttccagtgactccaccagtttgatgtggggaagggttagcttcctttccttcttccatcccttcttccatctttccagctgtcaaatccaatccagtctctaacctaaatgcagatcatttatttaaaagtaccaaacataacccagagtttgtggaatatgggcaacatatatatagccttctgtatttaacgatcttctgcttcttaaccgtaccagttttctatttataactcttatctatccatgatgttttaaagtctccacttgctgttatttacaaacgacagtgcattcagcagcccagtgccgtgagccctgacagatgccgtatttctgagtgcttccatgtgaatgctgccctcctgtagcatgtgtccaagtggacatagccactaaccaactagttacctttggactgcaacaaaaaatgtgaaaatgaagatttatttcttttaatttacttaaaaagaaacctctgtgctagcaataaagcatttatattgtgtactcctaaa

SEQ ID NO: 89802 - DNA, 425 bp, Homo Sapiens
  misc_feature (34)..(34): n is a, c, g, or t
gtcagctagcgtgtttgtgggcctggtgatcttntacatcgccttctgcctcctgtggcccctcgtggtgaagggctgcacgatgatccggtggaagataaacaacctcattgcctcagaatcctactacacctacgcctccatttccggaatctcgagcatgccgtctctgagacattccaggatgggctccatgttcagctccaggatgacagaggacagggctgaacccaaggaagccgtggagagacagttgatgacctgagtgtcccacctgccccagcccccagttactgtcacgcctctcttatgaggcccatcttgaagatgcaacctgtcacccagcccaggcctctctttctgttttgcttgatgtttacttctcgttcagactcaaataaagccttttttcaggaccagcaaaa

SEQ ID NO: 89803 - DNA, 942 bp, Homo Sapiens
  misc_feature (686)..(686): n is a, c, g, or t
ggtaccggtccggaattcccgggatatcgtcgaccccgcgtccggtctcctccgggacgctgaggggcccgaggagaccgtgaggctctggcctgcagctcgcgccgccatggacgctgccgaggtcgaattcctcgccgagaaggagctggttaccattatccccaacttcagtctggacaagatctacctcatcgggggggacctggggccttttaaccctggtttacccgtggaagtgcccctgtggctggcgattaacctgaaacaaagacagaaatgtcgcctgctccctccagagtggatggatgtagaaaagttggagaagatgagggatcatgaacgaaaggaagaaacttttaccccaatgcccagcccttactacatggaacttacgaagctcctgttaaatcatgcttcagacaacatcccgaaggcagacgaaatccggaccctggtcaaggatatgtgggacactcgtatagccaaactccgagtgtctgctgacagctttgtgagacagcaggaagcacatgccaagctggataacttgaccttggatggagatcaacaccagcgggactttcctcacacaagcgctcaaccacaatgtacaaactccgcaaaaacctccaacctctggagagtactcagtctcaggacttctagagaaaggcctggtgcangcggcttgctggggggatgtgagcgcttcaggacgtgatgaagtactcgtggttctggaagctctaaaaacacttcctgatgcatgaaaaatgtggggagggtgcaaaggaatgggatccccgattgttgttgggagaaacaaggtttggggattaggcccctaaaaacttaacctccccggggaaatccctttcaattccccatccgggttttctaaaaaccaagcccttttttccccccccaccctttttggag

SEQ ID NO: 89804 - DNA, 1056 bp, Homo Sapiens
gggctctcgccgtggcgggaaaacggcggccgcggcgtctcctccgggacgctgaggggcccgaggagaccgtgaggctctggcctgcagctcgcgccgccatggacgctgccgaggtcgaattcctcgccgagaaggagctggttaccattatccccaacttcagtctggacaagatctacctcatcgggggggacctggggccttttaaccctggtttacccgtggaagtgcccctgtggctggcgattaacctgaaacaaagacagaaatgtcgcctgctccctccagagtggatggatgtagaaaagttggagaagatgagggatcatgaacgaaaggaagaaacttttaccccaatgcccagcccttactacatggaacttacgaagctcctgttaaatcatgcttcagacaacatcccgaaggcagacgaaatccggaccctggtcaaggatatgtgggacactcgtatagccaaactccgagtgtctgctgacagctttgtgagacagcaggaggcacatgccaagctggataacttgaccttgatggagatcaacaccagcgggactttcctcacacaagcgctcaaccacatgtacaaactccgcacaaacctccagcctctggagagtactcagtctcaggacttctagagaaaggcctggtgcaggcggcttgctgggggatgtgagcgctcaggacgtgatgaggtactcgtggttctggagctctagaaacacttctgatgcatgaacaatgtgtgatggtgcaaggaatggcttcaggatgtgtcggagaacaagttgtgattagtccttaaacttagctcctgggacatccttcaatccacatctgttctagaaccagcctttccccccactttgagaataacaagctaggtatcagtatctcctgcgagcatggtcctgtgagcctccctggcaggtcggacgaggtataccgaggcgtggccgtttaccttgacattggggtactccgggccaaggggggcacgcggtccaccaagccaaaattggagagtatccacaa

SEQ ID NO: 89805 - DNA, 1324 bp, Homo Sapiens
ataggtaggtcgagctgggtgttaattggcacgaggcgggacgctgaggggcccgaggagaccgtgaggctctggcctgcagctcgcgccgccatggacgctgccgaggtcgaattcctcgccgagaaggagctggttaccattatccccaacttcagtctggacaagatctacctcatcgggggggacctggggccttttaaccctggtttacccgtggaagtgcccctgtggctggcgattaacctgaaacaaagacagaaatgtcgcctgctccctccagagtggatggatgtagaaaagttggagaagatgagggatcatgaacgaaaggaagaaacttttaccccaatgcccagcccttactacatggaacttacgaagctcctgttaaatcatgcttcagacaacatcccgaaggcagacgaaatccggaccctggtcaaggatatgtgggacactcgtatagccaaactccgagtgtctgctgacagctttgtgagacagcaggaggcacatgccaagctggataacttgaccttgatggagatcaacaccagcgggactttcctcacacaagcgctcaaccacatgtacaaactccgcacgaacctccagcctctggagagtactcagtctcaggacttctagagaaaggcctggtgcaggcggcttgctgggggatgtgagcgctcaggacgtgatgaggtactcgtggttctggagctctagaaacacttctgatgcatgaaaaatgtgtgatggtgcaaggaatggattcaggatgttgttggagaaacaagtttgtgattagtccttaaaacttagctccctgggacattcttcaattccacatctgtttctagaaaccagccctttttccccccacttttgagaaataaaaaagccttaggtaaataagtcattctccctagcagagccacttgggtctcctgcatggaagccatcacacttgggcaggtgttcagtgactggtaggtgtagatacagcaggagtggccatgtggtccacggctttttaccccttcttgatcctcatttcttgggctgaatttagactctctcacagaggtggctcacagagaaggatggcagatggtgcagccaacaatgctgaccggtgcttatcctctaagccctgatccacaataaaaatggaccccaactccatttcgcccctcccggttatatccagaacaaacatgttcggtccggcctccggcccctcgaagaaagctttcctaagaacaatttccttttgggccgccggcgggcccccagaaaaggtaaacgcggacacact

SEQ ID NO: 89806 - DNA, 375 bp, Homo Sapiens
  misc_feature (56)..(68): n is a, c, g, or t
gttaatttgcacctagctttttggagaatagccatgattaactgctattcgtggtnnnnnnnnnnnnnaaccctatgatttactatgcagatgaagagggtaggaactaaataaaggactttgtaagccaaagtggttgggctgctttgtcaaattccaccctttgcttggttccaacatggaatttctcctttaaagatttcaatatcccatcaaaagtacagttagagaatacctagtgaatttattgaatataatgctaagaatcaaaagacttgtactagtttacctctggctttggtaagtgtggctttgagtaataactgagctgtttccccgcatataaaatagaaataaataagtagtcatcatgac

SEQ ID NO: 89807 - DNA, 457 bp, Homo Sapiens
  misc_feature (369)..(391): n is a, c, g, or t
ttttttgtatgtgtgtgtaggcctggacctggggcagggggctgtgtgcaaccaagcctggtgagcattgctgtggccgctactcttgtgcagcaagaggggacagtgcagtgcagagcgttttctgacaaaggccaaggggtccggagtgcaaaaggacaccttggggctggggcatgcaggagaggttacgggcgctgagtgcttgcagccaagggggcttcggggttgctgagagaggacgagccttgggagcttgacagttctgcttacagttcagaggctgtaaaacaaatgccactgaacaccatttcactctttagaacctgtgtagtctttctttttctatgtagaaagccatctaatcgnnnnnnnnnnnnnnnnnnnnnnntcaactaaccgtcactgtagttgcccacttacccccagcaaaatcacactccaaaagggggagtgg

SEQ ID NO: 89808 - DNA, 371 bp, Homo Sapiens
ggctaagatcatgaaagatctgctcgattcaagtgttaggagcttgaataagtttcttaatttctctgcctcatctattaacacaggactgacaatacagtttatatagagttgttgccagaattaaaggagttgatgtatgtgaagcacttaactcggtaactggcacatcgtagatgactcagtaaatgctattacccttacacatacaagtgccgtttcatactcagtttgacttggcaagcctttcccaaccgcttcaggtgccttcctgttttgtcctcaattactgtacaaatattttctgaggatctgttacctgcatgtgccaattatggaaataaaatcttctagtctttactggaaaaaaa

SEQ ID NO: 89809 - DNA, 520 bp, Homo Sapiens
aattgtactccaaaggagatcttggttacattgataccagcatagtttgagcctaccctcttccctgtaccctcaaaacccttgttaacatcttatgttttgccagtctgctgaagaaaaaatggtatccaattgtttaattcaattacttgattactagtgaagtgagaatttttttatatttatcataatttgtattgcctgtaatctgaaagggttattcatatttttttgcctacttttctattaagtcatgtctctctaagatctagcttaaacgttactttttccaaaaaaccttccctgatctcccacaactcaaaacattatcttcctactttagtttcttacaatattttatctacatttctcttataacaccactttctactttgtatgattgttattttagtactatctaatcagtcctttaatttcctttggggactattttatggtgattaatccttatgacacatattgtccacatttttggacaaaattcttcaatgaagattga

SEQ ID NO: 89810 - DNA, 434 bp, Homo Sapiens
  misc_feature (228)..(228): n is a, c, g, or t
tttcagaggaagaggtcattgtacttggcagtgggtgggggacaaggctgaggccacaagggctattacatcgcccgtgtccgggccagtctggggggcccccaaattttgtgcaggtggggggactggagcagtccatccatcatggttagtcttgttaatacgttgatctgtgaggtcagcagggagggttatggctaggaggctgggggcatggggttggggggncccgatatccatggcttcacaccactgtgccactcggggagttgcctggttgggaggagatgccctctaccactgacttgctgggtgacctgggccaacttccttcccctgtctgggcctcggtctcctcgtctgtgaacgccttgcccggccgggcccaagtgcagatgaggccctcctggcaggcagtgatgatgcagtcctcc

SEQ ID NO: 89811 - DNA, 1540 bp, Homo Sapiens
gatggtaccggtccggaattcccggaatcgacccctaacatgagctttccatgtaaatttgtagccagcttccttctgattttcaatgtttcttccaaaggtgcagtctccaaagagattacaaatgccttggaaacctggggtgccttgggtcaggacatcaacttggacattcctagttttcaaatgagtgatgatattgacgatataaaatgggaaaaaacttcacacaagaaaaagattgcacaattcagaaaagagaaagagactttcaaggaaaaagatacatataagctatttaaaaatggaactctgaaaattaagcatctgaagaccgatgatcacgatatctacaaggtatcaatatatgatacaaaaggaaaaaatgtgttggaaaaaatatttgatttgaagattcaagagagggtctcaaaaccaaagatctcctggacttgtatcaacacaaccctgacctgtgaggtaatgaatggaactgaccccgaattaaacctgtatcaagatgggaaacatctaaaactttctcagagggtcatcaaacacaagtggaccaccaacctgagtgcaaaattcaagtgcacagcagggaacaaagtcagcaaggaatccagtgtcgagcctgtcagctgtccagagaaaggtctggacatctatctcatcattggcatatgtggaggaggcagcctcttgatggtctttgtggcactgctcgttttctatatcaccaaaaggaaaaaacagaggagtcggagaaatgatgaggagctggagacaagagcccacagagtagctactgaagaaaggggccggaagccccaacaaattccagcttcaacccctcagaatccagcaacttcccaacatcctcctccaccacctggtcatcgttcccaggcacctagtcatcgtcccccgcctcctggacaccgtgttcagcaccagcctcagaagaggcctcctgctccgtcgggcacacaagttcaccagcagaaaggcccgcccctccccagacctcgagttcagccaaaacctccccatggggcagcagaaaactcattgtccccttcctctaattaaaaaagatagaaactgtctttttcaataaaaagcactgtggatttctgccctcctgatgtgcatatccgtacttccatgaggtgttttctgtgtgcagaacattgtcacctcctgaggctgtgggccacagccacctctgcatcttcgaactcagccatgtggtcaacatctggagtttttggtctcctcagagagctccatcacaccagtaaggagaagcaatataagtgtgattgcaagaatggtagaggaccgagcacagaaatcttagagatttcttgtcccctctcaggtcatgtgtagatgcgataaatcaagtgattggtgtgcctgggtctcactacaagcagcctatctgcttaagagactctggagtttcttatgtgccctggtggacacttgcccaccatcctgtgagtaaaagtgaaataaaagctttgactag

SEQ ID NO: 89812 - DNA, 414 bp, Homo Sapiens
ggccccatacacagtagctactctgtgggctctagtatccagctcctcatcatttctccgcactcctctgtatttaccttttggtgatatagaaaacgagcagtgccacaaagaccatcaagaggctgcctcctccacatatgccaatgatgagatagatgtccagacctttctctgcaaaaggaagagaagtgggatggctgggaggggtccaggcagagagcccattactctggccaaggatgctgcctcctgcatcaagcagatagaagagcttgttgggacctttcaccccataactcccaggctcacagagggtggtgagtggtgtcaaccctggaaggacccaaggtccttgggaagctccctctgcaggctctttgggaaactgctctcaggggctagaaatgcctg

SEQ ID NO: 89813 - DNA, 458 bp, Homo Sapiens
gaggctgattgaggaagtgggttcaggcggcccgccgtgcctggcacacgtcaagagtcccctgacaggactttcccctttctctgagatgacaatcaggccgctttgctttgcactgccctcagagaagcagtgtgcccagaagtcaagtgtgagctcttgagtcaaaatgcttggatttgaattccaactctgctgcttaccagctgtgtgacatggggtgagtgagttacctgacctctctgtacctctatgtcatcatctttaaaatggagcccacagcaaccagggaaatagtctaacagaagcctaggatgaagaatttcgggaaagaagaaacgtccagcaaggccaagtccctttgtgtgtcagtctgctttctctctcacacatacgtgcacacaggctcgtacacacaaagatgttaagcaaaatataaagctcctccactgataaaa

SEQ ID NO: 89814 - DNA, 499 bp, Homo Sapiens
tgtgaaagtcatctgtgaaaatcccgtaagagacctcacacttaatagtgaaaatctggatgctttcctcataaggtcagaaacaagtcaaaaatgtctgctcttggcttttctattcaacattgtatgtgaggtactagttcagagcagttgggaaagaaagagaattaaaaagcatctagattgtgaaaaacgaatgcaaaactatctctacagcacatgttaatgtatatagaaaatcctaagtgatccactaaaaaacgatcagaactaataagtgagttcgtcaaggctgcaggacacatcagtgcacacaaatcagcaggatttctatacacttgcaatgaacaatccaaaaattaagaaatttcatttccaatagcatcaaaaaataattaggaataaatttaagaaaaatatgcaagacgtgtacactgaaaactacaaatgttgttaaaaatttttttaaatgtctaaataaatgaaaaaacagctcaaa

SEQ ID NO: 89815 - DNA, 480 bp, Homo Sapiens
atagagaggggttctatgttacccaggttggattcctgcaatcctcccacccccgacaaagtgctgggattacaggcatgagccatcacccctgtctcttttctgtctgctttgaatctggtattattaagctactggtattgagaaaagactcactgtctatggtatattcagagctacttggagattttgttttgcttatacagctcagccagttgtagctaaaatgtaatcattgaaaacttgaaactggagaaaaaaagaaagggtaagtttttaaaatcaaactgctatagaaactgctttattcaaaattttagttcacagccttcactgaattacctactgggataaacaaagtttatttatgtgaatggttccaattttgtcagaaataatttggatccagccctcttttataaactggtgagtttgtactgctgtctcatggctagagttctgcagtaaaagctgtacctt

SEQ ID NO: 89816 - DNA, 299 bp, Homo Sapiens
agctaataatctatacttctccccagccccccatagtgggggagaaaagggcaaaaagtatacattctaagctcttgggaaaagataccatactttctttctggaggaatccagtcctgtatagttctagttaatccatacttttctaggtgtcctgaaattaaaagtgatacaaatgaatctttcttgccagggaacaagttttatgtgctaataacatattcatttcaactaataacaatgtaatagtataaaatgttgatggatcaaataaaatttaatttgatgagcaactccat

SEQ ID NO: 89817 - DNA, 420 bp, Homo Sapiens
cttctcttctgaaagaataaaaatatgatgctacccaggacaaggaaagaatccccaaattttgacgttaaagacaccccagaaccatgacctctgtgtccctcctgacagtccacctccctgtgcctggtctgtccctcactcctgcaaaagacgaggaggaaattaaattcaactcacatgggccagtcgatcaaatctggcaaagagctcgttgagcatcctgaccagctcctgagcagacaaggtcgtggagagccattttgccaccagggaaggaatatggaacaccacctatgattctctgcatggaccgtggctctgccttcacttctgctgacccctttgctcagaattcatgtatttgtgtttttcacttggctgacttcgtctcaaataaagccaagaagaatcaaaaaa

SEQ ID NO: 89818 - DNA, 474 bp, Homo Sapiens
aggggtaatgaagttcatcgcagattgttttctaaccttcggtgcatgtattgaaatagatttttgttttaaaaatatgagattacatttttctggatctggtgtgcattggggtagagaggatgactgtcttaaaaatagatcgtgtattctgcctagagcaaagactcttaagtcttttggctgaaaatgaactgagtatggacaaaaatattgaagtattctacttgtaaacttaccgtataatcagtgtcttgataaaatagtagtttttgttggttgaatctaggaatgtgttggacttgggtaaatttcagacatgaccaacaacaaaaaacaaaagcctaattccttaacctttcctgactgaaacttctcaggaagaaaccagttttgaattgtatgacataaataagattgtcttttattataagtttttaaactatgtaataaaacatttggggataaaaaaaa

SEQ ID NO: 89819 - DNA, 530 bp, Homo Sapiens
actccatgttacactgagttcatgctcctatttactgatcacaaatgagctcattaatgtcatcgaaacatttattgtaacctaacagaccatcacagattggaaacttggtagatagcagagcatggtattagtgaaaaaggttcaaaatacacaagtaacatacactctgaaaaacatgcagataatttgctgatgaagcagaagaggggatgcgcatggcaagaacttgccttaccccagattctctatatctcatggtttccttttcctcttgactgtctttacgagtgttttttatttgggaccctcgagcccagagatattaatggatatctgtattcaatatttgacaaaatctaatggaaaccatccatttactcatgataaggcttcatcactggatttctgtgtcttcactagaacaccattgtcatctcatattgatcaggtattttaatctagcacttacatattgttgataaatgaaagctgaattgttacttaataaattcactttgtttagtaaa

SEQ ID NO: 89820 - DNA, 362 bp, Homo Sapiens
tttgttttgattggttgtttattgcttgtctctctccactccctcagaatgaaagcttcgtaaagacaaggaaacttgtggctcatccctgctgggttcccagtgtttttgaacagtacttggcacatggaggattctcagtcaatatcttctagtgcagcagggagccgatagagggcgacgtcggctcccttcgaccttgatcgctggagagaggttctgcagcagtgaatgaactgtaacgtgattgtaaatactttcagtactttcagggccgtgattgtaaatactttcagggccgagtggagtttgttctgggtggggttttatgtgttctccttttcttacaaaaaaagaaggag

SEQ ID NO: 89821 - DNA, 450 bp, Homo Sapiens
ggcagttcataaatgtcaggccttcttcaacttaagggcccccattggcagaagaagactagtagtatcaaagacttcagctgaatgaaccaacagaagaatgacgaaaaaaatgggatgtcagttcccataaaccatgactgacaggctctgcataagtttgtaaatactggatttaaacaatattttagtctagatttttaaacataagtaggctcagtatccttataaatgaacttgttttaaagttattaaaaacctgcctttacttaatctgacttacgaaacagtcccaaagacagctgcagattaaacttgtttatccttgatccagtaactggtaaagcagagactcagagtgacaatatcaaaagaacaatatggtgaccaagccggttttctggaagagccaaatgatccttagccagaaacactttgattcaaacaaat

SEQ ID NO: 89822 - DNA, 536 bp, Homo Sapiens
tttcagtggtaggagcctttttaatctgggatgtttccttccgaaataggagatgcaagtctaccaatagttcacaggtgtatcgaggctagtctggctgatcttgggactcctgagctgacagtcccacagattcctcagggggtgtccaaaatttaactcgggtgtggtgaatccaagattccactcctgccaccttaactgcagtgggaggcagagaggattaccgagtatggtccttcccacaaagaatccatagatggggaggtagaggggagagatttgaccaacactagatctcctggttgaaacaactctgttcccttttctctgtgacatccttcaggtaggtttttaaggtttcattgatatttagccaaagaagttatatatttgaccaaattggccatttcctgatcaagtaggaggtcatttgtgagaaaagctcatcaatacagcatttcatagggactgagccgcattttgtgaggagaatttcagattcttcaccaggccatgggcaaaagagtaggcca

SEQ ID NO: 89823 - DNA, 723 bp, Homo Sapiens
  misc_feature (247)..(247): n is a, c, g, or t
cactgcttcggatggtgggtaatgccaggtgtggggtgggcacaggccctcaagagccccttttgccttgtagtcctacaccttgccctgcctgggctttggtgcagactaggtgtggatttgagctctgtgatctatgtctgctgcctggctcctagattgctctgcgggcaggtgctggccaaggacatcatctaggcagggggagagcctgggctgaacagctgtgaccaaaactcccttctgncccaacctgtcccctccacttcctgccctctgttccatcttcccccttcccaaaggccacagactttattccaggcccagggatgtaggagggggaaggaggaaacaggaagcccagagagggcaaagggcctacctcggggcgcgaaccatgccccagactattatctcagggctttctgggcactgcacttcagcgtggcccacctgcccatgccctgaggccagttggcgaggggtggctcctgagggtttttataccctttgtttgctaatgtttaattttgcatcataatttctacattgtccctgagtgtcagaactataatttattccatttctctctgtgtctgtgccaagaaacgcaggctctgggcctgccccttgcccaggaggccttgccagcctgtgtgcttgtgggaacaccttgtacctgagcttacaggtaccaataaagaggctttatttttaaaaaaa

SEQ ID NO: 89824 - DNA, 881 bp, Homo Sapiens
  misc_feature (13)..(13): n is a, c, g, or t
  misc_feature (564)..(642): n is a, c, g, or t
ttaaaggacccanagtatgtacagcatatatagtataggatgtctggctcagtgtgggtacttgcatagatgttaatttcttataccaaaaaccccaaatgaacctgaattgaatttaaagtgtggtgatgcattgatagtggtggtggtgatgtaggaattaagaattgtcatttacttttctttctagaattagtttggatgagttttgttcagtgagaaaatttcctgaaagaggtagacttctttaagagaaagaaaagtagtttacagaatgtagttgcagaaataatgtgaaagagagcacagattgaggagtaggaaaattaaatttagagtcccaactttgtggagtggcgtgaataaagggaagtgtacatatcactgaattcatgcttttccttaagttatctgttttcagagcagtggaatttttcatcagagataaatatgaaaagaagaaatactacgataaaaatgccatagctattacaaatatttcctcctctgatgctcctcttcagcctttggtatcctctccttctctgcaagctgctgttgacnnnnnnnnnnnnnnnnnnnnnnnnnnnnnnnnnnnnnnnnnnnnnnnnnnnnnnnnnnnnnnnnnnnnnnnnnnnnnnncacttacagctgaaaagctgcagaagaaagatcagcaactggagcctaaaaaaagtaccagccctaaaaaagctgtggagcccactgtggatcttttaggacttgtttggagaaagattgagaaggaaaagagtgaaaggcagttagttgaagtggaagagttgaccttcatgtactgctttccaaaaaattgttcctagttgttattgaataaattgttgtctgttttaagaattaaa

SEQ ID NO: 89825 - DNA, 462 bp, Homo Sapiens
tttttttggtttacaaaatatggtttatttccaagatttgagggttcagtctcttaggcaaggcacccagagcacttccccctttccattccttagtttgatttcctcccatttctcatcctgggttcacagctcacagcacatgaatcaacatttagtcataagggccatttcctcataacttcatttgaaactaggtccatgtcagaagggttgactataaagaaaaatgcattttctcatttttttcaatataattttgcaaatgtacttccacttgtttccaagatgggagtggcagaagagaagatcctataaacctcttctgtttcctgccaatttcttcaaagcgtggcatccatccccggtcaggtgcagtgttctttctctgaactcatgttgtacttgacaataacaagtggcaaaagagctaagctctattaaaaggcagaaaagaaacag

SEQ ID NO: 89826 - DNA, 646 bp, Homo Sapiens
ctcctcagagctcccctcacaaagttggcagtatcatatctgatccagcagcaagatcagtggccagagctgccccggaataggtggggcttactgcaaaagaaaatccttcagattaccagaagcacagccaaaagaacagacagtactgagaaggccactgaggagaatagagacaggacaagttgtgagaacacaaccagaaaaagaatgacatccccgtttagaagacttagggaaagaatgctttcaagggagagactagtcaacagccaaaaagaggacacagatcacaatcaagctacagaaagctgtgagaaagtgaaggatgttggaagcaacatcaaagatgagaaagggagtgccatcttcaattcaaatagccaaggcaacagtaacactttaaactgcttctatacgcgattcaagtctaaaaggaggaagacactctgatgaagttccttatttaattttagtgttaagtttgttttcagttattaatgtatacatggcttaaattaaaccatttgtcaaagcttaggcagacaacttagtaaaatactatttataaacacttgaaaatgcctcatttgtacataagttattttactgatgtattgagttagtaaattttatactcttgaaa

SEQ ID NO: 89827 - DNA, 1119 bp, Homo Sapiens
ggggcggtccctgcctctgagtctctctcgaccatggccaaattcgtcatcgcgggtagagcagattgtccatattatgctaaaacagaacttgtggcagactatttacaaaagaatcttcctgattttcggatacataaaatcacacaacgtcctgaggtttgggaggattggcgtaaaagatgtgtgtgaaaagaataagtggagtcacaagaattcccctatcatctggagagagctgttggatcgtggaggaaagggtttgctgttgggaggatataatgagttcctggagcatgctcagcgtttactatgatgtcacctctagcatgacgactgaactgatgatggtaattgctcaagagaacctgggggcacatatagaaaaagagcaggaggaagaagccctgaaaacttgcatcaaccccttgcaggtctggatcaccagtgagtgggtaacacacagagaattcgtggcgaattcttgaaaaacttgaccaccacaggaagacaatttggaggcattttggctgcgcgacagtatagccactacactgaaatactggtaccatggctcaccacctggggagattgtatcttaggaatattgagtgaaggccagttgtggtattccgaaagggatcgtcttttctatgcctgtgaaatttgagaatggaacttgggtggttcttacagatctcaaagatgttgaaataagtgaacaaataatgacccgaatgacaagtgatctaattcaggagaaacttgttgcacttggagacaagatacattttcagccataccaatcaggacataaagatctggtccctgatgaagaaaaaaatctagctatgtcagatgcagcagagtttccaaatcagattcctcaaaccacctttgaaaagccacagagtcttgagttcctaaatgactttgaaggcaaagccgtggaatcctaacagatcaaattggatgaaatatataattacttgatagcacaataaacatagaaagaatttatatgaatgtctatatttaaggaagaataatttgaaagatttatgtcagtcttagataataccatgcaaggcaattaaatcactgtgacagcacaaaaaa

SEQ ID NO: 89828 - DNA, 1289 bp, Homo Sapiens
gaccggccaactgccctggaggcatccacacaggggcccaggcagcacagaggagctgtgaacccgctccacaccggccaccctgcccggagcctggcactcacagcaggccggtgctaaggagtgtggcgcgggctcgactcccactgctgccggcctcccgagtgactctgttttccactgctgcaggcgagaagaggcacgcgcggcacaggccggcctccgcttcccgggaagacggcgcactcctggccctgggttcttgctgctgcccaccctctgctccctgggatgggccccgaggcgagcagcttcagcacaggcctggccctgctccaggtgcaggaaggaggataaggccgggccgagaggcggcacacctggaccatcccatgggcctccgcccgcgccgccccgaggatgagtggtgatgtcctctagccacccctagcagcgtcggctctccctggacgtgcggccgcggactgggacttggctttctccggataagcggcggcaccggcgtcagcgatgaccgtgcagagactcgtggccgcggccgtgctggtggccctggtctcactcatcctcaacaacgtggcggccttcacctccaactgggtgtgccagacgctggaggatgggcgcaggcgcagcgtggggctgtggaggtcctgctggctggtggacaggacccggggagggccgagccctggggccagagccggccaggtggacgcacatgactgtgaggcgctgggctggggctccgaggcagccggctttccagaagtcccgaggcaccgtcaaactgcagttcgacatgatgcgcgcctgcaacctggtggccacggccgcgctcaccgcaggccagctcaccttcctcctggggctggtgggcctgcccctgctgtcaccgacgccccgtgctgggaggaggccatggcggtgcattccaactggcgagttcttgtcctggtcatccggggctcgtgactttctacagaattgggcccatacaccaacctgtcctgtcctgctactgaacattgccgctgcttcctggcccgctggggagcaagctcatctggaaatccccacagagagaggttggatggcccccggtgatgaatccccgtccctgacggcctcaccgggcgggaaagcaccgggacccaggggccccctccaaggcaaagcaccgtttgagacgaaaggtgtccccaatccccggccaggcaattggcactcctcgacagctggggcatatgtggaaccactctggaaca

SEQ ID NO: 89829 - DNA, 368 bp, Homo Sapiens
gggggcatgttaactaagtaatgtttcatagaaatatgtaattaacctacctgtggagcctctttccgtgcattctggaaagatcacaaaatattgccctggatttattgggcaagattcctgatacctgtcataaattcttgggaaagctgagtcctagaactacttttcaaattttaggtttacacatttctttcaggagcagtgtatctaatatggatgatcttacacaagcattttctcttctgatctttgttcttattagctaattgtaaaattcaatcaggaactgacaaaggggttgaaactcaagtttacttgctacttgttagaatctttgaattatttgaggttttaatcatcagtgt

SEQ ID NO: 89830 - DNA, 608 bp, Homo Sapiens
tttgaagttaaaaaaatgcctttaatcagctcttacccttgggggctaaattcattcaacaaatatttattgaacacctactataagccacacattcctttaagcccttgggatacttcaacatccctgccttccgggagcttatattttagatcccagatctgccatccatctctggtttctcttttccttcttcatctgtatttgatacgcaacacctattccagggatcagagcaaatgtcacgctttttctcaccagaatggcagaaaaaaagtctgcagatcccttgctgcatacggcagatggtatttctaattcccagtggaacatcccctggcccatctaggccctaaaaagcccacgcagatcttaaatgagggtcctcgagcctcctggtgagagatgtgcacttggtaaggtggggtgcgcggtggtaagaggtcccgtttcactgcgtggcgtagcagctgaaacccgtttgtgccttgcccaggggctctttgcctgagttctgcaagagcctcagtggctgagtggttcacatgtctggcttgagacgatcctggaaacagccaggccacgaggaaaaagctggtgacggacgg

SEQ ID NO: 89831 - DNA, 484 bp, Homo Sapiens
acagccttcttctttgtggccctgctgtttccaggatcgtctcaagccagacatgtgaaccacctcagccactgaggctctcggagaactcagggaaagagcccctgggcaaggcacaaacgggtttcagctgctacgccacgcagtgaaacgggacctcttaccaccgcgcaccccaccttaccaaggggatgttccaccgggaatttaaaaataccatctgccgtatgcagcaagggatctgcagactttttttctgccattctggtgagaaaaagcgtgacatttgctctgatccctggaataggtgttgcgtatcaaatacagatgaagaaggaaaagagaaaccagagatggatggcagatctgggatctaaaatataagctcccggaaggcagggatgttgaagtatcccaagggcttaaaggaatgtgtggcttatagtaggtgttcaataaatatttgttgaatgaatttaaaaaa

SEQ ID NO: 89832 - DNA, 542 bp, Homo Sapiens
caaagaaaacaaggacttgcctttgtctccgattgtgcatccatccaatctccattgctttttcttgaaaagttggttcacagaagcttcatgtatccccaggatcctagtagaacggttttgcagtccagaatgtcagaaccaagcagcccaacggtgtcttaaagaggtttcacactcacgttcgctctggctcagctattcttctgcttccaggctttgggaaacggtttgctggatcctggagctgcgtaggcagttgtattttccgtcatcttaacctgcagcgccaccacgcgttctcactgagtcttttactgtggttgaatattggaggcaaaatacttctaaatgtactgaatagactatgtaatacaaaacactgagttctattttcatgtgactttcgtgtatacagatggagctctgtgatgttgtacagggaggagtacaaagagaagactgtcatttatgttattgactgtttaatgctgttgagattaatgattaaataaaattcaatgaacatttaaccagaaaaa

SEQ ID NO: 89833 - DNA, 583 bp, Homo Sapiens
tctgtgcatacatttaaattctaaacaatagcttatcagagtcagctcaaaatatatgagaaacagtattctctcatggttttagcttttgactttgctgtgtaaatagacataaggtgctttgatataaaatataaaatgtaactggaaaatagctcgaggtccttctgtcccaagctgagcagagccccatctttctgggtctatattagtcccacctactgacacaaacaaaagcttgctggaagatcgagttttagacgcatttttaaaaatcttaaagactaaaacacttccattttaacttgtaaagtaatttaattttttaaagattatactatatgcctctgtgtcttctctaaaagaatagatcaacttcagtccataaaagatatttttaatattaaagaaaaaatatgtttccttggtttctttttattttacaggagtaaaataaggaaggaacgttcatcactttaaactgaacctggcaagttaatttcctcgggaatggggatgtatttttttaagcattgcagatatcaaagttctattgtgctgaataaatgcccctttgttaaaa

SEQ ID NO: 89834 - DNA, 492 bp, Homo Sapiens
tggaaggggaatgatgggagaaggggctgggctaccttcagttttgcaagggaagagattcttgcaggttcttcaatttccctctcactgcaagatttccagagctcgcctctaaaagagggtccctttgaccctttttaccaggatgccttacttatccttccaagaccatctcctctcacaaaaagtgggacaagaccatctcctcgcatgcagcacatatggttaagtcccttcccagtagtaagtagcctgatctaccagtgtgcttttcagtattttcaaacttagcgccgacgttctctctctggtggttgtttcagatcaatctaaggtccaccactagcttccctcttgtctactctgcacggattttctccagctgactttgttggttcctgaagggcttgtattaggagtggaggaggcaacttgctggggtttggtgtttatttttctatttacagttaatttgaaatttggacatttcat

SEQ ID NO: 89835 - DNA, 422 bp, Homo Sapiens
tttatattgtattataaattcatttttattttattttgtgaaagtatcagttcatgatgagttgtgaggggaaaaaggagtccatcaccaccagtagcttcagcaccaccacatcagaaaataccatgagctccagatttgcaggtataatgtaaaagagtcatatctgtcaatccatctctatcattcacattgcaacctctcttaagaatctcatttccaataatgtcaatgttttgttggacctgaggaacccactgtctcaaaatggcaaataattctgaaactgaagttttgggatcaaaaagaatttcctggcatgatgcatcattaggatcaaagaaagaaaattcacagtctgaaggcattggtgctgcagaaatggaaaagataactggggtatcagaagcagaaaatataaa

SEQ ID NO: 89836 - DNA, 554 bp, Homo Sapiens
ccatccttgtagtatgacacatgctccaaggaaatggaatctgtcctttaaatggataacagtatgtgttctaatggcataaaatattactggataaaaacagttgtgtcagtgtctctcctaaggtagtaaatataattgacttattctgaacccattctattttgaatctcccctttcctctcacaatacttgaacattttaatcttttggaatattgtctttctttgttataactattcatttttagcttttgtctccagtgcatgatctcatatttttgcttttatttttagtataagaacatttataaaatcatatttttgttactgcaattgttttatttgttgtgtggcaaatgagaaatcctttatttattgtgctgtgatctctctgtgtggaatgccttggtgagagagatgcttattatgactattatcatttctgaccaagcttctattaatgttatttctaataatacactatcttgattgtactctccagaaaatttttctgtcagtgaaaataaaagaaaaattaaagtaaagctaaaa

SEQ ID NO: 89837 - DNA, 638 bp, Homo Sapiens
  misc_feature (237)..(253): n is a, c, g, or t
  misc_feature (487)..(488): n is a, c, g, or t
  misc_feature (626)..(626): n is a, c, g, or t
aataagcaggtcattgggtgggatttagaaatctgattctaataatatttgacccacagctctattaggaaaaataaaaaggcatgtaactatcttgaaattcaaaccatatccacagttattatgttaaaggagtggttttcaacctagagtggtggcaacttctttctcaaattaaaacaagataaaaggtaagctattctccctcaagaggatggaggatgggaaaaatgtttnnnnnnnnnnnnnnnnncactccaactatggagcctttctcccttcataaagcagctcggcagtcactctgtgcaacctaaggctttggagatcacagatggaaagccacctgtttgaggtaacagaaggaataaggtcactagttcgtagatgcaatataatgacacaggtatactaagctctcataaatggttatatgagaaatataaattaaggctcatgtaaatatacaaagtagctgattacaaannaaaattatgaatatctttgtaaagtatcatttccaacatatttcctatgtaaaactttttttaaaaaattaggtttgctgaaattgaaagatacacatacttatctctgaactctttctaactaatggtcagtgaagnaaagtgcaaaat

SEQ ID NO: 89838 - DNA, 542 bp, Homo Sapiens
gcggccgccggcgaggcgaggcggcccgcgccctgcctgtcaggccaccggcccggcccgcgggctgcccccgatgcggaggcgctgtcgccggggccatgcagcaggcgccgcagccttacgagttcttcagcgaggagaacagtccgaaatggcggggactgttggtctcggccctgcggaaggttcaggaacaagtgcatcccactctctcagctaatgaagagtctctctattatattgaagagctgatttttcagctgcttaataaattatgcatggcccagccaaggactgttcaagatgtagaggagcgagttcagaagacctttcctcacccaattgataaatgggccattgctgatgcacaatctgctatagaaaaacgaaaacgaagaaatcctcttttactgcctgtggacaaaatccatccttcgttgaaggaagtattacggtacaaagtggactaccatgtatccctatatattgtggctgtactagagtatatctcagctgatatcttaccatttgctgggtactat

SEQ ID NO: 89839 - DNA, 484 bp, Homo Sapiens
ctgtacagaaatattttgtaatgtgttgattttaaaaaaagaatctgtaaataaagttttaaaaaaagaattcaaatggcacacgctgaaatatgtagatattttgctatttatttaaaggagtattttaagagatattgaaccatctgaaattgaccagtaatcaaagttccaatcatctgaatgcttttccttgaggtagaatgtgagtctcagaaatgactgcattacgtgcccttttttgcaccttttctgtctttttattttgcagaacaacaacaacaacaaaattgtgccttagctgtatttttttgtctaggggagtttgtttctgtctgacaaagcaacattttttgcagaaaacagtggatgtattaaatactgtatcataccaaaaacactgcaggtgtatataaatgctttctgtcaaactgtgttttcagatgcagaattttaaaattaaaaaaacactgcctttatggaa

SEQ ID NO: 89840 - DNA, 398 bp, Homo Sapiens
ttttgagtgaaaagaacaaggtgagaaattgtgaatgtatttaatagtattgcatcttcattcgttctctcaaaagaatatttgctgaatatttactatgtgacagttactgccgtaggagctggtgatatgacaaggaacatacaagatgggatctttgccatcaagttgcacgcatgtatacgtacatgcatatgtgcatatgcatagacatagagtaaaacatcagtctgcaacaaaacagattaagaggacagagagtgtatactggttattcttcatcatctatctagatctattctctgccctttgctgcttggctctttgtggctcctgttttctattgctcatgaagagcgaatgccctgttctttaagaaaacattggtgggcttttag

SEQ ID NO: 89841 - DNA, 424 bp, Homo Sapiens
aactagcccacttctgatgctgcatgactgagaagaagtagtatcatagaatcatggacctttaaagctggagagaaacatctcaaaaataagcaacctggaccagagattaaactccaggtctgagagccagataacagccctcctcaagataaccagtcaagtttggcactgcaggccctgagccattttggtccaccctgctttgaccccaccccttgtccacatcagctcctgtgaagccaccccagaagaaaaccactattcgttcacattggctgattgatgctccatacgtccaaaccttccagtcctcaagaaacaagtatggctgagttctgggtaaaagtggagaacatgaccctctcctcactctgtgccatgttttatataagaaataaattaaaagtatataaaaacaaaa

SEQ ID NO: 89842 - DNA, 572 bp, Homo Sapiens
  misc_feature (32)..(32): n is a, c, g, or t
  misc_feature (40)..(40): n is a, c, g, or t
  misc_feature (87)..(87): n is a, c, g, or t
  misc_feature (479)..(487): n is a, c, g, or t
acctgctaccattcaatgggactaggacttgngctttagnccaattggccattcccttcaccctggcattccataagatacccaaanatacacatggccactgacaccagagagatttgacaaattcttttaatcccaatacatatgttaactcaattggagtccctagaggtgtgcctaatgaatttaggcctaaaaccaaatagctgctgggttttaggactcttctgatggtcaactattaataagaatgtgaaaatggaaaatggaaaaaatggaaaggcatggtagctttaatccttacatctctcataattgtggcaggagtcttaacagcagtgggatgttgtattaccccttgtgtgaggggactagcacaaagattaattaaaacagctgttaataaacaaatgcccataacttaccagcaagataacctactactattagaaactgaattaaactcactctcctatggnnnnnnnnngtaaatgacttctagagcaattcaaggaccaaaaaggcttaatgaaaatgagaccaaaggaagtaaatagaaaagagttaataga

SEQ ID NO: 89843 - DNA, 311 bp, Homo Sapiens
aaagcttaaaaagtaaaaactttgatatccccagcagaatcataacttttcacagaggcatctaatttcttaaccttaaagcagaagagaaacgtctttcaaattttcctatgacggtcaaggagtgggggttgtggaatgtatatacttagatgaattaaactcagaccttttccggttggatgtttgagccgcccagacaaagatgaagattaacacagtttaaggatgaaatatagaccatcctgtgcaaaacccccgtgttgcagtttaattaaaagaattcattaaagtggtgccccatcccgggt

SEQ ID NO: 89844 - DNA, 505 bp, Homo Sapiens
ctctactgcaatgtattcatttaatataataaaatcaggatattatattttgcttgctatcctcctttttaatactttgtatttgcatatttttcatgacaatattctttaaaaacacaatatttatgaatggctgcatgactctgatcctataacactgtaaccatctacttactgttggacatttacattgtttccaactgatgctactataaataatgctgtaatgaacatatttgcatataaagacttgttcacatctctgtttatttccttactaaaatttcctagaagcagaattattggaataaagggtatgaatatttttcaggaacttgatacacactgccaatttgcttgtcaggaaagctgtatacttccaccagcaaaacaagagactgtccattttacacagccttgcccaaactggatattaggaatttcaaaatccttaccaatctgataggtgaaaaaatgacacgtatcctgttgttgatttaattta

SEQ ID NO: 89845 - DNA, 441 bp, Homo Sapiens
atgggggatgtaaatgactgttaaataatttagtctttgaccacaggatggatggggggagaaaaaattaaatctacaacctagtcataaatgataataagtcctacttaaagtttaccatgtattctaagaatttacatatattagctcattcaaccctgacaacaaccctatgaaataagtactattattatctccactttacagacaaggaaacaaaggtagaatgtttaagcaacattctgaaaaccaggcggaaagggagaggaggaaccagtattcaaactccggcagtttgacttctgagagtccatgctcttaaccattattgctaaactgcatgttcaaaagaaaacaagtacaagctttggttttgacatttttcaactgcatatgaccagtttaacatgtaaggttaaaattattcataaaatatccccc

SEQ ID NO: 89846 - DNA, 500 bp, Homo Sapiens
tttacttagtaaaacatacaaaaccactctctcatatttaagcagctagatggtagaatatgtcatcaactacatagtttaatcagcagaggccttcgacttgtagcccttaatgccaaattccatttcaaagtatttaaaatggcaagtatagccaatttagaaaacaatcacatggtactcacattggcactcaacccacttgaaggttctagactaaggtacacactaacatatatacaagctccatccacaatggacagagttctagaatctagaaattttcaaaaattcaatactacagaacaatgtttataattcaaagaggagaaaaaaatagggtgctaaaagtacctttgggaggtgaggaaggcaacagaacaaaggaaggcccacacactaacaacaagggtcagaagctgctggccaacccaaatctccccttttggggcagagagaaaagcagctgtatgactcttgaaaatctttacttgacctat

SEQ ID NO: 89847 - DNA, 228 bp, Homo Sapiens
  misc_feature (118)..(126): n is a, c, g, or t
cataactaaaaatataaagtttctagaaataaatctaataaaaatatgcaagacctttttggagaaaattacaaagctttattgtaagaagcagagtttaacccttttcccatttagnnnnnnnnngtgcagctcactgccagcgctcatttaattttacgtaaacacactcttggaggctgaagcaaatcttactgattttcaatgtgaaaataaaatataaaaact

SEQ ID NO: 89848 - DNA, 385 bp, Homo Sapiens
tttgtttttataggaaacttttattagacaacgttataaatatcaaaatagctcatttgtcggatcaaactcttaactctgaaaaaggtctttctacctgcattacaaacccctataataaaacatcagaaattcattcatgtttcttttttctaatcctaaatcttccatcgtcaacctcaaactgctgccttagaggttctgagaaggtaacctaactggtagtttaggtaagtaaagttcaaatccagggaggaaataagaagcagaagcagaattagaagaaagacgaaataaaaggacagaaccacggtagagataatgaagaaacaaaggttggtccactaagttagtcttttgtcgttggttttttttggcaaaagag

SEQ ID NO: 89849 - DNA, 522 bp, Homo Sapiens
ttttgaaatgcaagaccaaaaaatcaaattctggtttgcagacaggaaaaaagtatcaaaaaccagaattcctaacagagcagctagaaaggggcaattttataaaccttatcagctgaatatcatgaggtgattttcacctgattgcaaaactgccatagtttgaaacacttttcaatttaccagacacactctgtcaagacttcatatacttccaacttgcaagcctgtgttttgccttctccaacctaaaaaggaaaagctttaaacgatgaacttacattctattaaaccatcagacttgagcttatcatctgtttagcgtgaatgtacaaaccaggtacatttccaccaaacacatagaaaaatcttgtgcatcacagttcagctaagggtggtaagacaatccttacaatcctccttggatttcttttttaaagatgtcaaagaagcaggtaagcaacattgttcatttgttactgggtgttctagatcaaaccttcacaagctatatatatagct

SEQ ID NO: 89850 - DNA, 593 bp, Homo Sapiens
gaggttgtccaaggccacctagaggactgtcttgcactaccttgtgattcaaccatttcattcctagatatataccccagaaaaatgactgctcatagcagctttattcataatagcacaaaattgtaaacagtgaaatttccatccataggaaaatggatagacaaactacaatatagtcagtggaatactgttcatttaaaaaaggactgctgatacatgcaacaacctgtatgaatctcaaaaacattaagttgagcaaaacaaaccaaacataacatactatctaattacttttatattaaagccacttccaggcaaaactaatatttgatgatagataccagaacagtggctgcttagagtgagggcagggaattcaaattgaatggaaaaggggcctgaggaaattttctggggtgattgaaatgttttgtattttgatctggatgatggttatgtagctgcatatatttgtcaacattcctcatgctgtatgtttagatttgtgattttactatatgtaaattaattccttaataaaatactattataaaataagctgtaaattaaatggaattaacttcaagttt

SEQ ID NO: 89851 - DNA, 497 bp, Homo Sapiens
  misc_feature (76)..(76): n is a, c, g, or t
cccattgtttacagtgaaggtgtcattcacaaaaactcaaggactgctattctccttcttccccttagtttactcntggtttttaccccaccctcaaccctctccagcataaaacctagtgagctaaaggctttgtctgcagaaggagatcaagaggctgggggtaaggccaagaaggtaggaggaaaatggcagacctgggctggagaagaaccttctccgtatcccaggtgtgcctggcagtatggtttcctcttcctctgtgcctgtgcagcattcatcccagctggccttggggttcaggttccttcttccctccctcctgtgaagttacactgtaggacacaagctgtgagcaatctgcagtctactgtccctgtgtgttggcgttcttagcttttttgacaaactcttttctccaggtagtaggacaatgaaaattgttctaagcaaaggaaagaaaactgactttgttgcacttttagtttttttaaaaa

SEQ ID NO: 89852 - DNA, 483 bp, Homo Sapiens
caaatatttctgataagactacaaatatctgactgagctggggattaaagtagaggtaactgtatcttaaatgagtatgatttccttgtaagttaaaaaaattgaaatttaattgtagacttcaatagtccaagttttgaaggatgtttgagcttttgtataatgccatttatacctgcagttttacagataatgtttgactgcagttgccttggaaattcctccaaagtttgccttcatctctcctctacagtttggaggtgatggtgcagcagtggaacatctcttgatgcaccacactacttgtgttctgtgaagtgatgaaagtataactggttctagtttgcacactacacacatagttttgtgaagcttcagaaatgttttttcttttccttgtggccaaaccagtttgttaatctgattatattcatctgctaatgatactaaagttaatgtaataaagcatttaaaaatcagaaa

SEQ ID NO: 89853 - DNA, 492 bp, Homo Sapiens
tgtgtctggggattccttcccacctacccagccagggactagtcacccccctgaagaggcctccatttccttcctgtgctccagggcatagggagcaccactcccacagacaccacctttaagggctctagtggcacacacatccacgagcctacccccaggttacctgccctaggtccacctccacccacagtcctgtgtgtaggaatcgaggaaacgggatgtccctgagcccttgtctccaaagggccggccaagggctgcccgccagcctgactccatcaaccctccatgaccaaatgatagctggcgggctctgcaggctacccaggccctctgctacctcccaccctgccagctggcaagggatgggccctgttctgtgaattgactacctgtggaaatgtgaccaattagtgtgaaatgcatgtttagcaagtgttaggtactgtatttgaaccaataaatgtgaatccttctgcacatgaaaaa

SEQ ID NO: 89854 - DNA, 625 bp, Homo Sapiens
  misc_feature (548)..(548): n is a, c, g, or t
gcggccgcgtgggctatggggcggcggtcgcggggtcggcggctccagcaacagcagcggccggaggacgcggaggatggcgccgagggtggtggaaagcgcggcgaggcgggctgggaaggaggctaccccgagatcgtcaaggagaacaagctgttcgagcactactaccaggagctcaagatcgtgcccgagggcgagtggggccagttcatggacgctctcagggagccgctcccggccactttaagaattactggttacaaaagccacgcaaaagagattctccattgcttaaagaacaaatattttaaggaattggaggacctggaggtggacggtcagaaagttgaagttccacagccactgagttggtatcctgaagaacttgcctggcacacaaatttaagtcgaaaaatcttgagaaaatcgccacacttggaaaagtttcatcagtttctagttagtgaaacagaatctggaaatattagtcgtcaagaagctgttagcatgatcccaccactgctcctcaacgtgcggcctcatcnatatgatcttagatatgtgtgcagcacctggctcaaagaccacacaggtaattgaaatgctacatgccgacatgaat

SEQ ID NO: 89855 - DNA, 515 bp, Homo Sapiens
  misc_feature (152)..(153): n is a, c, g, or t
tccgcccttccctccattagggatttgggccctcgaaggcccaagaaattcgggcacgagggcagcaacagccatcgattaagtgtagatgcccaatctttcagattccctaaagagttaactctttgcaagcaaaagagaattacttccannaaagacgagtgaacgttttagcatctggtgaaattacacagggatgacttccttgttgttgtgcatcaaattcgacagctatttcagtatcaagaaggtgtgcgagaagagcagagatctccattcaatgatcgttttccacttaagcgacctcgatatgaagatttagataaaccatttgtagatagtccagcatcaagattcgccggcctggatacaaatcagcgacttacagctttagctgaagacagaccgttatttgatggacctagtaggccatcagtagcaagagatggcccaacgaagatgatttttgaaggacccaataaattaagccctcgaattgatggacctcccacaaa

SEQ ID NO: 89856 - DNA, 459 bp, Homo Sapiens
ttttacataaaatggtttttattgcctcagacagtcttttaattgggtaatattgaaaaaatcacattttttcacattatactgtataaagcagtataattttttcacattaccgtataaaacaactgttttgtgggaggaagtgggtgaggttggaagtgtgttgcacttacaataagcactctggtttctgtgacatcagttttttgatttttaagaagttaaaatccaactgcagttgatagaaacatcttttgatgtcaatgaaatattatagtaactttgtaattaaacattttatttcttgaaagatgtttctaattaacagtgatttatattccacacaatcaaaaaccaagtctcattatgatttaatagttttcgtcttatagtttgcattgctggattttagtatttccattacatatatgcataaccatagcccttccaaatagaatt

SEQ ID NO: 89857 - DNA, 477 bp, Homo Sapiens
atcaagacagagctggtttgaagagaaggaggtttgaacacagtttacaccaacaactccacggaagccagaattaaattacctggaaggtgatatctcagtggctgaattttgaagttaatatattcacgaagaggacaactctgggagacaggtgatgatgtacttgctggagagggcagttcctcacatactatggaataatgttagaaaacaaaaatcacgctcttaatttggcatgggagagactcaagctaactaatgcacagtataccaaacgtctacttagaactgatcctgcattcccaatacagaacattagatattgtggttacatattgtggttagattcctaggtcagatacaaattgtaaaattaactcttgatgctgctgaaacactctatacttggaaggaaaattaacagtaaaaatgcattgatagcaatttaatacattgccatataactgagtttat

SEQ ID NO: 89858 - DNA, 517 bp, Homo Sapiens
gaactgcctctccagcaagtacatcatcacctgtctcccagagttgtcctcttcgtgaatatattaacttcaaaattcagccactgagatatcaccttccagattagataaagaagatgtggtacatatacaccatgggctactacacagccataaaaaagaacaagatcatgtcttttgcaggaacatggatggaactggaggccattacccttagcaaactaacttaagaacagaaaaccaagtccagcatcttctcactgataaatgggagctaaacgaaagaacttatgaacacaaagaaggaaacagcagacactggggtctatttgagggggggagggtgtgaggagggagaggagcagaaaagttaactattgggtatgggcttaatacctgggtgatgaaataatatgtataacaaaaccccatgacacatgtttacctgtgtaatgagccttcacatgcgcccccaaacctaaaataaaaattaacaaaaattttatctacatataaa

SEQ ID NO: 89859 - DNA, 494 bp, Homo Sapiens
aagaggaggctgccaaggcccagaagtctctgcacatgtgcgtcctgggaaacaactaccatcctgaccgagttcgctggtgaagaagaagtgaatcgcttcttagcccaaggccaggcgctgccacccacttccagctggcagtccagcagcgcgtccagccagccgcggctcagcgcagcgggcagctcccatggcctggtacgcagcgacgctggccactggaacgccccgtgcctgggtggcaaggggagcagtgagctgctgtggggcggggtgccccagtactccagcagcctgtggggcccgcccagcgccgacgacagcagggtgataggcagccccacgccgctaaccaccctgctgcctggggacctgctcagcggggagtccctgtaggctctgccatcatcagcaccaggagagccgacccctcccgggacccctcccggctgggcggccccacagacccgatggaacccagcagcggccgc

SEQ ID NO: 89860 - DNA, 486 bp, Homo Sapiens
tgccactcacctgaggatattcaggacattctgaaggtgctggtgtccgaccttaaccgttccaatggggtagcgctccccccattggacaagtggaagacacccaaggacaatgctgctactctacaaccatctgatgacaccgtgttacctggcggtgtcccttcccctggtgccagtctcactagcatggcggcatctcagaatcatgatgctgacaatgtccctaatctcatggatgaaaccaagactttctcatcaaccgagagcctgcgacaactctcccaacagctcaatggtcttgtttgtgagtctgcgacatgtgtcaatggggagggccctgcatcgtctgctaacctgaaggatctggagagccggtaccaacagctagcggtagccctggactccagctatgtaacaaacaaacaactcaatatcacgatagagaaattgaaacaacagaaccaagaaattacggatcagttg

SEQ ID NO: 89861 - DNA, 605 bp, Homo Sapiens
  misc_feature (117)..(117): n is a, c, g, or t
  misc_feature (228)..(228): n is a, c, g, or t
  misc_feature (271)..(271): n is a, c, g, or t
cagagagtcactaggagaagaaaagaaacaaagcaagatagaactcttcttaccaaagatgtttcacttctagatctgaatgattttaacccagtatccactccagttgcacttccnacaccagctctttctccaagtttgatggctgatcttgaaggtttacacttgtcaacttcctcttcagtcatcagtgtaagttatttttaaaatccaccagctcggttttcntatggtgccaatgtatcttttttattaaaatgtaaatacttgnagtgaattcttagttttgaacagattcttctctaagaacaagcccaatttagctaagaccttttaattttttaaataatttactcaaaccattatcttctcaatttttttcccttgttgtccacacttaattatcatctgtatgtttttctctggtattgttatatatctgtaacatacaaaggttcttcaccacattgacgcagtacatatacctgaactgtgccacaaaaagttgtctacattaacagactttcatttccgtaatcgttttattcctaccacactattttttcatagactattaaaaattcaaaactgtttttatttaaaaa

SEQ ID NO: 89862 - DNA, 845 bp, Homo Sapiens
cccaaagttgcccccgacccatcgtttcgaaatgtagaaggtattgagtttgcaaaaggatggaccccagccggaaaagccaagcaagagcattccgctaagaagttttattctgaatctgaggaagaggaggactcttctgatagtagcagtgacagtgagagtgaatctggaagtgaaagtggagaacaaggcgaaagtgaagaggaaggagacagcaatgaggacagcagtgaggactcctccagtgagcaggacagtgagagtggacgggagtcaggcctagaaaacaaaagaacagccaagaggaactcaaaagccaaaggaaaaagtgattctgaagatggggagaaggaaaatgaaaaatctaaaacttcagattcttcaaatgacgaatctagttcaatagaagacagttcttccgattctgaatcagagtcagaacctgaaagtgaatctgaatccagaagagtcactaaggagaaagaaaagaaaacaaagcaagatagaactcctcttaccaaagatgtttcacttctagatctggatgattttaacccagtatccactccagttgcacttcccacaccagctctttctccaagtttgatggctgatcttgaaggtttacacttgtcaacttcctcttcagtcatcagtgtcagtactcctgcatttgtaccaacgaaaactcacgtgctgcttcatcgaatgagtggaaaaggactagctgcccattatttcttttccaagacagccttgcatttttggtgataagatggtctctatacaaataacactgaataacactactgatcgaaagatagaaaatatccacatagggg

SEQ ID NO: 89863 - DNA, 904 bp, Homo Sapiens
  misc_feature (580)..(580): n is a, c, g, or t
  misc_feature (661)..(661): n is a, c, g, or t
  misc_feature (687)..(687): n is a, c, g, or t
  misc_feature (737)..(737): n is a, c, g, or t
  misc_feature (760)..(760): n is a, c, g, or t
  misc_feature (813)..(813): n is a, c, g, or t
tttgtgaggcaggtgggcgtctatatccatttcaccaggctggtggttacataatcggcaagcaagagctgtggaggggcttgctggatgccctcagcacccaggaggagggagggagctagcaagctaaggcaggtggccctcctggccccttaaggtccatctgctggaggcccagagtccttggagtacagtctacacctggaggggacacattcctgccaatctgtggcagggatggcgcgccacctctgccaggccaggaccccaagcccgatcagcatcagcatggtgcaggtgcacaggcgtgagctgatcagtgacaaggggcaggcacacaaagtggagacaaagaccaagaggacggttgcacagtgagaggcgcggactcaggaacttgaacaacatctgcgggggacggctatggaggtgctccgctgcctccaggtggggtgactagctgtagcaactccagcttggatattcggatctatgaagatctccgagatctcccatatttacttggctatctcatagaatagataggccattctctcttcgctgcaggccagattgtgtntgaggttgaaatctcattcagctgtccctgcaggcgaccattcacctgttcttccatcaatgcttgcctacactttctctnctgaagggactccagcaacagctgcnagtcagtcagagacctctccttttagctgtgataggactcctggaggctngatgtgaaacctcttggttcttncagctctgcctttaccttctgaacaagaagtttggtgttggcacatcctctgntcttagcacgcccctgttgaagcctggagcgactttccaatgaaaggcccgtggataaaggaggtgacgggccgtttccacccgggcttgg

SEQ ID NO: 89864 - DNA, 751 bp, Homo Sapiens
  misc_feature (497)..(498): n is a, c, g, or t
  misc_feature (500)..(626): n is a, c, g, or t
  misc_feature (639)..(679): n is a, c, g, or t
gggggcagagccgcaggtcagtcgtgaagagggagctctatggccaccatgagtttctccggcaagtaccaactgcagagccaggaaaactttgaagccttcatgaaggcaatcggtctgccggaagagctcatccagaaggggaaggatatcaagggggtgtcggaaatcgtgcagaatgggaagcacttcaagttcaccatcaccgctgggtccaaagtgatccaaaacgaattcacggtgggggaggaatgtgagctggagacaatgacaggggagaaagtcaagacagtggttcagttggaaggtgacaataaactggtgacaactttcaaaaacatcaagtctgtgaccgaactcaacggcgacataatcaccaataccatgacattgggtgacattgtcttcaagagaatcagcaagagaatttaaacaagtctgcatttcatattattttagtgtgtaaaattaatgtaataaagtgaactttgttttannannnnnnnnnnnnnnnnnnnnnnnnnnnnnnnnnnnnnnnnnnnnnnnnnnnnnnnnnnnnnnnnnnnnnnnnnnnnnnnnnnnnnnnnnnnnnnnnnnnnnnnnnnnnnnnnnnnnnnnnnnnnnnnaaattttgtccgnnnnnnnnnnnnnnnnnnnnnnnnnnnnnnnnnnnnnnnnnggggcccgggcccccccagggggaaagggaaaatgggcccaatgttttttttcccaagaaaaaacgcgggcc

SEQ ID NO: 89865 - DNA, 847 bp, Homo Sapiens
ccagtaactataacggtcctaaggtagcgaggccctgggtggcgaattcggcacgaggctcccgctcggaaggtcccaggtgtgacaccttcagcaggtctcagggaagatggcagccctaggggacattcaggagtccccttctgtcccgtcccctgtcagtctctcatcaccggggacacctggaacccagcaccacgagcctcagcttcacctccatgggcatcaacatggctcccctggctccagccctaaggtgctctcccagccgtccgacctggatctccaagacgtagaggaagtggagatcggcagagacaccttctggcccgactccgagcccaagccggagcaggctccacgctctcctggctctcaggcccctgacgagggggcgggcggggcgctgcgcagcctcctgaggagccttccccgcagggcccggtgcagcgccggcttcgggcctgaatccagcgcggagcggccggcgggccagccgcctggggccgtcccttgcgcccagccgcggggcgcctggcgcgtgacgctcgtgcagcaagcagcggccgggcccgagggtgcgcccgagcgggctgccgagctgggagtcaacttcggtcggagccggcagggcagcgcgcggggggccaagccgcacaggtgcgaggcctgcggcaagagtttcaagtataactcgctgctcctgaagcaccagcgcatccacacgggcgagaagccctacgcctgccacgagtgcggcaagcgcttccgcggctggtcgggcttcatccagcaccaccgcatccacacgggcgagaagccctacgagtgcggccagtgcggccgc

SEQ ID NO: 89866 - DNA, 750 bp, Homo Sapiens
ctcggaactccagacacatattcaggtgccatatggggtcattttcagggtaggcttaagcaagttattgccgtcaggtgcatctgccatacatccctccacccatcccctttctggccatcctaccagctcactccccattctatgttccacccccacccttctcaatatttacagtctctcttaatatgatcatgagggaagtctggaagtatctcttgaatctaaaaatgaagatgccccacacctcatctgttcccatcttggcaccatcctacctgcacctcggcaaggagatttggtctcatgtttgtcaccgcaagcaattgaaacaactggcgtgtctggcaacagatgaaataaggcatgacatggcctagtacagatatgttctacaactggaaaaaaatggttatgattgaggcttagaagtggagtgcagtgaagaaactttagggaagcctgacaaccacaccctctgctgatccctgtggaattttacatggataatgagtaaaagactgtcctgccaatagagaatacagtgaaacggtatggaacatacacagtggaacagaggacactgatggaacagtgtttataagcacaaagtttggaagtacggaatcctagataaaatcctgactgtggaattaactgcgtgaccttcggcaaattacttcatctctttgagcctcagtgtcttcacatataaaatgagaataataaaagcccttatctcatagtaaa

SEQ ID NO: 89867 - DNA, 752 bp, Homo Sapiens
  misc_feature (412)..(477): n is a, c, g, or t
tggccctgtcagcagcagggcagagtttggagccgaggaagtccagccctagatatagggaagatgccgaccctctaccccacctgagaacagcagaagcttgggactctctcctggctgtcggtcatctccattaaaaccaacaaatccaacgtttcctccaccattctcagcatggagaggtttggggttctctttggaaatcagcaggcaatgtttgttctggatcagtcaggccagcccagatttctttcagttgaatacatatcttcaaccccctttggggaaaaaaaagcagtggagaaaatctggtttctgagtcagtgtttgtgaaatctgcatgttcccttggtataaattgggctttggactgactttttggtttaatcaaatgtctacttcctgggctgannnnnnnnnnnnnnnnnnnnnnnnnnnnnnnnnnnnnnnnnnnnnnnnnnnnnnnnnnnnnnnnnntgcataaaaagaccttccttcagattttcctgaatccagcaaataatatgatggtggaaatgagaaagttttgtatttcacgtcctcacattctgggccaccagctgccttagaaccacactggtgacactggtgatgtactattttccttagagatttttagcatcagaagagtgcctcaagttcacattttccaaaagcttccatcctcctcataaccattatttggcttcaaattacctcagtcaataaaattactatcgttggttcgcaaa

SEQ ID NO: 89868 - DNA, 378 bp, Homo Sapiens
taaagcttataaataacattagcggtggcttggatttattgttgtggcctccggaagaacttgggcacagtgtaacttcctggggcccgaggttgttaatcggtgaattgttcatgaaggacagtgctcactgtgaaggtgggtgtcctgggatgctctgcctggcccgcgggagacaaggctatggtctgacatccctcagcctgtcctcattgtcctggctctgagaagaagctacaaaacacagtagaagaaaaagaaaacagtcttttaaagacttgtaatgagttgttaatgataaaagtaacacatgccaactggaaaaatgtgaattttttatctcagccaaaagtataaaaaaacttcgatttctttaaa

SEQ ID NO: 89869 - DNA, 454 bp, Homo Sapiens
  misc_feature (323)..(356): n is a, c, g, or t
  misc_feature (443)..(443): n is a, c, g, or t
tttacatttaatcagggtgaattaaaatatttaatttaaaaatggctttactgaacctcaattcagttaggtaattaatcaattcagttaggtaatagctactaagtatgtaatacaatgttaggggagagacatataacatccatagtttcaatctcattgagtttataatctactaaggaactgaagataagtgctaaaagaactgtaacacgaggtaaaacctgtgacaagatttaggagcagcacaactatatagttgtgaaactaaaccagcctcaaggctgaaaggcaggtgagaaaagactacctaccaaagtagnnnnnnnnnnnnnnnnnnnnnnnnnnnnnnnnnnaacatggattctccaaagataggtagaaaagtcctggtttggcgtcattagtctacttcagcccctctctcactgattacgactganagactcatgac

SEQ ID NO: 89870 - DNA, 900 bp, Homo Sapiens
  misc_feature (766)..(766): n is a, c, g, or t
  misc_feature (819)..(819): n is a, c, g, or t
cagtcgacggtaccggacatatgcccgggaattcggccattacggccgggggaacgcagagttgggagcaactccagagcctccttcaagatgctgctggtcctgctctcagtggtccttctggctctgagctcagctcagagcacagataatgatgtgaactatgaagactttactttcaccataccagatgtagaggactcaagtcagagaccagatcagggaccccagagacctcctcctgaaggactcctacctagaccccctggtgatagtggtaaccaagatgatggtcctcagcagagaccaccaaaaccaggaggccatcaccgccatcctcccccacctccttttcaaaatcagcaacgaccaccccaacgaggacaccgtcaactctctctaccccgatttccttctgtcagcctgcaggaagcatcatcattcttccggagggacagaccagcaagacatccccaggagcaaccactctggtaatctagaattcagtggcagaaaataaataagaagataacttccttcagaaagccatgacattgaaataatgtggtcataactctttcttcagtataccaataaaatattaatagcagtgcgaaaaaagacaaaccccaatagcccaccaaagccccaaagaatcgcccgtccgtcctgaacacccggcccgggtctcgagcacgacgaaggcgcgccgcaaaacacctccgcctgcggtattcagtcgaacacgcgaaataaagaccggcgnccggaccatccaaagaagtcgggtgggggcgcgcccgcttcgcgcgcgcccanttggaagagaaaagagggtcttgttacgtaaaacacgactttttttcgcccctttcttgtgacccgcccccgcggcctccc

SEQ ID NO: 89871 - DNA, 729 bp, Homo Sapiens
ggaccgagtggtgatgggggtcacggtgatgttggtcaagccgactgagctcgatggtgtggtcacatttgggtcacccagggtcaccactacctgctgaatgctctgtactgcggaattggtctcgtcgcctacactgcctgtgaactccgtctctttctctgagtattcgctgaaggtggcgtcctcgggcaccggagcacccgcctcctcttctggcttctgctttctcttgtgacttcgcttggcagctttcccgtgcttcccttcggccaaatcctcctgctccagagtcagctcaggctggacgatgccaatggaggaggcgtcgatggtggtggtctccgggaggtggtccaggtcatcgatcctcaccgcgagcacctcggggtgcttgcgccgcatgtgtcggctcatggaggccctggtggacaccttggtcccgcacagctggcagctctgcgcctccaccttgtcgtgtgtgagctgaacgtgcttctgcagcatgtactcggtcacgtacttcttgtcgcacacggagcacgtccactgcttgcccactgtgtggatgagcttgtgggtctccatggtgttcctctcgctgaatgtcttcccacacaattcacacatgaaaatcttaatccccgtgtgccgcttgcagtgcttgagcatgttgaccttctgcgcgaacctgccgtggcactccttgcactcgtactccttgatgcc

SEQ ID NO: 89872 - DNA, 419 bp, Homo Sapiens
agagagtgttaatgacatactgtgtatgcataatagccgcatgtactataatagcccttaaaattaaactattgggattgctgtaaatattttaaagtactggaggtgccttttacctgtttattagattttgaaaaggtttaaattatttcatgagcaatcttttaaatttcatttaacataaagctgaaaattcaataacaggataaaaaagctttttaacaaggctgccatttaacttaaatgtgttcatcttagctttcacttgtataaaatttgattctttgaactgcagcaataaaaccctcagctcctaagaagtcttaagagggtattctatatattctgctttgttttattttctgtaaattttgtaggtaaatatgtgcattaaaaataaatactttatatataactcg

SEQ ID NO: 89873 - DNA, 845 bp, Homo Sapiens
  misc_feature (106)..(114): n is a, c, g, or t
ggaaagggtaagtggtgggaataatgcaaaatgatagtttaaaaatccttcatgccctgtttactttcctaatatggagataattgaaatctggactgggaataannnnnnnnnaaaaaaactggattttccttgggcattgccatttactaatctcatgatcctgggcgagtcatgtaatctctttaaaacttattaactcataaaaatagaagtaacaatgtccaaacttcctattttagagttttcacgaggcgcaatagatgtaactgaaagcttcgagaagtttaaaggacttgcaaggaaatctactgaaataagccccattccacctgggcagaagcactcagacgccaaaccccaccttctgtcctgaaattcaccttccactaggagagtttgcttttctaatgcttcaaatgcacaacgggagatgttctgacttcagggtttctacccttcactgctgtaatctgctgcctgtatgacatgcgatctggtttacaccgtacagcttatcatcttcagcttgtggccccttccttgtttccaccttgctattcaggagggcctgtaagggtatctggattccttgagctgtagatgcaggacagtgagagggagggaggtagttctctggtctaatttcagtttcctaactgagggtacatgccttccctgaatgatcatcatcaaaaatatccagcccttcatggaagacaccacccctcctcatagatgagtccctgagcttatgatctcaaaaggaaatccttatcagaatacaacagaataaggacatagtttcattacagttataataataaaagtagttcttctttaaa

SEQ ID NO: 89874 - DNA, 483 bp, Homo Sapiens
tttaaacaacagagtaaagtaaaactaggtagccagaagaattgaagtagctgcctctggggattgtgactaggagggctggaaaaactatgagagacaacaggggagaaaaagaaaaatctgggaagaaattaataaatccctcacaaacattgttccttgttttttcaattccataagattaaaattccctaggttggccacagataacaaggctcaccagtccagggttcataacagattgtggacaaaattctatgaaccatcatcagacctcatcctaaatgcctgactctaatttggaccagagacaaggttaacctccagaaaacaagagtctgtcaactttctttagcagacccttatgtctttttacaagagatttttaaaaaagaaaataatcctgtcatatttcctcacctgtacaccctagcttcttcagaggaaatggaaatatcttgaactaagcagcattccagggaa

SEQ ID NO: 89875 - DNA, 401 bp, Homo Sapiens
taagaagagttatacaggccagagacaacgaacacaaagaatctaacagtctacccaaaaattatgccctaaaacagtgacttctcaaccagactcaatttctctgcaatgtctggagacattcagtagttgtctggagacattcagtagttgtcacaactgagctggaggtactgtgttgctcctggcatttagtaggtagagatcagggatgctgctaaacaccctacagtgtacaggacagcccctacaacaaagaattaaccaaaatgtcaacaatgctaaggctgagaaactctgacctaaaatgacaatcattatgactaaccatgtgcatagctgaaaagatccatgaaaagccttaaaatagatcgcaataaacattatgtagtcataaaaaa

SEQ ID NO: 89876 - DNA, 1736 bp, Homo Sapiens
  misc_feature (719)..(719): n is a, c, g, or t
  misc_feature (1503)..(1541): n is a, c, g, or t
  misc_feature (1543)..(1552): n is a, c, g, or t
  misc_feature (1559)..(1561): n is a, c, g, or t
  misc_feature (1563)..(1564): n is a, c, g, or t
  misc_feature (1566)..(1567): n is a, c, g, or t
  misc_feature (1569)..(1575): n is a, c, g, or t
  misc_feature (1577)..(1577): n is a, c, g, or t
  misc_feature (1579)..(1579): n is a, c, g, or t
  misc_feature (1581)..(1583): n is a, c, g, or t
attcgctggtgtacctattattatactataatagtctatatcttatttccttttaagagcattacagcattgtgaagaactgattcagcagtacaaccgtgctgaggacagcatatgcttagctgacagtaagcctctgcctcaccagaatgtaactaaccatgtaggcaaagcagtggaggactgcatgagggccatcatcggggtgttgcttaatttaactaatgataatgagtggggcagcaccaaaacaggagagcaggacggtctcataggcacagcgctgaactgtgtgcttcaggttccaaagtacctacctcaggagcagagatttgatattcgagtgctgggcttaggtctgctgataaatctagtggagtatagtgctcggaatcggcactgtcttgtcaacatggaaacatcgtgctcttttgattcttccatctgtagtggagaaggggatgatagtttaaggataggtggacaagttcatgctgtccaggctttagtgcagctatccttgagcgagagcgggcagcccagctagcagaaagtaaaacagatgagttgatcaaagatgctcccaccactcagcatgataagagtggagagtggcaagaaccaagtggagaaatacagtgggtgtcaactgaaaagactgatggtacagaagagaaacataagaaggaggaggaggatgaagaacttgacctcaatanagcccttcagcatgccggcaaacacatggaggattgcattgtggcctcctacacggcactacttcttgggtgtctctgccaggaaagtccaatcaatgtaaccactgtgcgggaatatctgccagaaggagacttttcaataatgacagagatgctcaaaaaatttttgagttttatgaatctcacttgtgctgttggaacaactggccagaaatctatctctagagtgattgaatatttggaacattgctagctgctttacctttgcttcaggtgctcggtaatgctggagctatccttagacaaagaaaagtcaagtcatgaaagaagtccttgaagatataccaagaacattcatcagtatcattcgtgtttggatttttaaggccacctgatttcttcgtcatgcattcggcatttgctaaatgacagttactacatcaatctgcaactatcaaaaatgaggggaaaaggttcaggctgttaacaattccatgcagtatttaaatacatttactttggcagagtttataccctccccttgttttcttgctttattctgggcaagtttgaaggggaaaatttgtgctgctgttagtgcaactgctgtgtatgttgagccactgttgtcatgccagccaggtgcaaaggcagcttagctactgaggtagcgaatgttctgaggacattctagacaacagcttagttcctttttcaggctcatttgcttttgcttttttgttgaatgattccaatcgtaaataaagcttttaataattttaannnnnnnnnnnnnnnnnnnnnnnnnnnnnnnnnnnnnnncnnnnnnnnnncacaccnnnannannannnnnnnananannnaaaattggggggccgccctgggcccctcaaaaacttttttaaaaacctttggcttttggggcgcgggccccccaaaaggggaaagggaaacaggggccaaaaccttgtttcccaagagaaatcccggggccatgaactaagggcgttggaatt

SEQ ID NO: 89877 - DNA, 811 bp, Homo Sapiens
gagatttttgctgcaatctgtttgccttccctgaatcaaaataatctttcattcgtcaccattatactaatgaacaatagatttcatgtttcaaaatttcagattttacatgttaagatgtactaacaatattccttgtatcaaacatctccttttctccctgatacatagccctgagacatttatagcgttcaggagtcttctattgcttccattccttcagcagggctgcgtgggtctgttttaacgtgggccaagcctacctgggcagcccatttgccagggcttgcctcaggccatgcagcattggcgctctggctgcagcagctgagttgctcaaggccagtgtccaagtggacagcagcctctggtactccccccagttatcttccacccacatggactgggcagagcagccctcttctgtgtgcactgcatacgctgcagccgtgggagttattctcccctagagatcgacttggcagcacgaaggattcttttctctttcatgcttctcaggctcaatagtttctaattaatcttaaaatccatgtcttttacattgtttttttaattaagtgctgtttactaaccaaataatatttataacatgagtaagctataattaataacaatgaaataaatacccatgtacccaccactggacttcagaagtagaactcatgactgggactaggatgaggcaagggagaccctggccttgggcacaaaatgtaagggatgccaaaaaaatacagtaatcaaagtaagtaatatttcaatccaatatttttaaaaatcagaattaatg

SEQ ID NO: 89878 - DNA, 703 bp, Homo Sapiens
  misc_feature (604)..(604): n is a, c, g, or t
cctcctattccttcctgcgaaggcgtatgcttcttctagaatgtcatttgcatatacgcatacacttatatacatacacacaaccacttggtacattttctcagatgttaagcttatttttataaaccacattgtacgtgtcactttcatttggcattttatacttaactagttgtatttatttttcatgtcatgagagtttccatataatgtgccataactgcatagacagcacgtcttcagggtgtggtttctaagcagaaaatagcaaatgtctatattgaataaaattgcatgtacctccacgcagcatcttcatcctccacgttcactgttttggaacctagtggttctcctctgcacaaagcgactctatcagagctgtccagagcagcttccattccaagcagaccctaccagggttcggaagctgacaggagcagttcctatggctctgttcttgtccagctccagcgctcgctgtgggactttggtgagaagatccagctttggaaaaaccttcccatcttcatctatttgtatcctccaaacaatgactaattcaaaccctggccggctggcgctgcggatccccatggagcangaggagggcccctccgagaggtacacggcatctgggtacttttccttgagatgtttaaacgtgcgcttacgatattcaaaccactccacaaaaaaatgc

SEQ ID NO: 89879 - DNA, 549 bp, Homo Sapiens
taattttaaaaattctttatttaaaataaagtttaaaaataatgtgggtagtgtaaaatattaatacagaaatgtataaagttgaaagtttcatgtgatctacactgttcaaagaaagctgtgaatagacctttctatgcatttataaacataagcacacacattttaaaatgagttcacactgtacacttttctattaataacttgtttcacctaatgtatcatggccatttttccatacacaatgaatgtactttattcattttaacagatacgagatattcctatatggctgaaccacaccttaacctatcctttaatgacagacatttaggttttctattactttctaccatgtcatttttacgcttctgtgggatcttaaatattccctcagttcctgtttcattttgtcttccactttggaaagtaatttcagtgaccatgacctctagcttaataaatacttggatctgtcaagtctcaatgttggtagatatattagtgtggattcaatttcaagtaacagaaacccaactcaaagtaact

SEQ ID NO: 89880 - DNA, 430 bp, Homo Sapiens
aggacaatttcacagttcaccaaaacttactaagttaaggtagaggatagggctccctccccatctgtgtgaggtttactctctattcagctatcaactgttctgatttatataataggtagtattttctaaagaaaataaaatattcaatggtatattcaatatccagttttctcactgaaatattaataaatacataactctcccctttttttcattgaaggataacatacacacagtgaaggacatcaaccctaagtgcacagctccagattctacctatgtaagcagccacacacccccaccaagttcatcatatggagcactgccaacagcccagagggtttctttgtgccctctcttggtcactgccccccaccaaagacgaagcactattttggcttctaccaaataaagttagttttgttaa

SEQ ID NO: 89881 - DNA, 565 bp, Homo Sapiens
cagcctgctgcagtgtgggtgggtgggagattcagctctttcactgtgaccctgctcccattccacactaggctacaaggacaggaaagagtttcagcagaaaggagtgagcagccacttactccttcaatgaataagctttcctaagcaaggaccagagaaatggtctccacacagaacctgcaatgcccactgggcactactgggtcctctctcccactacccacccccaggtactaaagcaccctggagaacttaggtataggtggtgggaagtcactgaatgcaagggagagagtgacttgatcaggtttgtattcaaaaacacaacgttaccggcaatgtggggaatgggtaggggaggggtggtccagagaatgggaagccagttaggagaccaccccaggtgagggatggtgaagacttgggcaaaggcagcagcaataaaacagcttctataggggcctcattacccttgacctgtatcagaggcaagacagtcactaccaagctgcctctaattcttcagagagcagagacattaaagtattgtaatgagtaaaaa

SEQ ID NO: 89882 - DNA, 498 bp, Homo Sapiens
gacgtaagaagatctctccagataagaggcaacatgtttcaagaaattttaatctctgggcatgtgactatgttccatcttgtcttgatggcttttcaaataaccaaatatcatacgtatataaagaagccatggtggtctcaagcttcagacgctttccacgatgctataaagagatatggaacgcttttacatttcttcctgagagaagctatacagaggttttgaaaaagaagcccaaagtaaggttcactgttgacaaaaaggttgtttcttcactggagtcctaatcctcccagaagatttttgatgaattttgtaatactggtatttcatcagacatcctaaaagtatatgttttctgatccagcaccactatttaatttttaaagtacttttatgatttttataaggtcaaaaaacattcaaatccttgtgaaatgaatttgtgatgacatacgcatgtgtaaataaacttttcagatggccacatttaaa

SEQ ID NO: 89883 - DNA, 1633 bp, Homo Sapiens
  misc_feature (1599)..(1599): n is a, c, g, or t
ttaggctttggttgtgcatccagttgtggtagactggctaattcagatgaaccctattgctgagaacagctgaaaaagtaggtttaaaaaatctgtgtgaaggcacagtagagggccaagacagtaaaacatcatgtggtcaaaatctggaaagagagtcggaagccagcggccgtggaccacgcggagccgccagcccggggcatgttctgagacttcagggaacccggcccgagctccgggaatggcgtgggtatggcgaccccgcgcagccccccggccgcagtgcaggcagcccagcagaagttccacctcgtgccaaggatcagcaacatgagtggcagtcaggagctgcagtggatggtacagcctcatttcctggggcccagcagttaccccaggcctctgacctaccctcagtacagccccccacagccccggccaggagtcatccgggccctggggccgcctccaggggtacgtcgaaggccttgtgaacagatcagcccggaggaagaggagcgccgccgagtaaggcgcgagcggaacaagctggctgcggccaagtgcaggaaccggaggaaggaactgaccgacttcctgcaggcggagactgacaaactggaagatgagaaatctgggctgcagcgagagattgaggagctgcagaagcagaaggagcgcctagagctggtgctggaagcccaccgacccatctgcaaaatcccggaaggagccaaggagggggacacaggcagtaccagtggcaccagcagcccaccagccccctgccgccctgtaccttgtatctccctttccccagggcctgtgcttgaacctgaggcactgcacacccccacactcatgaccacaccctccctaactcctttcacccccagcctggtcttcacctaccccagcactcctgagccttgtgcctcagctcatcgcaagagtagcagcagcagcggagacccatcctctgacccccttggctctccaaccctcctcgctttgtgaggcgcctgagccctactccctgcagatgccaccctagccaatgtctcctccccttcccccaccggtccagctggcctggacagtatcccacatccaactccagcaacttcttctccatccctctaatgagactgaccatattgtgcttcacagtagagccagcttggggccaccaaagctgcccactgtttctcttgagctggcctctctagcacaatttgcactaaatcagagacaaaatatttcccatttgtgccagaggaatcctggcagcccagagactttgtagatccttagaggtcctctggagccctaaccccttccagatcactgccacactctccatcaccctcttcctgtgatccacccaaccctatctcctgacagaaggtgccactttacccacctagaacactaactcaccagccccactgccagcagcagcaggtgattgggaccagccattctgccgcccccctcctgaaacgcacagctcaagaggcgcccttggctttctgtgatgagctgatctgcgggatctcagctttggagaacctttcagctccagggaaatcaagnccttcaccagcgaagggcagctgcctatttattt

SEQ ID NO: 89884 - DNA, 1016 bp, Homo Sapiens
agcaggtgatggggacatagaaccactcgaccgcctcatctgaggctggaagggggcataacagcgcccctccgtgacacacgcagcagcactgtgggcccccacggggagaggggcggtaagcctattcgcttttaccccagaggactgtctcccctcagtcccggagatgaggccgagcggatgtagccccacttgtcagataagacaaagtccaaaaatatcaaagaatttgtccaaggtcatgcagtgagtctgtagagctaaggctgggacctagggctccaaatactctcccattggcctctgggtccagtgaggcactcaggccacagcttcaagccttttattccattttggtaggtttgtataaaaatactctctttagggaaaataaatagcagctgccctcgctgtggaggcttggattccctggagctgaaggcttctcaaagctgagatccgcagatcagctcatcacagaagccaagggcgcctcctgagctgtgcggttcaggagggggcggcagaatggcctggtccaatcacctgctgctgctggcagtggggctggtgagttagtgttctaggtgggtaaagtggcaccttctgtcaggagatagggttgggtggatcacaggaagagggtgatggagagtgtggcagtgatctggaaggggttagggctccagaggacctctaaggatctacaaagtctctgggctgccaggattcctctggcacaaatgggaaatattttgtctctgatttagtgcaaattgtgctagagaggccagctcaagagaaacagtgggcagctttggtggccccaagctggctctactgtgaagcacaatatggtcagtctcattagagggatggagaagaagttgctggagttggatgtgggatactgtccaggccagctggaccggtgggggaaggggaggagacattggctagggtcccggccgtaatggccgaattcccgggcatatgtccggtaccgtcgactg

SEQ ID NO: 89885 - DNA, 366 bp, Homo Sapiens
cctaacttccagctttgaaataggactgaagatgaaccatgctcctggcaccccctgttgagagcccaagttcagcagattgcggccatgggggactgaaaatggagccctggacaaagacacttgctgggtgacccaaggcaagactttccatgtacactatgaatgccaagtgctgtgaataccaacccatgctttcaaagagcctgctgcctcagagcatgtgatgtggaactttctggtggcctcggcgtggaggttctcaacctcagctgcacactgtgtttagttggtttggagcgagatctaggcatcagtatattttttaagctccccatgtgattgtaatatgcaaccaagaataaa

SEQ ID NO: 89886 - DNA, 475 bp, Homo Sapiens
gatctgttggcggacgagctcactggtgtctggcccataaaggaaggagcaggcacagccccgctgcatgacctcagcccgggagaagcccgtgaggtcacagaagccatcagagcagtagaccacggggaagagccccgccacctgggcgttgcccagcacgaagttagcgtgccgtcgaagcgcgtagcgatggtgtccagaaaggtgttctgcggcgccaggaggccccgcatggccggcatcttaggcgcccgcggctgcccgccccatccctccggggtgcggggactccgcgccgggggagggcgcccagctcggccgccccccgccgggccccgcgctccctagcgcagccgtcggggggcaatgcgcagaccgggatccggggtcgcgccggacgctggcgcgcgagggggcgtccgcgccgtcggggcccggagcatggcgcgcggcccctcgcgccctcgccgcc

SEQ ID NO: 89887 - DNA, 527 bp, Homo Sapiens
ggaccttgcgtctgcttccgatgtagtctatggaaatgtgttgtttcagttgaactgtatcaagaaaatctggcctcacgcattttatagttgaaacagggaaaaggattttagtacctttttcagctaactaactatgaacattctttgctactacaccaaaactcaacaagtggtagcttcttaaaggctggttataacatggaatctgaagcctcatgaatagacttttgggctctgtggcagttaaatccgctgttctctctcactttgaacatgtggtttttcatggaaaaatgaatgttcacttgaaaaatgttggttcacagagttctgcagaaattcaaatttttgacacattacattatatagtatcaaaaaatcacttaatatcaccatccatctcatcagaaaactcattatgaggaagttgtcatggtgataggagaaagtttttcaaaattctgatttttgcttaaaagctcaaatgtataccattggcaataaataatgtcagctgtttctgg

SEQ ID NO: 89888 - DNA, 816 bp, Homo Sapiens
aaggtagcgaggcctgggtggcgatttcggcacgaggtcaaagtgtgcggggaggaggtcgagagcggagcatgcgcactggcagacccttgctctttcgctggagactatgcgcaggcgcggtgcactgcgcgccggcacgagggtgttttcgacgttggctgtggggaaacagcaagcggcgtggacgaccgttgctgagctggtgtggaacgtctgtgatcagattcgttgggcttttgccagctctttttagattgtcctcttgagacctgtttacagaggaatggccagaggccacaggcactgcctcctgagaccatccacctgatgcgaagaaagctagaaaagcccaaccctgagaaaaatgcttgggaacacaacagcctcacaattccgagtccagcatgtgcttcggaggccagcctggaagtgactgatttattgctcactgctttggaaaatccagtaaaatatgctgaggacaatatggaacaaaaggacacagacagaattatttgttcaactaacattcttcataaaactgatcagacactccgaaggattgtatctcagacaatgaaggaagcaaaagatgaacaagtgcttcctcacaacttgaagcttctagcagaagaacttaacaagctcaaagcagagtttttggaagacctaaaacaaggaaacaaaaaatatctgtgctttcagcaaaccattgacataccagatgtcatttctttttttcattatgagaaagataatattgtacagaagtatttttcaaagcagcattaaaatttctgaactgccaaaaaa

SEQ ID NO: 89889 - DNA, 1154 bp, Homo Sapiens
  misc_feature (673)..(688): n is a, c, g, or t
  misc_feature (690)..(700): n is a, c, g, or t
  misc_feature (703)..(703): n is a, c, g, or t
  misc_feature (707)..(718): n is a, c, g, or t
  misc_feature (723)..(723): n is a, c, g, or t
  misc_feature (725)..(725): n is a, c, g, or t
  misc_feature (744)..(744): n is a, c, g, or t
  misc_feature (766)..(767): n is a, c, g, or t
  misc_feature (769)..(811): n is a, c, g, or t
  misc_feature (916)..(925): n is a, c, g, or t
  misc_feature (975)..(986): n is a, c, g, or t
  misc_feature (1076)..(1084): n is a, c, g, or t
gcggccgccaactagctggcgggggcggaagatggcgacgcccctcgggtggtcgaaggcggggtcaggatctgtgtgtctcgctttagatcaactgcgggacgtgattgagtctcaggaggaactaatccaccagctgaggaacgtgatggttctccaggacgaaaattttgtcagtaaagaagagttccaggcagtggagaagaagctggtggaagagaaagctgcccatgccaaaaccaaggtcctcctggccaaggaagaggagaagttacagtttgccctcggagaggtagaggtgctatccaagcagctggagaaagagaagctggcctttgaaaaagcgctctccagtgtcaagagcaaagtccttcaggagtccagcaagaaggaccagctcatcaccaagtgcaatggtaggcgggaggcccgtgctctccaccacggttatataaacgggctctttcctaaccacccagtgcctgtgtcaaaggcagggtttcactctaacacctgtccccagctgaggatacaggcaggcccgggtgggccacaccttcgaaaaggccttaagggaccaggcaggccacggaaatgagggaagcagtcggtgtactatattcttcaccgccataaaggaatgggcttgctcccatttttcctgaaacattannnnnnnnnnnnnnnnannnnnnnnnnnaanaaannnnnnnnnnnnggggnanaacctccaaagaagccccncaaggggcccaaagcttacgcnnannnnnnnnnnnnnnnnnnnnnnnnnnnnnnnnnnnnnnnnnnngtatttccaggctccccccttgtcctgtaaaaatagggccccctatgagggggggcctattttttaatcttgggcgcccgggccggcatttatcccaccctcccnnnnnnnnnnaaacaacgcgccgcctgggggaccctttggggaggaagaacccctctttnnnnnnnnnnnnagaaattttttggggaagaaaactcccctggggaaaattttccccgccctttggggggaaaattataaaattttttttgggctgtatatnnnnnnnnnaaaaataggcgcgcattattttctcccggcgcgtatacaaaaagttttttcccctctgcggggggtagta

SEQ ID NO: 89890 - DNA, 346 bp, Homo Sapiens
ataaaacccaaaaccctcctctaggagcttacattttaggggaagagctgaggcacacaaaacttgttaggcaacaacattccctataccaaggaacacgatttagggtgacagaacatgtgtgtagcagtataactacagtgttgtggagtaattttcatattgttgtgtaacttgggaatagatgtacatggcagctcctattttccctggaactctgatcaccaaacaaggtattcaaccttgtgatctgaaccggagaaccttccaggttaaaggctaaaaatgcctttgcagactttctctcctctgctgccctctcattactgtagcctgactttttaag

SEQ ID NO: 89891 - DNA, 1339 bp, Homo Sapiens
aggtttgaggtcttgtctccaagggtgtgtgtatgtctccgtggatcagccacagggatagggattttgtttttaagggaaagcattctctaattccctttgttcatgccgagattcagttgctctgagactatggggtacaagtttgatcctccgaatctggagatgttgtagagctggaacgagtgcagagtaggaacgctttgatgcgcatgcacattggggaagatgcgctcctcagggacacaaaggccgagtggggtaaaaccacgaagggagggaagggaagtcagctctgggagcagccctcactggctggaccaaggtactcttcctggagtttgccgtgttagcaaccacagtcaccttgcagtcaggctggaatcttgggccaccccaaagtgctttgctgaaggatttagacggggatgaagtgccctccagcctcagagctagccacaaagcccccagagctgaattcattgagtatttgtgcctagggcttgggctgtttgtgtgataccggccccccgccagacaatagcctttgctgacaccccagcctacttccccgatcctgggctccctcttgattactttttgacattttccagctgtcaggcatcactgcggctagtccggcagcgacctagatagggtccacacccattcctgctcaagcatgggcacctaccacatggtttctgctgctcagcctgcctgcaactcacctcgaaggcggaccagcctgcctctgtgatgactgcagcagacctccttgggttgtaccaatgcccctcatctcccactttcacacctaaccctgactccttcaccaagaagacgggagtcggcagccaggagttcccgtggcacctctctctcttcgtggctccctgcttcccccttccctctttccgaggaagggtcaacctattctctctcaaagccaacccctaggccaattgcctggatctcctcccctctcccttctttaaacgagcttgcctccctcctgccaagtttgagggcaaggctaagaaatgtcagccacggaaacaactctattatctggtgactttgggtaatgtgaatcagtgcctgaggacctttgctgtgtccttggtacagaaccatccacttgacctaactacctcccctggccgcgctctcgctcttctcttctttgttaagccaacaactatcaccctctcctactcttcttctccctgccccctggagggcactgtgtttggttgtgcaaatgtatttactatgcgtgtttccagcagttggcattaaagtgcctttttctaataaaatcagtttattatgacaa

SEQ ID NO: 89892 - DNA, 1122 bp, Homo Sapiens
  misc_feature (601)..(601): n is a, c, g, or t
  misc_feature (796)..(796): n is a, c, g, or t
cagtcgacggtaccggacatatgcccgggaattcggccattacggccgggggagatgacagcgcagcggggattggctgaagccctaagcaacctctactagagcagagagatgagctgtgggctggtgcttctgtggtgaggtggtggtgtttctggagagcagatcagaggcaggggaaaaccacgcagaagcaggagctgaagacctcagaccggcaccagggacagcttaatgaagacaaactgaaggggaaactgagatccttagaaaaccagctatacacctgtacccagaaatactccccttggggaatgaaaaaagtactactggagatggaagaccagaaaaacagctatgagcagaaggccaaggagtcactgcagaaagtgctggaggagaaaatgaatgcagagcagcaactacagagcacacagcgatccctggccctggcagagcagaagtgtgaagagtggaggagccagtatgaggctctgaaggaggactggaggacccttgggacccagcacagggagctgaagagccaactccacgtgcttcagtccaaactgcaggggagcagatagcagggacttacagnatgaaccaggccctgcgattttttggaaaatgagcaccaggaactgcaggccaagaatgaatgcctgcaaggggacagagacctgtgcagcttggatacccaggacctacaagatcaactaaaaaggtcagaagcagagaaactcaccctggtgaccagagtacagcagttgcaggggtttgcttcaaaatcaantccttacagccttcaagaacagggagaaactcttaacaaagaaaggtcagcaaatttattaccacaaattctaagatattgctcttctcttacctgcctagaggcagcgggatggactacatgacctcctggagtcccagccagttctgggagtctgttaagtccgggatgtgtgggagctttttaaggactgatcattggctctgaggacacttcaactagttagccttctatcttgaggtatataaactgtgaaaaagggtttctattctctctgaaagcacatgtctgtgttgaacatttcaataaatttattttgaactcaa

SEQ ID NO: 89893 - DNA, 970 bp, Homo Sapiens
  misc_feature (617)..(617): n is a, c, g, or t
  misc_feature (621)..(621): n is a, c, g, or t
  misc_feature (623)..(697): n is a, c, g, or t
  misc_feature (705)..(764): n is a, c, g, or t
  misc_feature (817)..(840): n is a, c, g, or t
  misc_feature (902)..(911): n is a, c, g, or t
gctggaccggtccggattcttcgatggaattagattggggcccatctgaatgaccccattttaacttgattatcttttaaagaatctatctccaaataaggtcattatttaaggtactgagggttaggacttcaacatatatattctgggggacaaaattcaacacacagcagatgggaacatatttaataaccaaggttctaagcaaagttctgaaaagaaaactttttgtagtaaatatgctagcatagacaagttccttgtgttttccaacaggtttgcttcaaaatcaatccttacagcttcaagaacaggaaaaactcttaacaaagaaaggtcagcaaatttattaccacaaattctaagatattgctcttctcttacctgcctagaggcagcgggatggactacatgacctcctggagtcccagccagttctgggagtctgttaagtccgggatgtgtgggagctttttaaggactgatcattggctctgaggaccacttcaactagttagccttctatcttgaggtatataaactgtgaaaaagggtttctattctctctgaaagcacatgtctgtgttgaacatttcaataaatttattttgaactcngaanannnnnnnnnnnnnnnnnnnnnnnnnnnnnnnnnnnnnnnnnnnnnnnnnnnnnnnnnnnnnnnnnnnnnnnnnnnaggggggnnnnnnnnnnnnnnnnnnnnnnnnnnnnnnnnnnnnnnnnnnnnnnnnnnnnnnnnnnnngaaaaagggggcccccttagggggggccctattaaaaaataaagagcctgggnnnnnnnnnnnnnnnnnnnnnnnntggcgggggaaaaacggcggcctccgggggggattttttggggaaagaaccttttcttttcnnnnnnnnnnagcaaaattggggaaacacacccctccccacagagttttttaggctccctccgggggag

SEQ ID NO: 89894 - DNA, 252 bp, Homo Sapiens
agggcgacagagacctgtgcagcttggatacccaggacctacaagatcaactaaaaaggtcagaggcagagaaactcaccctggtgacccagagtacagcagttgcagggtttgcttcaaaatcaatccttacatgcttcaagaacaggagaaactaagtgtccctgggcgcctcctgcccgctgtcactcgcagctccgagcacgcattcacttctcatccacgccagcgggcagaagtgcccctggtgcc

SEQ ID NO: 89895 - DNA, 532 bp, Homo Sapiens
cttaatatcactttggtctccatttttcccaggacaggaaatatgtccccccctaactttcttgcttcaaaaattaaaatccagcatcccaagatcattctacaagtaattttgcacagacatctcctcaccccagtgcctgtctggagctcacccaaggtcaccaaacaacttggttgtgaaccaactgccttaaccttctgggggagggggattagctagactaggagaccagaagtgaatgggaaagggtgaggacttcacaatgttggcctgtcagagcttgattagaagccaagacagtggcagcaaaggaagacttggcccaggaaaaacctgtgggttgtgctaatttctgtccagaaaatagggtggacagaagcttgtggggtgcatggaggaattgggacctggttatgttgttattctcggactgtgaattttggtgatgtaaaacagaatattctgtaaacctaatgtctgtataaataatgagcgttaacacagtaaaatattcaataagaagtcaaaa

SEQ ID NO: 89896 - DNA, 524 bp, Homo Sapiens
tttaaatacataattctgatttggaaggcttcaagttcaagacagagctaactgtttgacaaagaattcaatttctaatccactctttccaaataggcttagttcccaaatgaaacaaaatatgaatagttaagatgcctaatgcacattcaattccagttttcgtttctcctctgtatcttggccatcacctttctgggtgtgcaaagaaaccatacaccttggtttgtcgtgttagtcataggcacattttgtgttagagttcctgcatgacagtccttccgtcttgctgggtactctgatatttaaaaatgttctatgcaccttggggagaaagaaatggccctttttggagcctcacctgtgaattgcattgttctgctgcccctcaggccctctctgcatcctggtcacctcataagtgaggatgagttttcttagtcaatgcagatcatattttaaatcatttccatgcccagtaggttgtagatttctgacaaaaaagggttaggaagcaaagtgca

SEQ ID NO: 89897 - DNA, 506 bp, Homo Sapiens
tgattcactacaggaaatcgacaagagcgcgttttcgaccgttatctcgcgaaaactaagggacccgcgcatgcgtccctagcgaagccgcagccgtttccgccctggctggcggcgccgcggacgggcgcggcttctgcgcctgcgcccggcgtatcgtctcttttccgggtgggaggtggggccttgggtgtcctgagagcctgcaggtggcccagctctctgcggtgagggcggtcgcgcctctgccgagtccacctgtttgcaaagcgcggtgcggccctactgtgtgcagggccggggcggggagggcgcagcccgaacgtcacgtgccctcacatctgttggtgaccaaggttacttatgcattaacgtttagggacaaacgtggaaaatgcattctttggtgcccctggagacatcttgtgtgtgcagaaaacactactcagaagtttatgtgcgtttaaacatgtgatttaaataatacatgatttccaaagtaaaaa

SEQ ID NO: 89898 - DNA, 491 bp, Homo Sapiens
cgacacaagtttaggtcctgcgatatcctcttcaacatctgtacttcatcggattattacaagcctcctcttcattcctaggggtagatcaggcaagccacactgcagaaaagctgcaaggtgggttcttccattcctgcacctcagtgagatgctcaaacgtagtcttccgccccgaaagggagactggcgacatccgaggagttgtagaaggttcacttgatctccttcgacgcttctattccagaatctcttaaccttagcggtggaaaaaataagggtctcccacggacgtctgcaaacagggaggaaggtctcccacttcgctgggaagccgaagcagcggcgctgggcgaagtagcaggaaggagttctcggccgcccgcgcttcccggcgctgcctggcaggaacctggcgcccggctgagtcccgctgctgcccactcgacggctggcgcgaagggcaatagcgtccgaaacacctaagtccg

SEQ ID NO: 89899 - DNA, 812 bp, Homo Sapiens
gccgtcccggagccctggggacgtgcgctcctgcgagtggaccgtgaattcagttaccttgttccctgttgctagtttctacgctaaataagaagaagaagaagaaaaagccatctttaatacttaaggtccacgcttctcatacagtactagcatttaatggatctcgaagacaaggaaaatgaagttaatgccctggatggtaaaccctactttcatttacatactgtgtgggcagatagccggctagtacccccagcctgggactttgtccctactttaatatagtccgtctgtaaaagtgccgtggatttctaaagacggattttgggtcccagatcctctactctggattttaagttttatacatttcctctgcaatacttcagctaaggcagcaaaagcggaggtctccatacaacgaaagtttgtgtagagtttcagtcttgttacttagtcaccagtatattggggttttctaatgaaacttttgaagggcaaagtgtttccctgggcctgagaagttacctgcattgaatcaaataaacacatgcctggggcaatccttggatctttcttcattggtgaaccaaatggttgaaatactatcacacagtttaaaatgcctgtgggagcttcagataccttctcggcacctgaatggtggtcactcttgtttattctttggatattaccactttctttgacacttgtgatttatattaaaaatagttcattacctaccttcccacagagcccctccctaaggggtgatccacatctaaaaataaaatactcattaagcagtgaaa

SEQ ID NO: 89900 - DNA, 560 bp, Homo Sapiens
atgagtggatcatgatgaccgtattgtagggacttgccatagtatggctgcttcccgatctactcgtgttacaagatcaacagtggggttaaacggcttggatgaatctttttgtggtagaactttaaggaatcgtagcattgcgcatcctgaagaaatctcttctaattctcaagtacgatcaagatcaccaaagaagagaccagagcctgtgccaattcagaaaggaaataataatgggagaaccactgatttaaaacagcagagtacccgagaatcatgggtaagccctaggaaaagaggactttcttcttcagaaaaggataacatagaaaggcaggctatagaaaattgtgagagaaggcaaacagaacctgtttcaccagttttaaaaagaattaagcgttgtcttagatctgaagcaccaaacagttcagaagaagattctcctataaaatcagacaaggagtcagtagaacagaggagtacagtagtggacaatgatgcagattttcaagggactaaacgagcttgtcgatgtcttatactggatgattgtg

SEQ ID NO: 89901 - DNA, 458 bp, Homo Sapiens
tgataaaatctgcaacactcctgctgttggctggagcatgtgtctagaggtgggggtggctgggtttatccccctttcctaagccttgggacagctgggaacttaacttgaaataggaagttctcactgaatcctggaggctggaacagctggctcttttagactcacaagtcagacgttcgattcccctctgccaatagccagttttattggagtgaatcacatttcttacgcaaatgaagggagcagacagtgattaatggttctgttggccaaggcttctccctgtcggtgaaggatcatgttcaggcactccaagtgaaccacccctcttggttcaccccttactcacttatctcatcacagagcataaggcccattttgttgttcaggtcaacagcaaaatgcctgcaccatgactgtggcttttaaaataaagaaatgtgtttttatcgtaa

SEQ ID NO: 89902 - DNA, 543 bp, Homo Sapiens
ctgtgattacaaacacaattttaagagtccaaatttagttagctgtgtaaaaacagccaagcctatgtactttaatcaaaatcagtgcagtctcagtgtggtctttactgccatgagaaatcgccagcagtgcttacaaaacaccacggatttcttggccccacccaggcccactgaatcatctctaggggtgaggtcagtatcttatttttaagcagctttgaaaagcgacaggctggttctaataaaccagcttcttcaatctgcaggattttgatagaaaactccctcctagtgtatggaatttaactggaaactcaagttccagttgatcagaatttgactgacatgtcaccctatttttcagtaggaaaatgcttgtggtttcttcccttcctccaggtatcatgttctcttattccaccaccacttccctatcctgtagctggtagtttggttacccttgaaaattgtaacctgattagcccaggtgggaagaagagacttccaggtaaacgctgaatatgctcaccttggaaaagc

SEQ ID NO: 89903 - DNA, 489 bp, Homo Sapiens
gcggccgccagcagacgccgtggcgtaagcgcacccgtctcgcggggtctcctggggcctcggcgagagacttcggctctcgcgagagaggactgcgcctgcgcagagccgaggacgcgtccggcgccgagattcaaactagtggcgggaggctgtgagctgagcggtggggtctgcgtacgcctggagtccttccccgctgtgctcagcatggaccctatccggagcttctgcgggaagctgcggtctctggccagcacgctggactgcgagacggcccggctgcagcgagcgctggacggagaggaaagcggtgcgtgaggcgggcggccagggcacggtgcgtggggtgcgccgcgggcggaggggcgtggcgagtggacggtatgtcccacgggaaccgccaggcactgacggcgtggacggctgccaccgaggcgcagggtgggtgctgcgcgtctcactgctcggcgtttggcgttagcgtag

SEQ ID NO: 89904 - DNA, 1529 bp, Homo Sapiens
  misc_feature (63)..(73): n is a, c, g, or t
  misc_feature (85)..(120): n is a, c, g, or t
  misc_feature (123)..(157): n is a, c, g, or t
aaagcagttggtaactaagcaacctcaacttcaattaaaggggcgccgccccttcaccgggcnnnnnnnnnnngttagcccctgnnnnnnnnnnnnnnnnnnnnnnnnnnnnnnnnnnnncgnnnnnnnnnnnnnnnnnnnnnnnnnnnnnnnnnnncagtcgacggtaccggacatatgcccgggaattcggccattacggccggggagggccggcggctctggctgcccggcggttgagagcatggcctctccaggggcaggtagggcgcctccggagttaccggagcggaactgcgggtaccgcgaagtcgagtactgggatcagcgctaccaaggcgcagccgattctgccccctacgattggttcggggacttctcctccttccgtgccctcctagagccggagctgcggcccgaggaccgtatccttgtgctaggttgcgggaacagtgccctgagctacgagctgttcctcggaggcttccctaatgtgaccagtgtggactactcatcagtcgtggtggctgccatgcaggctcgctatgcccatgtgccgcagctgcgctgggagaccatggatgtgcggaagctggacttccccagtgcttcttttgatgtggtgctcgagaagggcacgctggatgccctgctggctggggaacgagatccctggaccgtgtcctctgaaggtgtccacactgtggaccaggtgttgagtgaggtgagccgcgtgcttgtccctggaggccggtttatctcaatgacttctgctgccccccactttcggaccagacactatgcccaagcctattatggctggtccctgaggcatgctacctatggcagcggtttccacttccatctctacctcatgcacaagggcgggaagctcagtgtggcccagctggctctgggggcccaaatcctctcaccccccagacctcccacctcaccttgcttccttcaggactcagatcatgaggacttccttagtgccattcagctctgaggccagagcatggtcctccacccttcctgccattctgccctgggctcctcaggtagttggaattcctgacttaggacttggggttgggtccaaggtgcttacatcccaggggcctcatgcctaagatagagggtgggagcgaacccacatgaaccaatacagcccagctccaactagatccagattccaggtttcttgctttctttcttgggtccctcagttcctctcctggggttccccaaactcctctgcacaaaaccaaacaacagtgatgcatccctggggcaaagtattattaacccctctggacaacagcagctggagaccgtgtcccggggccgttactgatctcatttagcctgaatattcccggagactggggcttgaactaattgtttgttttcaccagttcttccaactgggccgcccgggtttttcccggggcctaaaaggtccgccgcgtggtatgggcctcaaggattaaagcccctgggcgaaggaccgggtttccgggagg

SEQ ID NO: 89905 - DNA, 639 bp, Homo Sapiens
tcggcacgaggcaaggcctgcccccattttaaatccagcccccacctccccctccttcccaattcgccctcctcatcctgcccaaacctgcttcacaccccgactcagccagcaaacaggtctccctttccttcctccaaaagggaaggggctcccccagggcctccgctggagtggttctgggtctccaaagtcggaagtgcaatcgtgaccaactctcagctgcaccctctgctgcctgcagcgggtgtttcacttgctcagcaggaatcctgcccctggtgacacctccaccccaggaggccagcaagcccctcagggagcaaaaccagttgctctgggagacctgggccttccccaccgcctccccctgtccacagagaggggcggacatgcggcaccaaaaaccgtgtttctgactctggcatcaaaggtcatcccttgtttcttcctcaagcgacgttcagtgagccctggctaggggccaggtactgtgctgggacaggcaccggtgccacagcagcaaggaaaacagacaaaaatccctgcccttctggatattacatcccggcagagagacagagacagcgttccagttacttaataagtaaataaaaatacagtgtgtctggtgacaaa

SEQ ID NO: 89906 - DNA, 616 bp, Homo Sapiens
  misc_feature (259)..(272): n is a, c, g, or t
tttgctgacatcagtcgtaggaagtggtgtgcacatgccgatggaactttacatggaacatggagctctagagagcagagagtgctcttggagtgaggggtggtctgcggtggcccaggcaccccctggctgtccgtgaaatggctttgaaatgagcaggcactgttgagggcctcagtggctttttggtatttggctgtcttttcacttatgactcttgggtaatggcaagataacttttggggaaaatgttagtttnnnnnnnnnnnnnntcaggccagcactttcactcattcctgtctgagctggtcccttcctttggccaaagctgaactaaaccaatggccttctcagactcgacttccagacagaggagccgacattggggcaaatcagttggtggtgtaatttcctgtgatgttaactttgggaacttgaacttggagtgggagctagcattttgacatgtgtccctctaacaggacttgcttgtgtggaaacagacccccacatacatggctgcgccattgtctccaattctggatttttccacagatgacttctcgggtgatctggtggtaaaggcacaggtcttctagccaggccttcttggcct

SEQ ID NO: 89907 - DNA, 425 bp, Homo Sapiens
  misc_feature (122)..(122): n is a, c, g, or t
gctaacatgccaggtgcccctggcagcctagaaatggtgagagtgccgggtccgacatcccgagaaggggaaggggctgattggaaccggtgggaagtggctgtggcgggactccggcctcnccgcagtcagctccacaatctgcgcctggagttctttcccatctcggcctcagtctccttcagccataagatggcgaatgcgctgactgcgggaccctgggcgacctgtctcctccatgcgctgtgactgtgccctggcctggagccctctctgggccgctctgcacccgcatggccgcgtctctccgagattgtgcagggaccacgggaggggcgtcaggggagaatcctgactccggatgcgggttcatgaatgggaagagctttggtccagtgaggtttccagtccctcttttcttctgt

SEQ ID NO: 89908 - DNA, 594 bp, Homo Sapiens
cactggcagactaatgataaagacactggggtgaacctagccattctaacgggagagactcccagctgacaccaggcagtctaatgatagagacacttgggcgacaacaggcattctaatgtgaaagactcctggctgactcaaagctgtctaattatagagacagctgcatgaacccaggcattcgagagaaagatacccctggccgaccccaggcagtctcatcatataaaaacctgggcaattccagacattctaatgggagagactctcggccaacacaaggcattctaatgggagagattccttgcagacagcaagcaatctaacaatagggacacctgggcaactgaaggcattgaaatgagagagactcctggtcaaccccaggtaatctaatgaaagtaaaaactgggcgacccaaggcattctaacgaaagatactttcagccaacaccaggtggcctaatgacagaaacacgagtgacccccagaattttaatggaagagactcctggttgagcccaggcagtctaatgatagagacacctgtgcaaccctatgcattctaataaaaaagagtcaccaccgaaa

SEQ ID NO: 89909 - DNA, 477 bp, Homo Sapiens
  misc_feature (317)..(365): n is a, c, g, or t
ttgggcgaggagcagcgaacagggcctgtccatctcagacgtcagccccctgaaggcctgagcaatgggcaacgtgatggagggaaagtcagtggaggagctgagcagcaccgaagtgccaccagtggtacaagaagttcatgactgagtgcccctctggccaactcaccctctctgaggcagaactgagcttttccaggcctcttatggaatcctgcagatccagtggctgcagcttcaatcccagtgctgcaatcacacatccattctgccctgggggaccctggagcctacttgtgcgctttgcatttcattgnnnnnnnnnnnnnnnnnnnnnnnnnnnnnnnnnnnnnnnnnnnnnnnnnatgctagatgttagatgtacaaagaagacagttttcatcctctaggaactcataggctaatggtgagacacacagacaaacatcattataataaaatatgctaagagaaaaa

SEQ ID NO: 89910 - DNA, 1013 bp, Homo Sapiens
  misc_feature (403)..(403): n is a, c, g, or t
  misc_feature (405)..(408): n is a, c, g, or t
  misc_feature (410)..(410): n is a, c, g, or t
  misc_feature (414)..(415): n is a, c, g, or t
tcgcgggcgcaggacggccgtgttacggcgtccacgcggggcgaacggatacgtagtgcggagacaggtggccgacggcccgctgaaagaggtaacggcggcgccgcccccccttgcttctcgcggcggccgggcattacatcggcgcccgtgcgggatcgctataacagggcggccgcggggggggcagaaaggcagtgcttgacgcccccaacaggcccctctctcctgcggggagaccaccgcaccacacgctctcttggtcgtggggggggaaggcagacacagctcggccgcgggggcgtgctacccactcgcccaacgggcacgcccacgggcagcgaggcgcgttccgctgggttcgcggcgccggggtcccccgcagggcggagtccgttgggcntnnnntnattnnaaccctcaccaccacccccggagctgatggatgtgagcctggtgggcggccctgctgactgctccccacctcacccagcgcctgccccccagcacccggctgcctcagccctccggactcggatgactggaggtcgtccacccctcccgcctcctgatgaccctgccactctggggcctcacctgggcctccgtggtgtaccccagagcacagcagccagctcgtgaccctgccccctccctggggcccctcctgaagccataccctcccaccatctgggggccctgggctcccatcctcatctctctccttgactggaattgctgctacccagctggggtgggtgaggcctgcactgattggggcctggggcaggggggtcaaggagagggttttggccgctccctccccactaaggactggacccttgggcccctctccccctttttttctatttattgtaccaaagacagtggtggtccggtggagggaagaccccccctcaccccaggaccctaggagggggtgggggcaggtagggggagatggccttgctcctcctcgctgtacccccagtaaagagctttctcacaaaaaa

SEQ ID NO: 89911 - DNA, 1078 bp, Homo Sapiens
gggctgctgcagatgggcatttataacggccagctttttaacaatctggggctgtgttgcttctatgcccagcagtatgatatgactctgacctcatttgaacgtgccctttctttggctgaaaatgaagaagaggcagctgatgtctggtacaacttgggacatgtagctgtgggaataggagatacaaatttggcccatcagtgcttcaggctggctctggtcaacaacaacaaccacgccgaggcctacaacaacctggctgtgctggagatgcggaagggccacgttgaacaggcaagggcactattacaaactgcatcatcattagcaccccatatgtatgaaccgcattttaattttgcaacaatctctgataagattggagatctgcagagaagctatgttgctgcgcagaagtctgaagcagcatttccagaccatgtggacacacaacatttaattaaacaattaaggcagcattttgctatgctctgattgttccttagaccacatatgttcttatgaagcagcattatgcaaggggaaaaaagcactatgtctgtgtatgtatgtatatagtgtaatacgtatattttaacaaacctgtccttgatattagttaaggtgacacataagggtgacacagaatgtgtaatgcaaatttcatagtaatagtaactttataaaataatattataaaatacaggatttaaacctttctaaatagatcctgaaactgtctctcacattatatagtagatgtttgtttataatgtttacaaaacattttggtgaatttcctcaatgttttataaatgtacattttttaagtccttaagctgactcttagccatcatgtagcttaaggagtctgaaatctgccattaaaactgcacctttaagccaggtgtggtagcatgtgcctatagtcccagctacttgggaggtggaggtgggaggattataaatagagactttccttaagactttaaaaatgtatttaaaactattttttattaaatactttgtgatttcctattaagctttaaaataaatcattgtgtaaaacaccaaa

SEQ ID NO: 89912 - DNA, 1299 bp, Homo Sapiens
  misc_feature (744)..(754): n is a, c, g, or t
  misc_feature (758)..(766): n is a, c, g, or t
  misc_feature (825)..(833): n is a, c, g, or t
  misc_feature (890)..(890): n is a, c, g, or t
ctcctccacagactcctccctggtcaccactagtgatccaccttatggatctcccaaggccacctctgcctctgctctgtgttgtattatttggggacctgtggtctggcatgcattgtacttggtgccccaaagggctgtggcatctgataagtgatttatcctcaggcacagatttgcactatgtcaccactacttgtatgtagaagtgagtcaccggctggcaaatgggcatagctgctgggcagtggatgcagctccatgcatgttattctcatttgatacaggatctcattggcttctcacagcaatcctgtgcactataggtattgctcccgggaacagatgaggaaacaggagagcgcgagattacagcaatttcgtaaatgggaggatctgtgaaggtttcagacatacaccctctctcatatgtcaaggatatgaagtctaatgaatcccctaaagcagcaggggttggcaagctgcggccctggggcccaaatcagcctactgccctgtttctgtaaaaaacccccatgaacgcgggctcccaccccttgtcggccgctctcggcccctcgaaaaaacgctctcctaacaccactccgtttttggcgccgcccggaccccccctatggtaaccgcggaaacattgggtccctacctttggtttttcctcacggaacaccccttggcccgcccgaaaattaccggggcctgtgggattttccccaaacccaaatnnnnnnnnnnnccannnnnnnnnggtgcgtgcacaacaccccaaaaagcgcggctttccgtggcaagcaccagaatctttgnnnnnnnnnaaagcggggaaaattttgccccccgcaaagggagcccccactctataaacgtggggngagattccccgctcgccataccaggtggcacagtcttccggaaataggcggagagctctcccgtcattttctcctccgactttttatacggcgcgcccaacccagcactcgtgttgcacaaccttcctcttgtccgagagataaccgcgtgggtgcggccaactggcccctgttgtaagacgctatgctcctcggagcgagacaaattgtgaaagaccgtttcttcccccacaaaccctgtgcgttttgtagcacgctataccccccggaacacggccgccttatttgtgcctcgcccaataaacgcgcctgtgccctccccgttgcggcatatataacacacccctctcgcacttcttgttggggcaaaacccttgagctctcgccacaccaagactttttatatatt

SEQ ID NO: 89913 - DNA, 608 bp, Homo Sapiens
tgtataaatatgaccccaaatcaacaagcttagattacaggaaataggacttttaacttgctcacctaacaaaaaaggaagttcatctttttcatttttcttacacttttataatatgcatttctaaattttgatgactgtagttaatattaggtattatgtaccctactttgttccaggcacttttaaaatgtactaacctttacatgtataataatttgttttaaaactttaagagacagggtcttgctatgttgcctaagctggaaagcagtggctattcccaggtgtgattccactactgatcagaccagtatcattttaagtgacagaaaaataaaattactgaaagaggggcttgctttaaattatttaagcttgtttgtattacctactatcttagagaaagaggaataaagcttatcgttgctataggaaacactatgcataaagtctctccatcttatctatggagcctcctatctttataaactacattctgaatacattgtgtttttaccatgaagataatctttctataatcatttatcaccaaactacaagacatagcagccagatatcaagactgttaaagtatatcactggtt

SEQ ID NO: 89914 - DNA, 624 bp, Homo Sapiens
gacgactggaagtcgaacaccggctgaagcactgtgtggccgacagcaacatcgtgcggtggtttctgccaagcggtgaagacgttcgatgaagaaaggaaggccaggctcctgaagtttgtgactgggtccacgcgagtcccgctccaaggcttcaaggctttgcaaggcgcggcagggccccggctgttcaccatccacctgatagacgcgaacacagacaaccttccgaaggcccatacctgctttaaccggatcgacattccaccatatgagtcctatgagaagctctacgagaagctgctgacagccgtggaggagacctgcgggtttgctgtggagtgaaaagcaaccaaaggcaacagagtctagctcatggccaccagaccaaaagcatccagcttctgtgcacctcctgcaaagctggcagaggccctggaattccagatcacctgaggggaaagggttgtctctctcctttctgttgggggagggggatgggggacttttgttggtggctcccacccatatatccctcctttaccatagtactcccacccacttccatcacccatccaataaaatgcagccaggtttagcctttggctttggtcacaaaaaaaa

SEQ ID NO: 89915 - DNA, 366 bp, Homo Sapiens
ccaggactttgagagcagcctgggcaacctagcgagatcctgtctctacccaaaagcaaaaaccaattacaaatctttgtattagaagcagaaaaacacaggggacatggagaactcatcaccaaccctgccccaccccccattcctctcccctcccacatatacttctcactgcctgtccttggccttgaggttggtcctagggctggactgcccacacggtgactctcttttgtcctttttcagctttaaccggatcgacattccaccatatgagtcctatgagaagctctacgagaaagctgctgacagccatggaggaacctgcagggtttgctgtggagtgaaagcaaaccagtgggagcc

SEQ ID NO: 89916 - DNA, 533 bp, Homo Sapiens
gctgttacgaatatctacaagtcaattctatcttaaatctgcttctggagtatcctgaattctgctttttgtcatacagactttagaatcagtttgtcaagctccttgaaaaactcatttgggatttgtattgcaattaccttcattgtgtagtggagaactgccatcttaactcgagtcttttaatcattgaacatggcaattttaaaattagacatttttaaatgcctgtcaataaagttttgtaattttctacagaggtcttctataccttttgttaagttacctaatttatatttttaaaggaatatagtaaatggtatgttacaaaaatcattttctaacagttcatttctgctggaaagaaatgcaattcacttttgtatattgatagtcatattatctgttttcacattgctataaatactggagactgagtaatttataaagaaaaggggtttaattggctcatggttctgcaagctgtacaggaagcatagtggcttctgcttctgaggcagcttcaggaagct

SEQ ID NO: 89917 - DNA, 959 bp, Homo Sapiens
gagcttgcggggtttgcggttgatggacccgactgaagggctggaggcggtgtatgccgctgttcttgctgtcgctcccgacacctccgtccgcttctggtcatgagaggagacagaggcctgaagcaaagacatctgggtcagagaaaaagtatttaagggccatgcaagccaatcgtagccaactgcacagtcctccaggaactggaagcagtgaggatgcctcaacccctcagtgtgtccacacaagattgacaggagagggttcttgccctcattctggagatgttcatatccagataaactccatacctaaagaatgtgcagaaaatgcaagctccagaaatataaggtcaggtgtccatagctgtgcccatggatgtgtacacagtcgcttacggggtcactcccacagtgaagcaaggctgactgatgatactgccgcagaatctggagatcatggtagtagctccttctcagaattccgctatctcttcaagtggctgcaaaaaagtcttccatatattttgattctgagcgtcaaacttgttatgcagcatataacaggaatttctcttggaattgggctgctaacaacttttatgtatgcaaacaaaagcattgtaaatcaggtttttctaagagaaaggtcctcaaagattcagtgtgcttggttactggtattcttagcaggatcttctgttcttatatattacacctttcattctcagtcactttattacaggctagaaaggtgtcaactatgacaaaccgtgaagactttttccttattctatgaagggaagatctaaaatccaaacaggtttaaaaagtctctttaagcaaaatgatcctccattccattattgtgaactctgacatcctgccaaactcatattttttacatatcaaaataaaatatttgtagcaaattaaaaccctttattaatactttaaaa

SEQ ID NO: 89918 - DNA, 567 bp, Homo Sapiens
caagttgctgtttaagtctaggcaaaagtgcttaaaaaaatctttcactatttacagttaaaaccagaccacataaatgctcaggacatcttacaacgaccctccgccagtgcttccaaacagatacagtaaacacccagcaggccggttctcagctcttactcaaggcacccggaagctcaggaacttgcctatagcggtcatctgattgttaaacatgattcatgaagacccatatctgaatacaactgctcagtaaatacctgttcatctcagggcttggtggtcatccaccgtgtggccacattcccctctgtgtgtcctgatgaagccccccattcaccacacacacatccacatggctagcatgagatcatttctgctaatatcacaagaaaaaccaacactccaacaaagtttgacttggtgatgatgagtgttgctcccatcaggcccaacctctctcgacaacgtcacaaaaattaagcaccacattctcatttcaaagaaccgaatgaatgcaccagaatttcagaacagctatattaaagtggatgaagaggggag

SEQ ID NO: 89919 - DNA, 484 bp, Homo Sapiens
gcctgctcccttgtggctatcactgacccaactattaagccttcttatacaaacagtccctgacttactgttagacttacaactttttgattttacagtggtgcaaaagcaatatgcattccatagaaactgtatttcaaattttgaattttgatcttttccaggctagcaacatatgaagaccaaccttctatttttaaaataggctttgtgttagatgcttttgcccaactataggttaatgtaaatgttctgagaatatttgaggaaggctaggctaaactgtgatctttgggagcttagatatgttaagtgcattttcaacttacaatattttcaacttacgatgagtttattgggatgaagcccgttgtaagtaaaggagcatctgcattaagctaaaatccatgtctataacttcctcagtaatatcaagtttgttccttggagccagagaataaactgaatccctttccacgtgaaa

SEQ ID NO: 89920 - DNA, 341 bp, Homo Sapiens
  misc_feature (178)..(213): n is a, c, g, or t
gctggattagattttcaagtaaactgctttggaagatgatagtgtctccctctatagcatgagcaggtttgtttgctcttaaacatgataataacttctgctggggcaaaggtaaggccgacttaactgaccattataaaagattcatgttggggattcgtttttgtaacacaacccnnnnnnnnnnnnnnnnnnnnnnnnnnnnnnnnnnnntcgtgcgtgcttgcaggtgtcatctgccccccttcttatttttctatgggaattgggaatctggtgcaaatgctgatactgtagctactgctattgctgtgagtaataaactaggctttgtctctaaa

SEQ ID NO: 89921 - DNA, 903 bp, Homo Sapiens
ttaccatcagccctggtctaaagagtaaagccactactgcacttagtgatactggtaccttctcacaggctcattcttggtggccttagtgaattgtcactatttcatgacatattcatcacagtatatccatcacatattcattcatctgacccttatgaaggtgtgatggttaatttcatcacagtacatacatgccattgtatagcaggtccttaactaatatagcaacaccaacgttctcaggcagaaccaatagaccctgttgaagggcaggcaagcccagagcaaaccatctatatgcagttcttttaacagcctgcaaggcactgtaagattagggagacgtttatcgaattatgttctgtggaaaactagttccataggatatgaactgatgtcaggagaaaaattaaattagaaatttgcttcagtgccagattctcaaagccattcgtatgtgaatgtttagtgcaactctccaaaagagatgatttgatgtgttacatgtggcagtagtatgatgtgcagcccagatcccccccttcaaagaacggcttgctccccacttgctgggtgtgatgttagcaggcagcctgcagctgtcagcccttttcaggaattggcatagctgtagaaaaccacttcacctaaggtcacacttttttgtggagtggcccatagccaaggattgatcagtgtggagatacaaagttgttctcttgcccatctgaggacatctccgagggccgttttaactccagagctccctgtggggttggccaaggctgtcgttggacctacattataactcattttctcccaattccgcttctctctctctttgaacaaatgtttggcaaaaggcacttcttaataaatatcctgcaattaaagtaaaaa

SEQ ID NO: 89922 - DNA, 482 bp, Homo Sapiens
gtgtaaaataaaatgtttcttggacaagaaatcccctgaaattcagctgttatagtgcttcactgtttttgcactgatttttctataccttaggtggtcagaagacaaccttgaatgcactcatagagaaaactgttactttctgacgtaatgtaattcaggaagacagacgctgcaatcacagattttaaaaaattgtttgcacttaaaaatagttgaatgctggtggaaagttactttgcagatgggtgtaaggactcatggccctctgaggtgcggcgtgaagatgccctttttacccgttgacgtttattttacgtaaaataaactgttgtttccaatgcaatcaactctgtattatatgtataaatattgtaattctgcaattggggaaaatagttacttcactagtaattttcatcatttaagagtgatatttctaattcacaaaagttaatattaaaactatcttgaatataaaa

SEQ ID NO: 89923 - DNA, 351 bp, Homo Sapiens
gagaagtgctatttttattcttatgtcaaaaagagtccccaaaaggatagcttttcaagaaaaagggtgctctgccccagctccttcctgtatatttgactccatggttcatttcaaaaacatttccagcaccacatccagcatctgtggagtgatcaaatgtgttacccaaataagaattgggccaaaaaaattcatcaagaatctaatagcacacagattccaaacccagtgcggctgaccccagaacagctttcagtaggaaatgagcagatcaggaatgaaagagacaataaaggaactgagctctggattacttaagaggaggaggaaaacctgttcagaggcaaa

SEQ ID NO: 89924 - DNA, 638 bp, Homo Sapiens
gcggccgcgtccaggtgcggagtccataccggagcgcaatggcgtccaaccccgaacggggggagattctgctcacggaactgcagggggattcccgaagtcttccgttttctgagaatgtgagtgctgttcaaaaattagacttttcagatacaatggtgcagcagaaattggatgatatcaaggatcgaattaagagagaaataaggaaagaactgaaaatcaaagaaggagctgaaaatctgaggaaagtcacaacagataaaaaaagtttggcttatgtagacaacattttgaaaaaatcaaataaaaaattagaagaactacatcacaagctgcaggaattaaatgcacatattgttgtatcagatccagaagatattacagattgcccaaggactccagatactccaaataatgaccctcgttgttctactagcaacaatagattgaaggccctacaaaaacaattggatatagaacttaaagtaaaacaaggtgcagagaatatgatacagatgtattcaaatggatcttcaaaggatcggaaactccatggtacagctcagcaactgcttcaggacagcaagaccaacattagagtcctacgaatgcagatctttcagccagtccagact

SEQ ID NO: 89925 - DNA, 473 bp, Homo Sapiens
tcatgtttctatcttttttcccctccagtctgagatttctgtgtggctgatggagagtgtgatttgggcgtaggtcttatttgcaaacctgctcatgttctaagctttcttcaggtagtaccacctgtcatcgcttctgcatatgatttaaatggatttttgtttttataaaagtatcataaatttagagataaaatggaggggacccagctttctttacaatgtggatctacctcagttaaacagttgggtgctattactaagtctgtcaaattaaattggaaaaagtaaccaaacagtgagatacaactccacatgaaacttgaaattgtaatttccgtttatttaatgatatttttatttatttgtgccttttatgttgaaccccaatgcattgaaaaaattcagtatgaaacagtacatattttatttatattacaggtgggagaaaagtccaattggttcatggaatt

SEQ ID NO: 89926 - DNA, 561 bp, Homo Sapiens
  misc_feature (72)..(72): n is a, c, g, or t
aataggttagctgacatcgaataatgtaataggtttgctaaagaatctaaccatcaaatataatattgtttncagggagggtgtttgttcagagttgcctgttagtagaatctggactgtccatcccagccacatcccacctactggacagtaggggtagagatgccaccagactacaggtgaccagattggcctgaaacatggtgtccagtaaaaacggggaggaataagtccatgactgccggagagcttggtggtaggaggagggtaaaggagggtgagggggcctctcatgggtcagaaacctccagggacatccctcagctggtaactctgctgttgtccggagggttcaggcttggtgtgccttcttctgtttgtctgacttttggctcctatggttcatctcctgccctgcccaccacagaaaaggatgctgctgcacagcttctccaatgtaccagtcattgaggccagcgcgcagcacttttaatgtttttagtgctagtaactgtgttttaactctccaggaataagctgggaggttagaaaacaagaaaa

SEQ ID NO: 89927 - DNA, 584 bp, Homo Sapiens
aggactttgtcataacctgtagaaaacattttcccaatgtctctttaccacattggattataaattttctacattcttcttcttcttttactgggcatttatacaacttgaatacaaaatatgggaaaataattttaaaatttaattttcaccatccttgtcagacaaataacattcattatgaatcctctgaaaattccactgttggtacctctatttttccaggctttttccctcaccccttttgtctccatttttattcctcacttattactatctcaataacatcatttctacattttagttattatatcaaaaagaagcaaaaatattaagaagaaactgaaggaagagcaaaactcagtaacagaaaacaaaacaaagaatgcgtcacataatggaaaaatggaagacttgtgaacgcagacgacagaggtgccggctgaggcagaggagaaactatgggggtgctgggagactgagcctgtgggcgtggcttgctcccagagaaccttatggaagaggacatcaaagaaagaaatgccagacctgtatcccagaaaataaagccacataatatagca

SEQ ID NO: 89928 - DNA, 341 bp, Homo Sapiens
cagtatttgtagcagatgttacaaatgtcataacacgaagctttgggatcagactgaaaactaaaaaatcaagataccagatgtggacgtcttccttttaccagcaactgcaactgacactgcactatttcagtggtaatctccacccccttcctactgggtggaatcatgccataactgtttgcttgctgctgaggtcagaggaggtgacaacagtaaagcggcactcattggaaaggcttttaagacagtttgcaaaatgaaagtgtaatcatcctttcccctcttgagagagtgtaccaaatctaacccttattaaaaatttaactgctcaaaaaaaa

SEQ ID NO: 89929 - DNA, 454 bp, Homo Sapiens
cagtgcccgagtcagcggtagcaagactgatgtgatcataaaacatgacatcaggctcgtctgaagttcttgtgtgaaattcctagtgagtgaggaggctcagcttaaagccatctgcagagtggcccctcattgtggtcttttgctgggaccaatgcaagagactagggagagcaaaatgtttgcttatggctagagactatatccagccctaatgatggggaaagttagtccttttcgggtaatcttttatgaattttcacctgatgaccgttatattggtttgttatcatgttacgataactgtgatctcatgaccatgttgctgtatcagaaaaaatagtttgacaaatggtaacaacaacctgatgttccccctttagacctttaacttctcaaaattttggtaagtttccaaattctttaataataacttaaaactatttgaataaaa

SEQ ID NO: 89930 - DNA, 572 bp, Homo Sapiens
  misc_feature (45)..(45): n is a, c, g, or t
  misc_feature (174)..(249): n is a, c, g, or t
ctgtgttggtaatgcgaatctttaaaaaaatttgtatatttcatntatgttgttaaactggttagcataaagttgttcacaatattcccctattttctgttcttttaatttctgtaagagctacagtaatgtccctctttcatccctaatgttggtaatttgtatcttctttcnnnnnnnnnnnnnnnnnnnnnnnnnnnnnnnnnnnnnnnnnnnnnnnnnnnnnnnnnnnnnnnnnnnnnnnnnnnntgtaatactaccttagaggacagcagttcctaatacctacttttattatgagtctctgccatttataaagaactgtggacagcacagggaatgggggaagaaaactctggtgcagcttgaatcttggtagcaaaacagtgacttcatcagaaaattttgtcactctctattagatataatggagtttgaccatttggaatttggaatttttcaaatgaatatgacaaaaatttaaaaaactcttgtattactatgtgataacacagatctttacaactttatgtttgttttatcaattacatattaaagatagaaaatggaaa

SEQ ID NO: 89931 - DNA, 457 bp, Homo Sapiens
tccccaacagccaaccttacttgagtaataggtttcagggaggccaaacgtgtgatttttggccttcttacttgtaagtgacagaaattcacaagagttagtataagcaagacatttattttaatgatacaggggtgtccccaggaaagcagagatgaaatgtaactaggccttcttaaaggtttctctctcagtgtttctcagctctgctctagtgcacacagttggaaacatggtgctgtcccccaccctaaaagttctggagctttattcttcacagtctatcacacagagagtcacttctctttctcaggcctgactgcaaaactctccattattcttggcctcacttaggtgctcacccactgtgtccagggatcaggattacatgtatgaaggttgggcgcatacgactataccccttcctccccaggagtacattgaaaagatgataaaa

SEQ ID NO: 89932 - DNA, 567 bp, Homo Sapiens
tttaatagacagaagaatttaatacatgtgatgctttgccttccatttacactatcataaattacaaagtattgttcacttcacaaaataaaaccatttccagataattttttgacagtatcaagaagtacataaactacaacaaacaaatctgtacagttgggaggagggataatagcagggaagaggtcaaacctccctgtgccaatggagtccatctgcatagcccttgggactgtccaggtcaacagtcacacaatgatgctccacgtaaaatagtcattctcttctgctcactccaaagcaagactggtgagtttacacaaatcatctcaatcaaaggaaaagacattgcagttggattttttaaaaatctagatttacagtttttgatgttttaaatatttcacctatgttacaaaatatagaaatcttggtgtgaaaggctcatgctaagataaatataaccaagtgactggaactgtagtaataaaatcatattatccacacagagctacttttgtcaaggaggaacaaatatttggtaaaaaccaaccttattctcac

SEQ ID NO: 89933 - DNA, 438 bp, Homo Sapiens
tcttgttgggagagcatgactgtatggacatcagtcaaggaatgggcatatctaaacatactcctagggcgcatgttttcttctgccaaagaattaccttccgagaattctaggatggttatatgtctagaagaccgtagccatgctatgttaataacccaaaagataaaaggtacatacaggcttttgcatttctgatgactggatggccccactggatccatgactcttgactcaactggtcctatggccactactcagaagtggactcagcttcaggaaggccattttccctatccctatgattgctttctcaaccaatcagcagcacccattccctagccccctgcttgccaaactatctttgaaaaaccctagcctccaaattttcggggaggttagtttgagtagtaataaaactctagtctcccttctaaa

SEQ ID NO: 89934 - DNA, 461 bp, Homo Sapiens
agctgcaaacatagataagcgagctggaatcttgcacaggggaatgtcagcagctgtgtcaatagaaaagggctacctgtgggccaggcatgtccaacatagaggctccatcttccctttttttgtttgttaccacatgtacagtaaaggaatgggcagtgtggcacaggccaggcagaggacccacctgcataataaaatttggttaggggtgaccagcttttcataccctatgcaaatggcacagctattcctaaccagtttttagtgtctatgcacacctggtctaatcaatcttttgcaccctatgtaaatcagaaactgcctcctcaccaggcacctataaaaacccctgcatttcactgcagatccagcaacttatttctctaggacccctctctctagcagggagctattctttctttcacctattaaacttacgctctcttaaactcacaaaa

SEQ ID NO: 89935 - DNA, 650 bp, Homo Sapiens
  misc_feature (11)..(11): n is a, c, g, or t
aaaaagagaanaatggcctttgaaatttgatattaattcagatagttcagaaactactgatcttttgagcatggtttcagaagaagagacattgaaaacactgtataggaacaataatccaccagcttctcatctttgtgtcaaaacaccaaaaaaggccccttcatctctaacaacccctggatctacactgaagtttggagctataagaaaaatgcgggaggaccgttgggctgtaattgctaaaatggatagacccccaaacctaaaagaagctgaaaagttatttgtttaatttcagagaatcagtgtagttaaggagcctaataacgtgaaacttatagttaatattttgttcttatttgccagagccaaattttatctggaagttgagacttaaaaaatacttgcatgaatgatttgtgtttctttatatttttagcctaaatgttaactacatattgtctggaaacctgtcattgtattcagataattagatgattatatattgttgttactttttcttgtattcatgaaaactgtttttactaagttttcaaatttgtaaagttagcctttgaatgctaagaatgcattattgagggtcattctttattctttactattaaaatattttggatgcaaaaaaa

SEQ ID NO: 89936 - DNA, 406 bp, Homo Sapiens
tatccgcagcgcgccctgtcccgccatatacattccgtgcttttcaaacacccgccgtgggctaagcatgggacccacgtggggcggggacacacggcgataaagagccaggccctcgctgccaaggagctttcccgtaacaccgatgcatcaaacaaaagttgataggccactgagctatgggcagccacatgtgttcctgatggaagggactgagtatctcccagagatcctggacacgaggagacatgctgtgagtggatgtctggaagccagtcctgagagagaagactctaaatccagaatttcttcaggcatttcaaacatttctatgttgtgtgcattatataaacaacacctatataacttgtcttaagaaaataaaagcaacaagattaactgaaaa

SEQ ID NO: 89937 - DNA, 356 bp, Homo Sapiens
agctactcaggaggcaaagatgggaggattacttgagcccaggaggtcaaggctacagtgagccatgattgcactactgcagtgcaacctgggtgacagagtgagaccctgactcagaaagaaccacttgcccacagtccagacagatggattgtaggtgggttttctggagattagtagatactgtatagagttgtatacataaaattgtgtcagtagtacaaagtgtatataggctgtttactcttatatttcctactgtaagatacagatttatggtactgatacctttaaattatatcatattttgaaaatgtaattactgatattcaaaataaattaaaggacttaaaatc

SEQ ID NO: 89938 - DNA, 540 bp, Homo Sapiens
actgtaatgttatccttaggatatctctgtttttacaaacttagatgaccttttcttcactgcttcatttgggttgtggaagttggtcatacaagttgagtgttgtgttcttactcatgaaaaatgtttgcatgaatttttagagtttttacatatttcattgagtcagtgggtttcactaaaacagctgtgtgtcttattctccatgtctggaaaatcctgccgtaataattacatttaccccagacgactactctactgtgttaaaaagtgaaaatatttataaaagattttgtggtatttttaagtccttaagttagaggactaaaccttttttatgaatgaaaggataatctctaggaaatgttagtttatgatagtttgtaacttgtgaattttggtttccagacatggagacaaaaccaaccaaaatactgtcaagtggaacgtaaaaatattaattcagaattcattttattttggcaagataaatttaatgaagaataattaacatgctttggagaaagtgataaaaacatg

SEQ ID NO: 89939 - DNA, 636 bp, Homo Sapiens
ttgagtctcaacaactcagagtttgagatgtcagcttttttggtaaacgtaggtgttagaggtatattttgctttcctacaacaattgttggcccttgatttcaagcatgttgcttcataggaagcaccagagtgccatctgctgcatttcaagagattgtaaatgtcatctcagctggctcagttatatctctaatgtcccgggtagcagcacctccctctaaaaatatgtttacttcgctgtttcacttgtattttgtgtatacgaaatggcagcttccgatttctagttggatttgtcttgcattgtttgtataacttgctggtcacccagggctatttgctttttcattgagaaatttggtaggggtgtctagttcagcttttatgttgatccatcctgacttattttagacattgaatttatctcaccacaagtaaaagaacatgtgtattgactgtctttgctaagtttcctaatttttcctaattatggcaattatggatgtgaataagaatactgatgctgtacaaatatttttgtggaaatgtaccttgttaatgtgactatttaaataatatgaaaataagaatactcttgaagaaaaaattaaaatatttactctttggaaaaaa

SEQ ID NO: 89940 - DNA, 1132 bp, Homo Sapiens
  misc_feature (41)..(82): n is a, c, g, or t
  misc_feature (85)..(119): n is a, c, g, or t
aaaaatgtatagatcctatagggcgctcagcgctgttcgtnnnnnnnnnnnnnnnnnnnnnnnnnnnnnnnnnnnnnnnnnncgnnnnnnnnnnnnnnnnnnnnnnnnnnnnnnnnnnncagtcgacggtaccggacatatgcccgggaattcggccattacggccgggcagccaggcctgcactgagaaggatatgttcaccttgacagggccctgtgctaatcacgagtctttcctgttcggagcagtgaggcctgagaccctcaacagtgctgtgtgtacagaaggcccccagaatccacacaaaggggccgcctgaaacctagagcatttgtgaaggaggaaaatggaaggaacaactggatgttgtaaatgtttctcatctggccttaaaatccatgaaagctggaaaatcacaaggcatctgtgcatatactggtggattttaatgagagtcctgtgtttggagcaccagaaataaaccagcttcagaagcaaagatctgaacgtctatgacactctttcgagctgacacagtgaagaacatagaaggagaactcacccagtctgccagggtcacagaatgatcatactcaagatcttcctggggagtcaatggcaaatttcactgggctattttacagatgaagaaggaacataaagaaggttctgggaccccgaagtccacggaacacccaccattacctgatctttggagcttgtcatttggccagtggaccctaataaaacgtccacggggatgtggggatagaatgccggagcctggctcgctagggcatccaggttcttccttcctctttgccctgctgtctccaggcaccaagaatctcctaaagttccccaaagatgaaccccccattatctcaggtcactctgtttcccccgatctttaccaaattcctgactcagagttcctcccatttgcttctgactctcattttattcttacctctcattttattcttatgatgtttaccatttctcttctcctcagtgtccctctctgagtggtaagagtatgttaataagccagtgctgagaccggagcacgaggcaactgctcaatgttggtcattgtcactgttattaaatgtaacttaagggaaaaaa

SEQ ID NO: 89941 - DNA, 423 bp, Homo Sapiens
gaagtttgccccagtgtgaaagtctctctcagaagattggtaactaatgggtaatacacaacattccaagatagattctggtatcttgagccaacatatcaggagaatggtacagaaaaactgaacattaccagcccctctaccttagctaactgcaaaatgaacaacttccaaggacttgctgctactctcccacaaaatgaaaagtctatgtatcaagatgtagaatagtacagctaagcacaaggctcctccccagtcaaagaggagcagagagtgaagatcactatcagtaaaagcgctggcctagagttccatcactaaactgatatgtaacccaaggcaggtcttctttctttgagtttcagtctcatcatctttgaagtgagaataacagagcataaaagtcaaacttgaaccaaa

SEQ ID NO: 89942 - DNA, 556 bp, Homo Sapiens
ggggataacaggttcaggaagttcttgaagaaaaaatctaagaaggctaatagctgagggaacatctgcttcattaaccaaatccacctcttctccgctgtcgtatctctgccgaagccactccactgtctcagcatttccattgacttgaaaaagtccttgttgctccagacctccatgttcctcaatatagtccacaacgtggcggactatgaatggaacctcattgtctggatgtcctccctgctgcagctcatcaagtggaattccaaatattttgttagcaagaacggagttgcagttactcaaggaaggggaggagctcttcctcatatcttttttgcagccagaaatcaaagctgtcttttctttcagtacttaaatacctaagtttaaaaaatggcttctgcaccagctaccctcactgagcaagcattcttttgtcatttatggctgtttgagattatggcagaagatcagcctgtagttcctcattgaagaaatgcagaactcgatcagtacttcagcagttaatcgttggaaccaaaatgcaccg

SEQ ID NO: 89943 - DNA, 614 bp, Homo Sapiens
aatgaggaactacaggctgatcttctgccataatctcaaacagccataaatgacaaaagaatgcttgctcagtgagggtagctggtgcagaagccattttttaaacttaggtatttaagtactgaaaggtaagttttcaaaatggtaactatctcgtgctctataaatccatagagattttggaacttgcccctgtagctgctatttgatttaacttgaggttttatagttcttagctggcaccagatacattgaagaatggatgttgcttgtctgagactatgtaaatgtatggcattttgctatccttaagttaattttttcttttaagttggctgcattgtttcctagtcatgttgtgacattcttgatccagtgggtatacacttgatccagtggaccttatttgtgtaaacttaggaattttagtagacgtaatttctgtgattagcttgttcttcgcctgcagtgaggaaagaaattgtttttgctagggtgatgggaaatataccagctggtgtcaatttgttcattaccaaccttggagtttgtcttgcttttacaaataccctttcccacgtaaagaaataaatggggtatgggttttattgtag

SEQ ID NO: 89944 - DNA, 1518 bp, Homo Sapiens
tttgcagtccagacaggaaatggcactttaatagttggggccagggtgacaggaccaagatggggctggcctgtgtcagtcaggaagcctccctcttctgctgggacagggccttgcggcagctcctcctccccgcctgaggtcctaggcctgccacaggccagcatgccggtgaggtcagtggcaggagccacccagaagccccgcagatgacggagctgagaacagggacttcacctccacgtgttgccatttcctcactggaaagtccttgggaggtggctgggctcagcctgagctcagggctcttcggtgggggttggggcaggggcagggcgggcacttgcaggtggcacaggcttcatcaaggcaggacacgggcttcatcaaggcaggagccacagcgcccgagccctggcaggggaggtaaggcccagaatggggcagggccgtgtgctcctggaacggacatccttctctgccaaaaacctgctccccaagccctgtccctcccaatccccaggcagcccactctgccctccatagatgaatctaatcccatatattacaataaactgcatttgcctctccccattgccccaccctcccctaacctgggccagcggcccccacttccttgtcctctgcggtggcaggtgcccctcctcaagcagggccacagcctgtcagcagccagctgtcctggcactggcctgagggctggggggacgcagaggccggggctgcacagctagctccaggtagatatcttctgtggggcaggtgtactccacaaactgcttgtagaactgctggaatgctctccccacggactctgccagggctttggtggagtcttcagacacaaagacgtggcaggcaaaccggtggtcggcggggtgcttggtgatgaacccaaagtacttgttgttctttggatgatatccgcagaaagagatgttttttaactggaaaaagtggctacatttattccccttggcctcctgggagtcatcggccttgacgcctatcttcacaccccgcacgctgatctccaggacacagctggagggcgggttaaagtgcacggtgagccggcgggtggtggcaatcttttgcatagcagcacagaggacgtcattgcccttgtgatagggaacctggactgagcccaggaacttcacccggaactggtccacccagtcactgtttttggccagggctgccatgtgctcgggctccttggtgacctcgatggcgtaataggcaggaaagacaccccgggcaccagtgcgccatgttgtaggcctcgtaccagtagtcttcagcctggagctccactagcagagggtcatccacttccagctcaagttcgtcttcgtgtcgaggcacaaacctgtccccagcaaggacaggtgagaaattcggcaccaaggcctgtccagccaggcctactttggggtttgggagccacagcagcatcgttatttcagtaaacatttgcaaaagcaaaaaaaa

SEQ ID NO: 89945 - DNA, 342 bp, Homo Sapiens
cggtatttgtttgtgtctgttccttatcttttccattctctgtcttctgctcttctagatacctatttataaaaacacaagagagagacacaagaggcttcttaacagcatgctctaaaatagtgccttaccgtttttggtttttgattctctgaaaaaaacatgtcttatggattcctgtattaccaaaggactttctatgcggttacttcgtaataatttctgaaaactgccattcacagttctatgaacttggcaattaagagaaaaatatatgatccatggagttgtgtcttacaaaagcaaccaaagagaacaacaaaagttatttttaggatactc

SEQ ID NO: 89946 - DNA, 376 bp, Homo Sapiens
cccagatctggggacccttcacctgcctctactactgcaaatgattggatattcgtctgacttggctcttccctaatgtgtggaactaattttgttcactctgtttcatgctggacctggcctgaaaatgggcccttatactgtctttgcactttccaacttgccaagtttctgaaagaaggaccaaagtaatgccaagaactcccagatgaagaggaccttccttagacctataacagattcactacttgacttcagagggaagtttcagctaattctcaggaaaaggtcaaaacaggcctgtgactgtcccttgaatactgaaggtataaacaagcttctggctcctccaggtcaagcagaggaacactttaaa

SEQ ID NO: 89947 - DNA, 377 bp, Homo Sapiens
  misc_feature (263)..(263): n is a, c, g, or t
atgagccaccatgcccagctgagaagcaaacttctatcttgtacaagcaattgctgtttggggacacagccaacctcatacatatgaactaatgcatgccaagttttaatttccttaactgaaaaggctgatgcaaatgacatattgcacctggtggcaggcagctacatctactgctaaaatgacataagatagaagaagttttctgtagagaacattgtgtgtcacaaacagtgacattttcaaaagtgcttaattcaatnatgacttcccagcggcaaagcttgcacctatggttttaggaaaacaacaacaaaaaggttagtctagcttaagatgcaaaatgactgacaaagtccctccccacaagagaactg

SEQ ID NO: 89948 - DNA, 1169 bp, Homo Sapiens
  misc_feature (83)..(117): n is a, c, g, or t
caaaaaactaacctatctacctcatatggcctcgctttcagcgaacgacgagcgcagcgagctagtagcgaggaagcggccgnnnnnnnnnnnnnnnnnnnnnnnnnnnnnnnnnnncagtcgacggtaccggacatatgcccgggaattcggccattacggccgggggagagaagccgggacccgttctgctaggaagaaggggagcaggtggtgctgctactcgggaggaagcagagcagcctccgtcgctgtcgctgagagcctcacgagtcgaggtcctgcaggtggagctccggcagccgacctggttgaaggtttagaacagatgtggaaaaatgtttacttcagagaaaggggttcgtggacggaatggttgtcagagtttaagacattaccagaaacatctttaccaaattatgccacaaatttgaaagacaagagttctttaagtttccaatcttctctataaagttatccaggagccacaaagggagtggctagaacctgtctgtcaccagctctttgaattctatcgcagtggagaggcagcagtttgcttcaattttacgctgcaatttctcccagaactaatttggtagctaccttggcagtctcaggccagcagacaatgtgcatagcagtggcatgcattcgaagctcttcttctaggggtttacaattctcggacataggttgacaacaggggacatgcccaaagttattcgacgcgtctcaccgattcccaatcttttaagtccaaaacactcttgtattaccaatgaaacacttccaggcattgggtccactgggctcttgacttgacgagttgcacttatcacaagcaatgggttggtcaacaagtggtataaccagtgagacctccattcctcacaagggcagaatgcattgaccacgagcaccaagaaactccggctatggacaccgtggctttgcaccgatttccccttttcaggtgggcggactacacaaatgggcttgcacctttcaaccttccatttgcccccggagagtgtttcgctcacttacgcatcaccctgttcgttcacactttggtctcccacgcaaacctcgtgataagagggagaacataccctgcgacacctgttgtccagcataacacgacggatcaccgaagaatagacgat

SEQ ID NO: 89949 - DNA, 702 bp, Homo Sapiens
cggctaggtacgaggctgggtttaaattcggcacgagggcggcagtggtggctctcccggctgggttgtcagtcagtgagaggagggggaagatggctcaccgggacccgttctgctaggaagaaggggagcaggtggtgctgctactcgggaggaagcagagcagcctccgtcgctgtcgctgagagcctcacgagtcgaggtcctgcaggtggagctccggcagccgccctggttgaaggtttagaacagatgtggaaaaatgtttacttcagagaaaggggttgtggaggaatggttgtcagagtttaagacattaccagaaacatctttaccaaattatgccacaaatttgaaagacaagagttctttagtttcatctctctataaagttatccaggagccacaaagtgagttgctagaacctgtctgtcaccagctctttgaattctatcgcagtggagaggagcagttgcttcaatttacgctgcaatttctcccagaactaatttggtgctaccttgcagtctcagccagcagaaatgtgcatagcagtggatgcattgaagctcttcttctaggggtttacaatttggtttgtatttaatggagttaacaaaatcttttttgacaaaatcaaatatataacctgtgcaactgcttttcattttaataaagctagtgtttgttttttcatacaaa

SEQ ID NO: 89950 - DNA, 408 bp, Homo Sapiens
tcgatttctctatgctctctcccacccctgtggctcttcgcccttggggattccttgccaccaccgctaccaccaccacctcaccccgtgtatcttctgaaagagaagtaggtctttcctcctgcctcaggcacaagccctcctggttcagggtcagaagctcagcaccttgccttctccatgatcccaaagcacaattggtgagtgggggagaggacccccctcttccctgactccccaccctctagatcaggcagaatggctggcctgtgctgcgtctgcacacaggaagtcaccttcctttaatatattggcttgaggcctgcctgccctccccatacccagaaaatctggatctcccttgagcagttttctataaagtctgcaataatctcagatactctaaaa

SEQ ID NO: 89951 - DNA, 466 bp, Homo Sapiens
gccacaacacctaggcagaacatggaggttccacagctgcctggtggacagcagccagcagcctggcagcgtggggctggtgagctgctgctgctatctacccaggcaactccattttgctgaggtggtcctaagtagctgcatgtaatctctcctaagaagctcaatgttcttaacaatttggttttaacagttgatggaacagaaagatacgttagaaaaaaacaaggactttcttttcaatacagaattctcatgcctgtaaacacatgcctgtatgaataaaatccagacacaaaaccatactgctgcaacagcatgattatttcctgatctccaaagcacctgagaagtccaacatggaatcctggaaaatgcacgattaatttgatcctggtttgttggtgctgttgttttagttgtaagagctttcgtgagacgaacgcatgtactgctctgaaataag

SEQ ID NO: 89952 - DNA, 417 bp, Homo Sapiens
tatgctcttgggtacttgtcagcagcagttgttctacaagctaaatatctggatatcttaaatctcagatgagcatcttagcctctggattactgcccaatgaggaaagctatgaaatgcatggataacttgctaatcagtatttgccatatgtgctagcagcatcagcatcagttgggagattatggtggcctccatgtcagacctcctaaatcggaatatcagagaaggtggcccaggttaccatgcttcatctgccaatgcattgaaaacttggaatgtaaattaattcaaccattgtggaagatggtgtagtgattcctcaaagacctagaagcagaaatatcatttgatccagaaatcccattactgtgtatacacccaaaggaatataaaccattctattacaaagataaa

SEQ ID NO: 89953 - DNA, 386 bp, Homo Sapiens
tatgctcttgggtacttgtcagcagcagttgttctacaaatgagcgtcttagcctctggattactgcccaatgaggaaagctatgaaatgcatggataacttgctaatcagtatttgccatatgtgctagcagcatcagcatcagttgggagattatggtggcctccatgtcagacctcctaaatcggaatatcagagaaggtggcccaggttaccatgcttcatctgccaatgcattgaaaacttggaatgtaaattaattcaaccattgtggaagatggtgtagtgattcctcaaagacctagaagcagaaatatcatttgatccagaaatcccattactgtgtatacacccaaaggaatataaaccattctattacaaagaaa

SEQ ID NO: 89954 - DNA, 448 bp, Homo Sapiens
tgtccatcagacaaggatgagctaatcaaaagaaaacactgcctatgtgcacgacttcagcagcctggacagcttaataccaaggaacacgtttttcactataaagattcagctttcaaaatccagttccctcttgtagagccacagggttaaaagggaccttagagatcatctacatacaggccaaaccctcaatgaatgccagtgttagccttatgttcttcttgccggactcttttctggcctctgttctgtcaggatgtttcctgttttgcaaaacagctttaatccttgagtatatttaattgttagaaaacagttcctcaaatttgaccccaaatttaagtctaatttatgaagaaagttttgcctttggagacaggtttaattttacttccatgtggaaaaccttcaaataaaatgatgactattgtgtactcacgaaaaa

SEQ ID NO: 89955 - DNA, 451 bp, Homo Sapiens
gcggcggctgctgaggcaggagcgcgccggcctgcaggaccggaagctggacgtcgtggtgcgcttcaacggcagcaccgaggcgctggacaagctggacgctgacgccgtgtcccccacggtcagccagctcagcgccgtcttcgagaaggccgactcgaggaccggcctccaccgcgggcccgggctccccagggccgcaggggttccccaggtcaactcgaagctggtcagcaagcggtcccgggtgttccaacccccgccgcatccgccgtccgccccgtcggggaatgccccggtcgagaaagagcgatgccccgcagggcagcagcccccgcagcaccgagtggtccctgcccggccgtcccccaagccccgtgaggtgcgcaagattaagccggtggaggtggaggagagcggggagtcggaggccgagtcggggcccggggag

SEQ ID NO: 89956 - DNA, 452 bp, Homo Sapiens
gcccttattgaatgtttcttttcctaagtccattcctgactccagtttgctgtataatcctgagactcctttacagaatacggggatctaacatgtagagactattcctgtaattggtgtttcttggaggcattgcaaaaccaaatttttctttactttgtagcacttttgactaatgttatctaaggactgtatcaaagaattggtttctattagattttagtttaagaaatcttacaattttgttacagagcaggctatttggaggatgaaactgaaattaatttttcctcataaggcacaagaaatgaaatttgcaatgcactcgtactgtattttcatcttttttctcttgaatttgcatttgtaaactttgattcacatgtagtatttgtcaactctgatttatatgacaaaagatacatattttaaaaatatatattttaaaaagg

SEQ ID NO: 89957 - DNA, 835 bp, Homo Sapiens
  misc_feature (77)..(77): n is a, c, g, or t
  misc_feature (201)..(201): n is a, c, g, or t
cacaaggatttttaacaactttttatggccttccgggccttcgttattgttggtggtggaaaatttgtggagccggnattaaccaaattttcacaaccgggaaaaccgcctttggaacatgatttaccgaaattttaaatacgaacctcaactattagggaaattttgccctcggaggaccaagaaattcgggcacgaggnctaaactgcccttggcctgtttctatggaagctccctgggtgagaagagtttgtcttttcctttgcacccccgaaccccctgcctgggcttaaaaacgtgcaggaatgcggcatttggagaaattacacctctgagctgccaggatatattcaaacagccaagaacagaagttggcccaactgggacgcatccgtggagcagcaaatatgcacactcctggcagtcatgcaagcaagatggtcaacgtcagatacacaaggctggcttgagcagtgttcactggggaaaattcatggacaggggagcagaaacagaagaaaaaccacccaccccaatgtcttgcacactgcaacaactctgtgaacactggtcattattctactgttgttattggtgctctttactggccaaagctcagtgggaggactactatctaacacaagtgccctgcaggacagaaagaacaagagtgctagagcttttgtgcatctgggccattttttcatttgacatatgaagaatctaagaacctgcaaggtggaagtgacctgttcaaatagcagcaaagtcaaaagcagatgtagctctctatctctgagcctctaataaaattaatctaaatagttgtcaaaa

SEQ ID NO: 89958 - DNA, 587 bp, Homo Sapiens
aacttataatagcaccgacatcgtttccttgtaaaaactatctttaattctcttatactgggctctgctctttattgtacagctcatagtcacttcctgcttcagcctccaacctgagccttctaaatttgaggacatacctgcccaggggatgccaacccattttggtcagtttctacagcagcataaattagggttctcggagccattcagaaattgagccctcatctggcaaatacaatcctcccagggaaactcagaaacaaaaataatatgcacagaagaaaaatatgtaaaatattttttaaacatacatttggacaaggattggaagatatatgtaaaattaaaatatcaagatggtggagttatggatgtacttctttttgaaaatgtggatattatatttttaaggttaaaaaaatgaaacatgttaagaaatgttaataacgtttaacaagaatatcctgaaaggataaattttgattatgaagtagagatgcctcaactttgctcactacttccaacttgctagaattccctaccagatctctaatggcaagaaataaatgatatgacagtaaaaa

SEQ ID NO: 89959 - DNA, 417 bp, Homo Sapiens
cattcttcagcaggcccctcataagatcatcacaagcaacacagagaaatgttggcctgctgaaaatagaagtgcagagactctctcccgtgacagaatgaggcgtggaggattcgcagaactgtttcctcaagggccccatagtgataccgtcttttattccttttagtagcctcatcagtgccctgaatgcagtgacttgtgtcaggacagcgttctccatgctggctgcgggtgacggcctgagccccggtacagtattcctgctggcctcagaccgccctcccaggcaaaacctggggccagcctgtctgcagtctgaaatgccctccagattatcctaaatgtgcatgttaatgaccatcagatctgagagctggtggagaaattaagataaatagagaaaatcctgaaaaa

SEQ ID NO: 89960 - DNA, 576 bp, Homo Sapiens
gggggggacagagtgactgtggacacaaggaagatgctggcgtgaggtgctctggacagtcgctgaaatcactgaatgcctcctcaggtcatttagcacttattttatccagtatctttgggctccttctcctggttctgtttattctatttctcacgtggtgccgagttcaaaaacaaaaacatctgcccctcagagtttcaaccagaaggaggggttctctcgaggagaatttattccatgagatggagacctgcctcaagagagaggacccacatgggacaagaacctcagatgacacccccaaccatggttgtgaagatgctagcgacacatcgctgttgggagttcttcctgcctctgaagccacaaaatgactttagacttccagggctcaccagatcaacctctaaatatctttgaaggagacaacaacttttaaatgaataaagaggaagtcaagttgccctatggaaaacttgtccaaataacatttcttgaacaataggagaacagctaaattgataaagactggtgataataaaaattgaattatgtatatccctgttaaaaaaa

SEQ ID NO: 89961 - DNA, 481 bp, Homo Sapiens
cagcgaggattttgatatgagcgactcacaatggatgtcagctgaccgcacctggcctccagcctgagccccagccaggacgaagagatgcggagcccgcagaacccaccagtcaagaggacggtggtgtctgtctccagggccccaccgcttgagccacctgtcccaaggcctgaacatcatctgcagcttggacacctctctacgggccaggaaccccagggtctctgcagagagaaatgatttcagttttaggggaagatctaggtgtgtgacgtctaattcattagccaaggacggctactgagccttggaaaaggctagtgcagacaggtgtgcaatacacgctgcgtctcagcggctccgtaggaaagaagaaggtgaaatatctcagctctgataacacggtatcaattatttgttgaaatggtactattttggatatattgggttaaataaagtagattattaaaattgaaaa

SEQ ID NO: 89962 - DNA, 593 bp, Homo Sapiens
atggcgtccgacactccagagtcgctgatggccctctgtaatgacttcatgcttgcgcaacctggatggcaccctgggctacctgctggacaagaagaccctgcggctacatccggacatcttcttgcccagcgagatctgtgaccggctcgtcaatgagtatgtggagctggtgaacgctgcctgtaacttcgagccacacgagagcttcttcagcctcttttcggacccccgcagcacccgcctcacgcggatccacctccgtgaggacctggtgcaggaccaggacctggaggccatccgcaagcaggacctggtggagctgtacctgactaactgcgagaagctgtccgccaagagcctgcagacactgaggagcttcagccacaccctggtgtccttgagcctcttcggctgtacaaacattttctatgaggaggagaacccagggggctgtgaagatgagtacctcgtcaaccccacctgccaggtgctggttaaggatttcaccttcgagggcttcagccgcctccgcttcctcaacttgggccgcatgattgattgggtccctgtggagtccctgctgcggccgc

SEQ ID NO: 89963 - DNA, 525 bp, Homo Sapiens
  misc_feature (396)..(396): n is a, c, g, or t
  misc_feature (420)..(420): n is a, c, g, or t
  misc_feature (485)..(486): n is a, c, g, or t
gcggccgcaccgtgaggggaggaggccgaggaggacgcagcgccggctgccggcgggaggaagcgctccaccagggcccccgacggcactcgtttaaccacatccgcgcctctgctggaaacgcttgctggcgcctgtcaccggttccctccattttgaaagggaaaaaggctctccccacccattcccctgcccctaggagctggagccggaggagccgcgctcatggcgttcagcccgtggcagatcctgtcccccgtgcagtgggcgaaatggacgtggtctgcggtacgcggcggggccgccggcgaggacgaggctggcgggcccgagggcgaccccgaggaggaggattcgcaagccgagaccaaatccttgagtttcagctcggattcntgaagggtaattttgagaactccntgaagctgaaacccgatccgatcacctttccaaggagtccctggatccatcactcggattggcanngacctgggccaaaagccaagaatcacaagaagctgatga

SEQ ID NO: 89964 - DNA, 160 bp, Homo Sapiens
ggcacgaggggactttttgtgtccagacagatggcaatactcatccgtatgttgtctgccccagggcaagtgtcacagtgagtacgaataaagcgatcaataatttgtctatctgaaaagtatgaagaaaaacaggatgaaaattttcactttgatgaag

SEQ ID NO: 89965 - DNA, 535 bp, Homo Sapiens
  misc_feature (69)..(69): n is a, c, g, or t
ttggccatattagatgcgcctcttctttcttcttctcccaaactctcccccaagtaccctccccaggcntctccttctggaattggtgtgggctctcacttcagcaatagtcggagccagggtgagcgtcttctttctagagaagcaccagaggagctaaagcagcagcccctggcccttgggtattttgtatcaactgccaaagctgagaatcttccccagtggttttggtcatcgtgtcctcaggctcaaaaccagtgccctctcttcttaaaggcttcgctgcatcaccacatttcagtagcacagacagacgaacttctgcctgccaggaattctcagcgggttccacaccctcttgactccaaaaccacgtcggatgttttaaggtttgttttggagcagtacaacgctctgtcctggctcacgtgcaatccggccacccaggaccgtacttcctgccttcccgtccactttgtggtgctcactcagttgtacaatgccatcatgaatatactttaattggaaaagcaaa

SEQ ID NO: 89966 - DNA, 424 bp, Homo Sapiens
ttaatgtccttccttctgaagcccatttgtgccatctgcccactcacaggagtgtttgtgtctgattctgagggtcgtctcgggattgtgggggagctccccaggacttgttaaagggcaaggtgagtccttagccaccagccccagacttgggggtgaaatacagaagtgggtgccattgccagggtaaccttcactcaagtcacctgctcaggcatcaagagcggctgcctgggcttctgctcccaacagaccctcctgaccctccaggcccacccaggtggcccccacctctcagctcccagggcaggtgccctccccgaggcggggaaaaggggtgacggtggacgccttggtgtccggttggaccacctggttccctgaggcctgctttggaaaaacataagagccttcggttgctgtt

SEQ ID NO: 89967 - DNA, 409 bp, Homo Sapiens
attcatcccgcgactagaagtttctctgtctcttctgaattctccacacattatctctctcttgttttcctattgtttatcaccttttaacttgtattaacagtcattgcttttcatctgttaccttccctgtaaaactgagacgtacgaggggatagagtccaggttttcttgatgattgtatttctagcatctagcctagtaattccatagtttttaaaaacccggttctgcatagccccagggttccagaaaggtgtcctaagatcacccggtaggggcaaagagtgggcagggacccaaggaagaccccttccccacaatctgtgctttggtcaggtaggttttgatttgaactcttctatatattgggattcatgtaattcttttaaaaaggattcttctagaa

SEQ ID NO: 89968 - DNA, 444 bp, Homo Sapiens
tcatcagcatgaatgacaacttttacccaagcgtcacatgggccgtgcccgtcagcgagagcaacgtggccaagctcaccaacatctaaccagagcttcaccacctggctggtggccaccaacacctccaccaacgacatgatcatcctgcagacgctgcactggcgcatgcagctcagcatcgaggtgaaccccaaccggcccctgggccagcgcgcccggctgcgggagcccatcgcccaggaccagcccaaaatcctgagcaagaatgagcccatcccgcccagcgccctggtcaagcccaatgccaacgatgcccaggtcctcatgtggcggcccaagtacgggcagccgctggtggtgatcccgcccaagcaccggtgacagccaggaccacccgctaggttagactcacaaataataataccgctgaaaacaaaaaaa

SEQ ID NO: 89969 - DNA, 1789 bp, Homo Sapiens
  misc_feature (75)..(109): n is a, c, g, or t
  misc_feature (200)..(243): n is a, c, g, or t
  misc_feature (762)..(770): n is a, c, g, or t
ttgccactatgggcgctagctcttttgtagtcgaacgacgagcgcagcgagtccagtgagcgaggaagcggccgnnnnnnnnnnnnnnnnnnnnnnnnnnnnnnnnnnncagtcgacggtaccggacatatgcccgggaattcggccattacggccggggtgtcatgtggcttcatattagtattgtgtgagttacatgnnnnnnnnnnnnnnnnnnnnnnnnnnnnnnnnnnnnnnnnnnnnctgcagtgatccatgtatctgctttccctatgtgtggttatctaagttaatatttatgtacaatgtaatttgtaaatttaaggcaaatctgaaaaaaattaaatgatctttttaatccaatctgtgataatctttgaataaattggaatctactataagattcaggcattataagtaaattgtcctaaagtctttaaaattgtctataaaaggttaaggtagggtgggataggttatatgaagttattgactatattctgatccagcggttttcagcctgaaatagaatttatctcctagttattatcagttcagagttttagtttgattttaaagtattgctagatacactgtatagagtgagttgcttctcttaataatttatgggcaaagataaatttgcttcatgtaaaactgttactaaatttataagttttaaaggttttgttttatacaagcattgattgtgaatgtcatatcaaagattggctttcttaagaacacatgattgaaaacaannnnnnnnnaacatgacgtgtttcaatagactgttctcatagttcattataaagtgaataccaaataattctttgtccattttgaaagcataatatagggtaattttcaagtgatacaaaaagattcagttagaatcttgtaaactaaaccagtttatttttatgggatcttcatgtaataattttcttaaatttagtactctcaaccatgacagataatgccttaacatggattttaacgtttgcaggatttgctaaattcataagatagttattacctttctttgaaatttgtaatgttttatattcttgtttcatagccatttgtcagtccacagtggtcattatggttttactttttgatagttcttacaccttgttggagaaactacaaaagaaagttgtcctcgtccttccccttagctaacatcaaaattaaaaagttgaatattaatattagctaacattaaaatggaaggtaattcagttttagtgttagctaacattaacagtctaataatttagctttgtaaattccaaggctaaaaccctttcatgggcttcacagtatttagtcctaattaaatacccttctttattccatgaccttattttataacttaaatttttttgcaattgtataaattagtaattcagtcccagtcctggatctctgtagtgttttgacataataaactgatattctttaaatgtggacctgtaaggagatactatggtgtggtgtattgtgcttttagcctgttttccactattaattagcatttaccagtaagggtcattttgactcaagttatttatgtattaatagcctgtgaatattgcagtcctttttagattatattggtctaaatatgcattctgcagtgaacctgttaagctgttcacatgtatagactattgaaatactgtacttgtacacatctgactgttgacattttgtacttttttctagatccaatatttcacaataaaaaacttgtcaaaggctttgtattagtacataaaaa

SEQ ID NO: 89970 - DNA, 442 bp, Homo Sapiens
caggctattaatacataaataacttgagtcaaaatgacccttactggtaaatgctaattaatagtggaaaacaggctaaaagcacaatacaccacaccatagtatctccttacaggtccacatttaaagaatatcagtttattatgtcaaaacactacagagatccaggactgggactgaattactaatttatacaattgcaaaaaaatttaagttataaaataaggtcatggaataaagaagggtatttaattaggactaaatactgtgaagcccatgaaagggttttagccttggaatttacaaagctaaattattagactgttaatgttagctaaggggaaggacgaggacaactttcttttgtagtttctccaacaaggtgtaagaactatcaaaaagtaaaaccataatgaccactgtggactgacaaatggctatg

SEQ ID NO: 89971 - DNA, 411 bp, Homo Sapiens
agttggaattcgaactgagagccaggatatgaacttacaagtgccttgctttagcactgcctgtcccagaaggattgtacctttctgcttctccagaaactaactaaagattttctcacctgctgagagttgaggatgttgcttcaggcatgttcagacttctggaggggagcattgacctgaaaccacagtgggctaataacagtaacttccaaaattgaagactgaaccacagcagtcaaacttatcaaccttttgatcaaaaccggtgactaaaaggaatatgaaacctgtgatacagtttcagaaaaccttatttcaaatcttattcatattaacatggccactgtcacatgtgctgaaaattggttgagagaccgtaaataaaatgaactgttattctgcaaaaaa

SEQ ID NO: 89972 - DNA, 388 bp, Homo Sapiens
gtgcaagtcaccacgcagcaagcagatgtaggagaaggaagctctgcagaaacagaagcaggaacacaaggctgatgcgctccgcatgcaacagcagaagtgggaaggccaacagggtgagggctgtgaccatagcagctgagtagacactccccaactgataagcagccacagtcaggggaccctgagatttggtcctctctaaccggccccggaactcctcctgcatgtgtcggtagatttgagggaccacataatccaagtcagcttgagaagtgggggggcctgagaagggagtgaggacagtcctggtccttggagcgcctgccccagccttcaccagcactgtcacaggcttccagagcagcagcgcgagccctgaagcagc

SEQ ID NO: 89973 - DNA, 482 bp, Homo Sapiens
atatccatctctactgctcacccataatagaatttttatgtgtgcactcactagtcttggttttatcaacagtttaaaggaggaaaaagagaatgaagagacttcatttcttggtttttcccttacatgtttgagtgttgtccctggtaggccctagttctttttcattattatcactaaagtggcttttgttctttgtttctttagaaaggacaacagagaactgaaaatacattatttcctagtatgctagtaagaagcagaatattactattccatttttattttctggcagatgaagcttcagagttagtaaagaaaatttccctgtgccatctaatgagtgttactgaacaaaggatttttgaagtctttcacccagatgaggaaccattagatagcacaccttgctctaaccattagatagcacatcaagaaagcaaggtcagttgagaaattgatgctcttttgaaaatatcaag

SEQ ID NO: 89974 - DNA, 148 bp, Homo Sapiens
ggtctacttttggtggggtgggggtgggctaaagccataggaagaaaaatgtgatgtatgtgtccagtatgtactattttgtttttgttttgcaagaagagttgaactatttttgataacaagagtaaatggtggaaaatgaaaaaaa

SEQ ID NO: 89975 - DNA, 503 bp, Homo Sapiens
agctgaaagaaggaatcttctctttcttggtcctgtcatctctcctgcacttcactgggtcatcaggattagaacaagagcagctgttgaggtttcaacatatggaaatgaccaggggcaagaaactggaaagacaccatgagatccaatcccaaaaccagagggcagagttctggtgccaaaattggccttgaggccttgccctgctacaggcctgtcatcaccaagccagcttggacaggtgcttggctggacagccagcagtcagagtcatttcagctgggatggaaataaatctgagggtagattgtggccagacaccggccaagcttcttatctagtcaatctgagtgttctgtaagcgtgtgaaaaacattctcagagattaaaatggactttttaaataagtggctctaggaaaacaggcaggcatttgaaaaaaattagagctcacaccatacacaaaaataaactccaaataagtcagagatctaaatgtaaaa

SEQ ID NO: 89976 - DNA, 270 bp, Homo Sapiens
agggttactattccaagtggcacctgggccagcagcattggcatcacctgggacttgtgaaaaatccagcatctcatgctccacagcaggtctcctaaatcagaatctacagtttaacaagatccccagcaaatgtgtgtgtaagctcaagaacctgttcaaaggagcacctagcataagacctggcttgtgacagatctgccaccctctaactgggtgacttttaaacaagtgatcgacctctttgagccagagtttctaccttgtaaa

SEQ ID NO: 89977 - DNA, 363 bp, Homo Sapiens
caaagcccaccttgaatgctgcttgtcgctaaagccatcgctggcatttccagacattgtcaatatctactggactaaagaaattctctactaatcagaaaaggaattggtctgtattgaagctggaaagaaaatcagaggagccaatgctgtcagagtgcatccaaggaccatttaaagatgtcctggccggaggtctgggctgtcaggtcctgccagcaggtagattccttccagagacattccttgacctgataccatcaaatcactttagtaggacaagtaactttccttattctcatttcatgcttgctagacaactgattatactttagttttggaagtaaatttcttacatgaagg

SEQ ID NO: 89978 - DNA, 515 bp, Homo Sapiens
ccctctctgaggccaaggaagttcaggtatgagctgtacctgaggctgccctggcctctcctctcccgtcagtcctcactgggtgtcttctcaccctgccctctgccagctccactgctttccctgctgggtttcattgcttgtgcaaggaagatacggaagccacacaatgggttggttctttctagcccttcccagactgactataggccagcggggtctgtatctagaaatcttttattactctaagttgaacagtttaatgattagtcattttaatttagagttgagattccattagtatttgactgtggccttcttattgagaactctgttcaactttgaaatgccaaagcaggagcctttgttctttgatcctgccgtgagttaagaaattctgtatttcttcagaagtgtttcattttgtgtaatgaagtcaagggttagagtgactcagtgttccatgagttaagtgtctttgtagaatgaacagtaaacttatctcctaataaaaa

SEQ ID NO: 89979 - DNA, 479 bp, Homo Sapiens
taagagagaagaaagcactcttaccttgtttgtgtcttactttgctagttgatgtatcactttgcaaaattggttccagtctcattgttttggtgctgtgtaggttgggagcaaatatgtagcctcattgttttgaattgtcttagattcttaaatctccccctctttttcttagttatcggtcctatcgtccagcattttctttctctgttctaagacaaaatctctttgtctctctcctctttggagaactgcctataaatcctttttggaagaccatttgtgatcaacccaaccctgccaattcagatattctagaaagtactttggctctattttgtattctcagttttatatgttaaatgtatcagaccaattctaagacagtgaatagttcttttgtttaaactgaaagtttaagaggggctcagaaacattgagttataattaattgagttgtaggtgtaagtgatttaaaa

SEQ ID NO: 89980 - DNA, 387 bp, Homo Sapiens
aaattaaactttattaattgatataaatttatattaaactttaaatttttataacctattcttacaacgtgctcatatcaatcaatgcctctatacatggatatggttaagaaacttacattttatattgattttttaaaggttaaagaaagagggaccaattaacttcaccttttcctaaacttgaaaagacaaaccaaattctgcccttcatctccaatgtttgaaagatcagaggttcctgtcaagtaagtcatcctttcttcataactattgaaaaagaaataatcagaaatcgctgaataggtcaattaaaaccatttttatcaaatatattcattcacaacatgtattgttgtagttaaaaactggttgagaaagtttact

SEQ ID NO: 89981 - DNA, 322 bp, Homo Sapiens
taaagcaaggatttcccagaaaataaagaggatttattaaatgttatttttccacttttatgaatatatatatatacatacatagcaaaaagaaaactacacactaaggctattgtagtgttgtaccttataaggaagtacaaggtacaacatataaaattatgttgctttttatcgttttaaattattttattatttttcatcacaagtcctaaaattttaatatgtaagttctatgagtaattttttagtaacaagaaaaagtcatatatatatatgtatcccagtacatttaagaaatgctttttttcaatagtagatt

SEQ ID NO: 89982 - DNA, 542 bp, Homo Sapiens
cgacaaggtaacttccccagagcaaaacagatcggagacaccaccaagcctggcaacacagacttttccacccgcatccgtgaaatctctcttgctgatgctggcacctattactgcgtgaagttcataaaaggaagagctatcaaggagtaccaattcaggtcggggcactcaggtgtttgttactgagcagaatccaagacctcccaagaacagacctgcaggcagagcaggctccagggcccaccatgatgcccatacctgcctctcggccctgcctgagagaaacagcacaaactatttcgtccaaccctgctgctgcctccggctgctgggactcacaggctttgctgtcaaaataatccaaacagggaaggaacgtacaagtaaataacaaaagcccccatactcttctgactccctggagacagctactttttaggagtttcatttgccttcttcaagagagctttcttccactgacataaaatgccagcttgatcgtacaataaatctgtctatttacctgggtccaaaaaaaa

SEQ ID NO: 89983 - DNA, 287 bp, Homo Sapiens
tacattagaaggaaaagacactttctcttactaaggtatttttgcctgttaactaatatgcagttgcagaatgaaccatagtctgtctgcatttcaaagagcactacaagttctgatatttaaaatgagtgtatatgccagtggcccaaggttggagaagaaagttggtaacaaattggaaggtggcagaaagcaggaaagaaatgtaacatatatggcagatgaagggttttaaaatagcttttacaaatcagcacagaaaagataaacaccatgacataaaaatg

SEQ ID NO: 89984 - DNA, 391 bp, Homo Sapiens
cggggcacagatcctgcgggcgctgcctcagggctcccatgttgggcactgcgagaacccagggtctccctcacctcgctttgtcttggccctagaggctgggcctgttaccccattttgcagattgagaaggcgctcagggagctgggtgctttgcgcaaaaccaggcagcgaggacagaagtcccgccgtgtggccctcatcgaagccccgtggggcctccagagaccacacgggcctgagcccctgcacttctgtgtcgcaggagctgatttaatggagttcctgcctcagaccacaaggttcggagcgcccgcccacccctgcccctcctgggcaccctgcccaccaggtcacctgcacctgctctgaataaactgtgaagtcaaaa

SEQ ID NO: 89985 - DNA, 373 bp, Homo Sapiens
ttcccccggttgggcttctctgaggcggcgagagatggtcaggtctggagctcgaccgggccagactttttaaaactgtggacttaaaagttctgcaaagtcttacacaaaagcccaatacagtacatgaactacggaaaagcagaactgctctgaacaaggaagaggtgggagatctgagtcctggccccagcacccacttcaacttcagtcacctccttggaatctggggttctgcagcttgaaataatcagtttggattttaaacttatttgtaacataataataatcctaggaactttaaaataatattttgtactaaattttagaattattataataagtgatctaataaaacagtcttttcctgaaa

SEQ ID NO: 89986 - DNA, 397 bp, Homo Sapiens
ccacaaagatttaaagttaaaaaacccctcacaaaaatcttcataggagttgccttataggtgatgggaagaagaaaacaacaaaggttgagctgtggataccacgcagagtgaccagctgggttcactcctttgataagactcacatactctgtctcttatcaagtgggctgttctgagccctgcttcaggaaaattacaaagatcagcttttgaggtggatcctcaaaattccaaaccaggtaaataaatctatgcaaaataatagctaatatttactgagtgtttttgtgtgccaggcattgtgctaagtgctttacatggatcatcttacttaatactcagaaccaccttatgatgtaggtactattatcctcattttagagatggggaaact

SEQ ID NO: 89987 - DNA, 723 bp, Homo Sapiens
catcgctgttccccagaaacccactctatcctcaccctgttttgtgctcttcccctcgcctgctagggctgcggcttctgacttctagaagactaaggctggtctgtgtttgcttgtttgcccacctttggctgatacccagagaacctgggcacttgctgcctgatgcccacccctgccagtcattcctccattcacccagcgggaggtgggatgtgagacagcccacattggaaaatccagaaaaccgggaacagggatttgcccttcacaattctactccccagatcctctcccctggacacaggagacccacagggcaggaccctaagatctggggaaaggaggtcctgagaaccttgaggtacccttagatccttttctacccactttcctatggaggattccaagtcaccacttctctcaccggcttctaccagggtccaggactaaggcgtttttctccatagcctcaacattttgggaatcttcccttaatcacccttgctcctcctgggtgcctggaagatggactggcagagacctctttgttgcgttttgtgctttgatgccaggaatgccgcctagtttatgtccccggtggggcacacagcggggggcgccaggttttccttgtcccccagctgctctgcccctttccccttcttccctgactccaggcctgaacccctcccgtgctgtaataaatctttgtaaatacca

SEQ ID NO: 89988 - DNA, 460 bp, Homo Sapiens
tgcgctgcagccaccgccgcggttgatactactttgaccttccgagtgcagtgacagtgatgtgtgttctgaaattgtgaaccatgagtctagtacttaatgatctgcttatctgctgccgtcaactagaacatgatagagctacagaacgaaagaaagaagttgagaaatttaagcgcctgattcgagatccttgaaacaattaaacatctagatcggcattcagattccaaacaaggaaaatatttgaattgggatgctgtttttagatttttacagaaatatattcagaaagaaacagaatgtctgagaatagcaaaaccaaatgtatcagcctcaacacaagcctccaggcagaaaaagatgcaggaaatcagtagtttggtcaaatacttcatcaaatgtgcaaacagaagtaagtgatgttataaattataaataaatggcttaacagattaaa

SEQ ID NO: 89989 - DNA, 395 bp, Homo Sapiens
agggaaacgctgccttaaatgttaatcttgtaaaaagtatgtatttggaattttcttcgttttaatagaatattataaagtcaaaatataaatttttttcaaatttggagtttaagatatagctgtagaggtggttttaattcctttagatgtctcataaaatgagactttttatatgttaatgtataataaaactgaaacaagattattttccatttgaaatttttgtatagtttaaaaaggcttccgtattctttgttggtattgtgcccctgcagaactttagtgcagagtttatatttagctaaactgttatgttaattaagaaatgcataaatcttctattcttaatatttgtaattctaaataaattgatctatgaaaattaaaaaaaa

SEQ ID NO: 89990 - DNA, 149 bp, Homo Sapiens
ttttaaatcattgttgtgagttttattagtcggtaatcttttactgcatgtatgaatgtactccactttctccccttggataaactggggtcttattttgcagtgctgtcaaactgtcactgttcaccagctataacaaagcacaccag

SEQ ID NO: 89991 - DNA, 516 bp, Homo Sapiens
aatgggggtcagcgcggcggaaccgagtggcagaccgaaaagccaatcgagatagagtactgggatgatgggcgggataaagaagcaatcacagaaaagcagtcggacctagtcaagccggagcagccctctagcgtcccaaacgaggggttcctctccgccccgtggttcctatggatgctgtttcccctcccccgggccaggtgtgagcacccaactggattgatgtctgccgcctgaaatacacttgatctgcgtttccgaagccaagcctcgcaccctgcaacaccgcggttcccgccctcttgggagccggagcgaggaggcggcagggtgctggatcacagtccctgcacctgcagaatgcggatacctctcgctccagatagggcgactgcccccgacctgtgctgtaccctaagttggcccgtctggcctctgtgctccagccctcttattttgggaaacaggagctacttaaataaaagctaaagggacctcagaggttctgaaaaa

SEQ ID NO: 89992 - DNA, 447 bp, Homo Sapiens
aaaatctctcagatggagcctgaaactccacaatttaacaagcgccccaggtgatttgtgcccaacaaagataaaaaatgaatgggttgaaactcaagcaaaagacaatgaagttggagcagccagctggactgcctgtttgagtaatccagttgatttacaaccacacaggactacaatggttaccatggagattcaagggcaagggtaaacctgagaactatttcaaaggaaacatcataaagaggtaaaagactggatttcagaaatggaagagagaaaagagaccaggagaactaggattgctgcctcctgagagtcagttagtgaccaagagtactcattaggcctctagatatcagggatattcttggcagtgagagcagagagaacaaagctaaaggtgctgaagtaaggtgacagcgctttaaagaagaagaaaaaaaa

SEQ ID NO: 89993 - DNA, 465 bp, Homo Sapiens
  misc_feature (400)..(400): n is a, c, g, or t
  misc_feature (404)..(404): n is a, c, g, or t
  misc_feature (417)..(417): n is a, c, g, or t
tttcaaagataaagcgtctttactgcagggccgtgatgagggctcccacgcaacacagcccacagcatgcttggcatgtgataaaccctagcatgtttctaatgttaccttgggttagaatcacatgaatgaggccaatccttccccaagtaagatgctctggtatttgaagtcaaccgccagcttcactggcgcaattctgtggccacagcccgggactctccaggtgctctctgtccaccgtttcttggagaagcttcactgttaatctgttccagtgttctctaaatggaacacaatatttgggctgagatgcactctcctcagaatgagaaggtgcctggtctgccctgacatggcttcctggggacgtgggcagaggggggtgtaggtggtgaanccgntctcctctatcancccgcgtggtgctcagttaacccttgggtgcatttcaaatgaacgaca

SEQ ID NO: 89994 - DNA, 405 bp, Homo Sapiens
agtatgcacgtagaagaatagaagatggttggagtgttaaatatgttccctagagaagggttctttgaagaaacactgcaattttgggtgttctctttcttgtttgcatatggccttacttatgtggaagattaatactgtgttataatattttctctttctgtttactgggaagattcagctgtacagattttcttttactttcaaatagaaatatttggaataatatcagtctttcttttttgtacattatgtggatatggatattcatggcagttttcagcctgttcttgtttctgttaaaaccgtatctttaacattttaatttgaataacttggtcttatctgatgcggaagactggaaactattgtgttcatgggtaaataaactacaaaatattaaaa

SEQ ID NO: 89995 - DNA, 396 bp, Homo Sapiens
taggggagagcatcatgggggcggccatcttaggggacgttcggtgtccgtacggcagaacatattctctctgagaagcttgcggtggaactggcccatggaaatgtctttagaagagaagaaccacctggctctgttcttgactctggaaaagaatccttttctagaattatttaggttgttgccagattaatttcctttagagagtttccttgcccccacgacttcctatctttaaagccaacaatagtatgtgaaatccctttcatatttgaaaccactgactattgctgctgcatctctccggtttctcctattcttaagtgcttgggcaatccagaataatctcccaatgctaaagtcagctgattaataaacttaattacaatgcaaaaa

SEQ ID NO: 89996 - DNA, 521 bp, Homo Sapiens
  misc_feature (425)..(450): n is a, c, g, or t
gcggccgcggcggtccagccaggggctcctaccccggggagctccctccgaggggatgttagacaaaggtctgtctacacattatttcgggttctggaggcgcctcgacatacgggaatgacacatccagaaatgcaggtgttccgatctgccggatgagtcagaagcagcggaacgaatcgtattcactctcgcctcatggtcctcccttcacagacattagttgcggcttcttcctaacgctttctctgactcagtctatagaaagaaaaaccagattcatgtttttggggaaaaagaaaatgcaagagaaaaggatggagggaagaaggtgaagctgaatctagcagcacttttactctacctctttctgccggagtccgaggttctggaaaacaaggcgtctgctttgctaggtgtattgnnnnnnnnnnnnnnnnnnnnnnnnnnaaacctttcctcttggttaggcgagaggtaccccgaaatttttcagagtcttggaaaaggaaaaacaaaat

SEQ ID NO: 89997 - DNA, 392 bp, Homo Sapiens
ttttcatacaatgaattaaaattgctaaaatcatggactggctttctggttggatttcaggtaagatgtgtttaaggccagagcttttctcagtatttgatttttttccccaatatttgattttttaaaaatatacacataggtgctgcatttatatctgctggtttaaattctgtcatatttcacttctagccttttagtatggcaaatcatattttacttttacttaagcatttgtaatttggagtatctggtactagctaagaaataattctataattgagttttgtactccccatatatggatcattcctcatgtataatgtgccccaaatgcagcttcattttccagataccttgacgcagaataaattttttcatcatttaggtgc

SEQ ID NO: 89998 - DNA, 370 bp, Homo Sapiens
aaatgttcacaaactggacttatcagtgagtattgtcattagtagtaataataaatgcttacactaacactgttgattctgtggtctccttcagttcacaactggtaatctcccacatctattccatttctaagctttgaatttaattgcctgaaattatactgtaccataaaattaccatgagccatatttgcatcgtagtttgctacagtttgtactgggcatggtaacttttcttaaactcttaaaaacattaagaattgctgtttaagcttaaacttcacagttaaggtcttgaaagttaagaatttgaataagagaaacaaaaattctagctggaggtttgaactttatatcaatagaaaatact

SEQ ID NO: 89999 - DNA, 401 bp, Homo Sapiens
ttgaccgttggctccggggtgggggtcgccgttcgagtgatctgctcagacccgaccagagggcgcgggctgctgatgcttggcttggagcccgtgggggagacctagttcggctccgccatgccggccgccgggagtaacgagccggacggcgtcctcagctatcagagaccagatgaagaagctgtggtggatcagggtgggaccagtacaattctcaacattcactatgaaaaagaagagctggaagggatatcattaggatctaattgcctacatgggagatagtgctttgaacacggtgaagtccaatataaatattaacaagtaacctgttctttgagaatgtgatgtactcagttcagtgcgttaattcttgacaactgcctggaaatacaaat

SEQ ID NO: 90000 - DNA, 400 bp, Homo Sapiens
  misc_feature (122)..(152): n is a, c, g, or t
attgaaaaccagcagtgatttgggtcccccttaaacctctgtgaatcggaggtgggcccaggagggtgcaggacgcagcagaaatagtcccagaaaggagagacgggtcatgcagcgggctnnnnnnnnnnnnnnnnnnnnnnnnnnnnnnncaccatacatctccaaatgaagtatttattaacaattgtagtgtaagcctgtgataaaatagcacaaaggttctttaaagaagttcacttttaaggcatcagaaaagttaatgtggcaaacattttaattaaaacatcagaagtaaattttattttaaactttaggcctctgaatttttccagtaaacacagttcagctatgtggcaaagtcaatgggtggcatctaaaatgactttttacattctac

SEQ ID NO: 90001 - DNA, 510 bp, Homo Sapiens
  misc_feature (53)..(53): n is a, c, g, or t
  misc_feature (77)..(77): n is a, c, g, or t
atgtttttgcagcaaacgcgatttaacagaagtttacaaagcaacactgtagntaatgcataattttaaaagttgantaacatttatctattgttaaagcaacactaataatggaataaaaggaaagcaaataggccaatgtggcaccataggcttattttaggtaaattagttccatcatcttatgcagttgtaagtaatgccaggattaaaatatcaagcaagccacgtaaacagtggcaaatgtgtgtgtgttttccatttgtttggtaagcagccattttactcttgcactgtaatgaactgaagggaaatataagataatgcttttttccccccatattgctattcaactacctctatatgcttgatttctttttaggattcccatcctccaaatctgtacaaaaacgtttcagctcatctgtgttgtaataacaatgtgatacagacagtttgtgtgaaagttgtttgttcattaaaaaatgtttcctattgcctcaaaaaaaa

SEQ ID NO: 90002 - DNA, 1104 bp, Homo Sapiens
  misc_feature (1006)..(1040): n is a, c, g, or t
ttaggattttgacactggagaaacccattcaagacgtcaagtttgaaaacacttgatcaaaacagaatcacaggtcactattaaaagagtattaatttaaccagagacttccaaagcaatacagaaacttacatggatataaaaaccctaacccttttaaaggtcagatttgctaagtgatcaaaaggggtacttgaattgaatcgacacaggaagagtgtgtacaggtttatgagtgtaggcagatggttactttggtcatatctccattggccacctgattacacatgagaatggcatctttactcaccagaaagccagtattataggaggtgtaggaggcattcttggacttgagacaagaacattgttgtgtagaaatttcattgactgtgttaaaattattctccatgggctggagaacacataacatggcctttagaatgagacgggcattgattggatgcaaggtctccacacttactagctgtgtgacattggacagagtgcttcatcattccgagactcagtttttaaaggaaaaacaactaccttgcaagcttgctggcaggtttaagtgtaataatgtgtgggaatgactgcaccgtgactaacatgcagtgacagcttaattaatgttaacccttatcattatcatataagaatgtgagttacataagagaggagtcctgtcagttcgttctctgctgtgtccccaagaccatgaatcatggctggcatgtagtaggcatttaataatatatgttcaacaagtatttggcagtcttggagggcagaaaaggaggtggggaagatttttaaataacattttcttaagaaagtcacacttgtcctacaataccgatttttctgtgcatatttaggaaattgaggatttttttctaaaacatgcggacatatgggaaataggatgcaacatttgcactaatgtttccccggccgtaatggccgaattcccgggcatatgtccggtaccgtcgactgnnnnnnnnnnnnnnnnnnnnnnnnnnnnnnnnnnncgccgcttcctcgctcacaaactccgctgcgctcgtcgttcgctctagcgctaagcccctatag

SEQ ID NO: 90003 - DNA, 450 bp, Homo Sapiens
agatgaaggttaatcaaggtcctcatggactgaaccttgaggcccttctgctgcagtcacttttgccctatcagacttttagagtaacttccctctctttatttcctctttggtggggttatcagaattattttgtgactattggtttcctttgcggtttttagtgaaattcagaatcatcttcgacggataggaaatagtgcaatcatatgtgtcagtattccggtattctaggaacttaagaaaatgcatataagggtttgaacatttttttcttcagctcactaaatgaacgaaaggtaggcgtaggcgttaaagagacacataatgtggaacgatgctgtattttcttagctactaaaacttcatttgtcattgactgtctcagggctttaaaattttatgtaggtctatattcagcttttattaaaatagaaaattccaagaaaa

SEQ ID NO: 90004 - DNA, 646 bp, Homo Sapiens
ttttagtattaacaactttgaccaggaaaaacaaaccctgcttttcctttacagtctctcgtcaggtcttcgccacaaatctctgtccagaggatcgtggctgaggcaccatggaatgctgctgttctactggagatgcaatttcatccaaaagaaaaagggaaaagtatccaaaagtctttctagtctccaggcatttagaaaagctttagaacaagatctgcactggcacaagaatttgagtggaaatcaccctgcccagctgtgagccccggggcgggtgagccacacacttggatctcactgcagttgtggcctctgggaagaaggctttgaatgcagattttaaacaggtactcaactcatactgagccacggctactttcaacttaacaatatgtgagaaacccatctgatcactgcagacctgctgaaatctgttacaactaatccttcaatcctcaccagaatgctggctgtcctgcctctgccatcgcgagagaagataaaagctactgggtggccacagggcagttatgtccccttctctaggttttgtgattctggcagttagaatgggtttccagacttttacaagcagaaacccttatacatgtgattatatgctgtccgtcaacatgtaaaa

SEQ ID NO: 90005 - DNA, 540 bp, Homo Sapiens
  misc_feature (203)..(255): n is a, c, g, or t
tttagtattaaatgaacagagatggtgagttctttatttacaattattgtctagataaaaaaattcataaaaacagatgaatggtcataaattatttaccccctaatggagtgaactgccaaacgtaccccatgctgctagatataggacgcagagtgcaagctttatgtactacagtgagttttgacaaaccaaccatttcnnnnnnnnnnnnnnnnnnnnnnnnnnnnnnnnnnnnnnnnnnnnnnnnnnnnncaagcatccttcattcctgacaagagaagaccaacgctaatgttggcattcttccatcgctccctgttccctaagccaggctccactgagaacccctcctggctccaaatgaacatgcagcatggtgtgcaaacacagctatcctgatgtcatggaacgaggtcacggacacatgactgatcaaagaagtggggagatggaaaactgtgagaaaggaaactccaaaaaacaccatgttccaaggctgccccatgttttacacgtgcagatctttccttccttgta

SEQ ID NO: 90006 - DNA, 411 bp, Homo Sapiens
tttttttatctttggaattcatttcattaaggttttcacaaaatacaaagctcaaacgtaatcatctatgtccaccacaaaacagaatcaaataagtggttagcacaacaaacatagtgatcttttccattttaaaaaatataaataacaatgttcaaggttttacagttttcttagtgtgtgtctttttaaggctttatgttgcagacccttcattaatggtacttgtaccctgccatcaggatacactgcccaccagcaaggaaggccactgtggatacattcctgagggggacacacactgatccatgttgcctcagcctgttaaaaactaaatgatcaaacaccctccaatcagttctcagtttcattaactttctttctactacaaagtaataatagaaaggggta

SEQ ID NO: 90007 - DNA, 803 bp, Homo Sapiens
  misc_feature (34)..(34): n is a, c, g, or t
ctcgcctgccgggtatgccaggccgcagcgtcanatcggctacctcctggtgaagcacagccagacggaccaggagcccatgtgcccggtgggcatgaacaaactctggagtggatacagcctgctgtacttcgagggccaggagaaggcgcacaaccaggacctggggctggcgggctcctgcctggcgcggttcagcaccatgccctttctgtactgcaaccctggtgatgtctgctactatgccagccggaacgacaagtcctactggctctctaccactgcgccgctgcccatgatgcccgtggccgaggacgagatcaagccctacatcagccgctgttctgtgtgtgaggccccggccatcgccatcgcggtccacagtcaggatgtctccatcccacactgcccagctgggtggcggagtttgtggatcggatattccttcctcatgcacacggcggcgggagacgaaggcggtggccaatcactggtgtcaccgggcagctgtctagaggacttccgcgccacaccattcatcgaatgcaatggaggccgcggcacctgccactactacgccaacaagtacagcttctggctgaccaccattcccgagcagagcttccagggctcgccctccgccgacacgctcaaggccggcctcatccgcacacacatcagccgctgccaggtgtgcatgaagaacctgtgagccggcgcgtgccaggaagggccattttggtgcttattcttaacttattacctcaggtgccaacccaaaaattggttttatttttttctta

SEQ ID NO: 90008 - DNA, 312 bp, Homo Sapiens
acaaatgaaacagaacagaaagtaacacaaatattggtggaattaaggtcatctacatttccagaatcagctaatgaaaagacttattcagaaagcccctatgatacagactgcaccaagaaatttatttcaaaaataaagagcgtttcagcatcagaggatttgttggaagaaatagaatctgagctcttatctacggagtttgcagaacatcgagtaccaaatggaatgaataagggagaacatgcattagttctgtttgaaaagtgtgcgcaagataaatatttgcagcagccccatatcataaaacaa

SEQ ID NO: 90009 - DNA, 457 bp, Homo Sapiens
gttagatccgtaaaagtgaaatggcatggccaaagggtatgcaaatatattttattagataattccaaattgcccccaaaatgtttgtagcagttggttgttcctgccaacaattatgaagctgcctagtttttcacagcctcgacagcaatcaatgttaacaatatatgacatgttgacaatcagatttggcaaaaactattttgttgttattcacttccttattcctttaatcaataccggggttgagcatcttttcacagatttatttgccgtgtgtacttcttttttgcctataagtattctttatccctttagggtattgtctgtcattttcttccaatgagttggatttctctgaatatgggatattaatagtcagttgtaaatgttttccctcccttgtttgtcacttacgttttaattatgtttagtctggtttttattgggaaaaagt

SEQ ID NO: 90010 - DNA, 479 bp, Homo Sapiens
  misc_feature (17)..(17): n is a, c, g, or t
  misc_feature (64)..(64): n is a, c, g, or t
ttacaatatcatcaganagtccatactggtaaaagctttagaaatgagaaatgtgttaccaacnttttgtctgaatgcacatcttcaagtttttggctagtccatgctggtggtaaaccctgtaaaactactgagagtggaagggggtttgttcacacttggaatctttctaacaaatccatcaagatgataacacagaaccatgaacaggaatagaactcgtatttaggggagaaatagggctggtggctctcttggtaagatctagttaatataaatgatcacctttcattgtgaatatatgcctgaagataatgtgtggaaggatatttgccatatgctaactggttttttggccagggagagttttgggttattatcccttttctttaattttcattttatacttacagtgatcattattttcataaaagctgtaaagctatgaaaaatgaataaaattactaaaaattttctgt

SEQ ID NO: 90011 - DNA, 465 bp, Homo Sapiens
agagtttcagaaaggcagcttggcaatatatatattatcactcttaaaaatgtttatgtatccaagacagattttcagaggaagaaatgcaagttttcaaaagaagaaataaaaactggaagaagggtttaacctcatggataataaaataaggaaataataatttttccttttcaatacttagccaattttgtgatttcgtttgtttttagctcaagaaagaattccacattttagcaagtggcaaagatgttggtttgttaacagttattcagattgctggtggggtgtgtgaagtggtccaggctttctaggggatattttgttaatagtagttgaaactgaaaaatatttggaacttttaattctgtgattttactcttctggtaatttggaaaacaagcagaaatgcttgtaaatatatgagtattgtagttcactcactgttgacagaaacaaagctgg

SEQ ID NO: 90012 - DNA, 724 bp, Homo Sapiens
aaaaaaatttttttgttatctcatttggtgtgaatattcatagatattgccacagaaatattaatgtgtttaattatggattactgccttggaccctactggaagtggtctgtaatattcagtatattcagttttgcctttttaaaatgtaaagacttctgaattttaaagctggaacctgaccctaaggatgccagataaaggattatggagctgaagtaagtgccaaaggttgggttcagaccccaggctttctggcttcaacactgtgtacataacttttatactagagagagcataggtgaggttaggctctgctctttgtcctatgagtgacacaagtacactgactctgagccatcgccagacagagacatttcttgcaagttatagtcaaatagctttgatcgttccccaaattcttgcagctctcatactgccccgcaatgtggatgtagcccactgcatggtactccacccggaaatcctccatgctccagtgcctcttcttacttttacgccagacttcctgttcctgagtagatcagtgtcagatgggtgttaggaagaaagtaatctagctgaagtaatttaggctcatcaaggtgtgaacaaacttcttaatattcatacagccgtctgcatttttaaaagagcatttgtttaccgggctactctctctctaattggagacaggtcggttgggcacttcaactaatagatt

SEQ ID NO: 90013 - DNA, 769 bp, Homo Sapiens
  misc_feature (421)..(429): n is a, c, g, or t
tttcccttacagagatacagacagacctattggtcagggtgagaacgcactgcagcaattgcctactgcttctgttagcaagaaggaggtcttgagggaagcacggagaacctaaagcttcagctcataccttagtgtaccctttatgcaatgtgcaaacttaggctgactccttcacatgcttctcctgccgccctcggtgtacacagcaggcttatggtgaaaagaagcctctcccttcatcactagtgttattttgctaaccctgtctccaggtagcagcagcaatccgggactcctctgatgcttcccaggcttttacgtgaccaacacacaccgtggcacgggaacgagatgatgaagggcagcaagtcccattgtactgttccttttgaatgacctttctctccagactatactnnnnnnnnntttacaattccaaaaaacctaggtttctagctgaccctctgttctaaagagaaaatcagctgacttcaacaacaaccacaacaacaaaaaacaaggtgcttgggagacaaaacatatcaaactttaacttgcatagctgttaaattcttcagaattctgctttaggccttaaagcatctgcatttttattggtattgaaagcaggaataaaatccaaatgagtgcaaacaacaacaactacaacaaagcgacttcagcgtattgagtgcagtctgtatgcccgtggggtgggcacagggtatgttagaatgcaggctgtctgctcaaccctcagcaggcc

SEQ ID NO: 90014 - DNA, 498 bp, Homo Sapiens
atcacaattcccagtgctgaagaaaaggccaaactctgcaaaaaatcttgaatatttgagccaaagtgtgaggactacaacctgtgagaacggaaaataaatcctgggaccccagactcactaagccaaagggaaaagccaagctgggaactggcttatgcaaacctgcttcccatctggttcctaaataagatagctattacacaaagataaaaaagctacatccctgcctctacctccatcgcatgtaaaatgtgtattcagtgaacgctgaccaaagacagaagaatgcaacaatttgcctctgatttacccacacccattttttccacttcttcccctttcctcaatacccacacttttcccctttacttactgaggtccccagacaatctttgggaaaagcacggaccacagtttttcctgtggttctctgttcttttctcaggtgtgtccttaaccttgcaaatagatttcttgaaatgattgacactcaaa

SEQ ID NO: 90015 - DNA, 306 bp, Homo Sapiens
aacttctaagttcaggggtacatgtgcaggtttgttacacaggtaaacttgtggcatggggtttgttgcacagattatttaatcacccaggtattaagcctggtacctatgagttatgtttcctgatcctctccctcctcacaccctccactgtctgataggcccccgtgtgcgttgttcccctccacctaggacttttaaaatagggtagttatttcggtagaaacaaacaccagccccacatgtgtgtgaatgtgtttccattttggcatgaacatggaaaaagatgtggaaaggcacatatga

SEQ ID NO: 90016 - DNA, 461 bp, Homo Sapiens
gtttcactggggacctacctctatctgcctagtaatctgtgtctcctgtagctatcatcatcactgattttctacgtacagatttcaattccaaacaaaaatatatgagaacgttcatttctccatacaactggctgggtcattggccttatcccgcaccgaagttgaaacttacaccatctgttcacatcatcagttcttctggttctcatgcttttgaacttcaactggcacaattccactggctctccttagtctccaggttgcagatggcagattataaatctccttagcctccacctttataatcctaactattactgacacctctttgaggacaaaggaagtagctttctgcaagccaaaaagacctcagaaaaacaacaaatcttccaaactcttgattttgactttttgcctccagaattgtgaagaaataaatatctgttatttaagtaaaa

SEQ ID NO: 90017 - DNA, 386 bp, Homo Sapiens
gaagtgatatagccaaaattgtaatttaagaagccctttcccagtatagcaagatgttaactataagaatcaatctaggagtattcactgtaaaattcaacttttctgtatgtttgaacattttcacaatctcataggagtttttaaaaagaagagaaagaagatatactttgctttggagaaatctactttttgacttacatgggtttgctgtaattaagtgcccaatattgaaaggctgcaagtactttgtaatcactctttggcatgggtaaataagcatggtaacttatattgaaatatagtgctcttgctttggataactgtaaagggacccatgctgatagactggaaatagaagtaaatgtgtttattgataaaaaaaa

SEQ ID NO: 90018 - DNA, 474 bp, Homo Sapiens
ctacacattcatgctgctttgatagaaccatgaaatactgcatgaatgtgtagaaatgaaagaaaaagaaacagacaaaagaaacaaacattaaccaaggaacctaaaaaatccccaaatccattactattaagagttccttccaaattcagctatcttagttttaccaattaagactattccttaccgtagactatgtctactgttctaaaacactgaccaagagctaacaccgaagtgtaatagctaaatctggagggaattgtatttactggaggtaacattaatacagcatatcataccagaattaaattcaccaacaatagaattctgaatgaaatattcccctaattctatatactgttatattcctaaatacttcacttccaaaaataggtctagaaaaattactatggcctgaaaatatttatgaaagtcatttatatgatatactgtattatgttcagggattgg

SEQ ID NO: 90019 - DNA, 600 bp, Homo Sapiens
  misc_feature (20)..(20): n is a, c, g, or t
cagatattcatccacttcanagttgtataaaattaatcaaacttgatctccatggaaatcagataaagagtctaccaaataccaaattttggaatggattgaagaacctaaaactactctatcttcatgacaatgggtttgcaaagttaaagaatatatgtgtattatctgcctgtccaaccctcattgccctcactatgtttgattgtccagtaagccttaaaaaaggatatagacatgttcttgttaacagtatatggcctctcaaagcgctggatcatcatgtgatttctgatgaagaaataattcagaactggcatcttcctgaaagattcaaagcatgtaaccatcgacttttctttaatttctgcccagctttgagaaaggtaattggcttctttagggtttcattttaattaaatgtataaaagggaaattttagcttctgagttctatatctaaattatataaactttttaatatttttgcatcatttatataaaataatataaaccaatgaatatatttgtaatgtctttctatctgaaacttgataaaagtttgcatgccaactacattaaacaaagcctgaaatgaaaa

SEQ ID NO: 90020 - DNA, 444 bp, Homo Sapiens
  misc_feature (229)..(237): n is a, c, g, or t
ggatagagggctggaatttaaacctgtatttaaaaaaaagaatcaccaaatctatttgaaaacaagtcgatttgtattatgctggaattttttgggctttcagatttctctttttaaccacatttctgaatgtataaaaataccaattattttcctacagccctttgtacttcaaaatatgtttttgtgtccatcagtattaactattggtatactactggttttatannnnnnnnnctttgagacaacagtacatataatagaggtacaattcgttggatttttgtttatgtatttatttcattccagtttgatttattttaattgttgatacttaagttgtcaaacagtagacattacgtgttttatttatgatatatttcagcttaaagttatgttattatatgtggaagtgtaaatatagatttggtgttttgcaaaaaa

SEQ ID NO: 90021 - DNA, 518 bp, Homo Sapiens
acacaacggggcccaggttttggcagacccaaataactgggccatgttctttttggttcatgctctgattggaaggattttacccttggccggtggttctcaccaaggaaaagtgttgctctccttgggtccccctgcaaaccaaacaaggtgcccgaagatggtgtaaaaatacagatttgtcccacctggtttcaccccactttcctctctggtcccaggcctcagggtctggacatttctgccagggaacatctgttctgcagagcagccaggactccccctgccaccccccaccaaggagtggttctaagttagctttctcataaacggttctcacatggaagaaaagcagtgtcgctgaagccacgtcaatctgagcggtaaaaggtttgggcaaaaacatattttattgttcttgctgtcagaaacataaagattgaaggggcatgtgactcggtaattgctgtggactttttttcccccttgacaataaacataaaacttaaaactgaaaa

SEQ ID NO: 90022 - DNA, 626 bp, Homo Sapiens
  misc_feature (107)..(107): n is a, c, g, or t
  misc_feature (291)..(302): n is a, c, g, or t
tttttggaattcactgatttattattgaaactgggcaagattcacagctaattctttagcttacagttgttaaaataggattcctaccacacttcatttaagaaganaagtttgaaattctaaaataatgaatttcatttatggcagactgacatattttcattttactcaggaaccattcctaataattaaagactaattattaatgatctccaagatggtagcttgttgctagcaaaatgctaagaaaaaaatatcaatctcaaattacagtgcatttctagaatattnnnnnnnnnnnngtcagagaactggaaaccctcatacatggctggtgggaatgaaaaatgatgcagccactttggaaaaagtttccgtttctcaaaaagttatacatagaactaccctacgacccatcactttcattcctaggtatctacccaagacaaattaaaacatacgtccacataaagacttgcacatgaatgttcacagcattattcataactcgaaacgacctaaatgtctgtaaactggtaaatgggtagtgtttcatcctgccgaacccacgactggggtcgccctctaagagttcattaaaattaataaggtataattacctaaaa

SEQ ID NO: 90023 - DNA, 453 bp, Homo Sapiens
  misc_feature (57)..(57): n is a, c, g, or t
  misc_feature (91)..(105): n is a, c, g, or t
  misc_feature (270)..(278): n is a, c, g, or t
gatcttcttgactatgccagttgtagtaccagcttctgtatctgcactgaattctgnctcagtaatatgcctttgtttaaaatttaaatannnnnnnnnnnnnnnaacctagaaaataattataatgaaaatattaagtatctcattttaggattctgatttacataggtatcactgtaacttgtgctgtttgcataggtatactctatcttgtgctatctgcataaaatatccaagtaaacacattgtgattttacatccgtgcatagnnnnnnnnntcatctgaactcaaatcaatctgttgatactgactagattggtgacgtgtttatgtgtaacactagtgataatgcacgttcctgtacaagcattataatacaacagtgtcctatgcaatgcagtggttaaagtgaattgtagttctatcaaaataaagatacgtttagtggaaaa

SEQ ID NO: 90024 - DNA, 353 bp, Homo Sapiens
caagtacacacgtgaaggcccaacagtgataagaagcttggcatcaaaaatcactagaaagtctcatgctttttatcgctatttaatccaagtgactgtcacttaattttaataatgctaaacaaactagtttgagagaaatctcagccaatataatttccttaagggcaaggccaatatttcctgaacattaaaactttgtacccatgtaatagtttttcctcattaccctaaggaaaaaagagttgaaaccaattcaaattactgattgaactgaattaccttggaagtaaataccattgaaatatttttactctttacttttctaaataacaaaataaatactgtactat

SEQ ID NO: 90025 - DNA, 444 bp, Homo Sapiens
agagtgctgatttagaagaatacaaatcatggctgaaaatagtgtattaacatccactactgggaggactagcttggcagactcttccatttttgattctaaagttactgagatttccaaggaaaacttacttattggatctacttcatatgtagaagaagagatgcctcagattgaaacaagagtgatattggttcaagaagctggaaaacaagaagaacttataaaagccttaaaggacattaaagtgggctttgtaaagatggagtcagtggaagaatttgaaggtttggattctccggaatttgaaaatgtatttgtagtcacggactttcaggattctgtctttaatgacctctacaaggctgattgtagagttattggaccaccaagttgtattaaaattgttcacaaaaaggagagcctttgccattgtcatgtcgc

SEQ ID NO: 90026 - DNA, 512 bp, Homo Sapiens
  misc_feature (445)..(445): n is a, c, g, or t
tacttccaaaacatacctcaaatctgtttacctctgcccaaacccaactactgtcttgctgaccacctctgatacatctatagctgatctctcagcctctctgccttgatcccatcaccctacccctagtcactacagtaatctcttaaatatatgaatcatgtttctctctggttgaaaacccttgagtgtgatgtcaccactgcatctggtagtactacattgttggctgatataaaatgattagcaacataaatatatttcacatatttaatgtatgacttattcctttggaaacagaatttcgcaggtgcttttaaaaaaacttacttggataaactccaatttaaattcatcaaagaagttaaagcttattcataaagaatattaaatatatttcagtatttgaaagatgtttcttagatgaatatgctaagtgactaanagtgtcttctttcttaatccacttaccaattctcaatgaacaaatgtcttcagtaaagaagtatctc

SEQ ID NO: 90027 - DNA, 214 bp, Homo Sapiens
atgttgccctccaaaaattacactggttagtgtctctggagccctaaaagataccaccttttacacaaagctgaaagcagtagactttgggctgcagtccagtagtttcttttgtcaccgttttctgtttctttcctctttctctgctccgttttctctccgcccttctgtcgtcttctcgcagccgtatagtagtagtaggcggccgctctag

SEQ ID NO: 90028 - DNA, 213 bp, Homo Sapiens
ccttatctcctgatcttagacattggcctctcttcctcagtgtactgaatcagcttatgctataattttggtgactcatattggccctgatcattattggaatcccgtaagtttcatattctgctccaagaaacatttggataaattgagaaaaactaatagcctttcatggtaataacagtctactcccttctgtcgtcttctcgcagccgt

SEQ ID NO: 90029 - DNA, 168 bp, Homo Sapiens
ggcatttaacaatcagatcccaaaatgtctttcctgactggctcccaccgcttctctggactgttccaggaccctgactagtgcatgcactctgtaaggtgcttgtgctggtccctcctcctgatagcccttctgtcgtcttctcgcagccgtatagtagtagtaggc

SEQ ID NO: 90030 - DNA, 192 bp, Homo Sapiens
agagcggccgcctactactactatacggctgcgagaagacgacagaagggggcacctggaggcgtctgcagagtgtgcgcagttcttcagtatttagagcatcgatcctgcggtgatactcagccactgacactacctaaatatggagacaggaagacaataattccactgacagttgagaaaaacagcaag

SEQ ID NO: 90031 - DNA, 147 bp, Homo Sapiens
gcctactactactactactatacggctgcgagaagacgacagaaggggactatagggacaaaacttacctactaaaagactataacaatttcctcataagccatcagccccaggtgctaatgagagaaagagaaaaagattaagaaa

SEQ ID NO: 90032 - DNA, 127 bp, Homo Sapiens
agagcggccgcctactactactactatacggctgcgagaagacgacagaagggagaagaggaagaacgtataaaacggcttgaagaattagaagccaagcgtaaagaagaggaacgattggaacaag

SEQ ID NO: 90033 - DNA, 166 bp, Homo Sapiens
ctactactatacggctgcgagaagacgacagaaggggcaactaatccaggattggggtcagggaagtagtcagaaaataagtgatagacgtgacaaagcctgaagaatgaatgaaagtcagccaaagacgtggagaaggggaaagtaaagggcttcaagcaattgt

SEQ ID NO: 90034 - DNA, 190 bp, Homo Sapiens
acggctgcgagaagacgacagaagggcctggagaatgactaaaggatgatgcagaactaaggaagaccttcaacttgaaacaaggattgtatactttgagacttaaggcatcagttggtaaatttttttctttaaagggccagatagtaaatattttaggttttatgggaccacatagtactgtcgcata

SEQ ID NO: 90035 - DNA, 959 bp, Homo Sapiens
ttgtgtccatgctggcaagtggcctaataaattgtccttttatttggtggtcctcagagtggcagttaacatcttgctattctgccttgtggacttgaggtggaaaggttcatggaattatatccttgcttttggatgtgcaaactgaggctcagagagtttaagacacatagtcactttcaccaattaaatgatgaagctgccatgtaaacgtatttcatcacactcccgagaccttcttctccagtagtgttttcaagctttttgagcatgcagacactaccatcaaaaaattatgtagagacatacttgagagttacagtttaaagaaaaacaaggtgtaattatttggttattagtagcatttacatatgcttgaaaacttctgctatatatacagtaagattaatttattctaacaatgatcttgataatccccctgattcccagactccttggaatagctccacagctatcagtggttctgccacaggttcagagccttcccagtactgccttcttatttgagaggtgtgctaagagctataaagcagaggcttcaattgtacacaatttggaagtttaggcaaaagtcatttcttccctatattttgtcatgcttatctcctgtctctttctgttttacagattagcaataaactccttaaaacccaaaggtttgggcttctgttcctttcacttgcagtcagacatggagttagtggtagaagaaacagaaggggtaacctgcatggtgacagctactgaggggatggataggaaagcaggctgagtccctggggccagtggttaccaaagccaaggagagagcaaggggagcccagtgggcctggccatggactgctctggaattccgagtgtgaactttcagccaagaaggtagtgtgaaaatattactgtgaggttttaaaagtacacaaataacaattgttttttgt

SEQ ID NO: 90036 - DNA, 280 bp, Homo Sapiens
gcctactactactactactatacggctgcgagaagacgacagaaggggtaacctgcatggtgacagctactgaggggatggataggaaagcaggctgagtccctggggccagtggttaccaaagccaaggagagagcaaggggagcccagtgggcctggccatggactgctctggaattccgagtgtgaactttcagccaagaaggtagtgtgaaaatattactgtgaggttttaaaagtacacaaataacaattgttttttgtaaaaaagaaagagaag

SEQ ID NO: 90037 - DNA, 321 bp, Homo Sapiens
tatacggctgcgagaagacgacagaagggcaacagtacaggaagttgggtagatgtggggacaacagagagactgtggcagaggcaggactgcagatctatggaaattgcctggaagagtcagctgtaagggatgagaatcctgagggtaaaagagaaaagggaaagactcctctttgatcttatgaagctgaaataacaagatcttaaacatgagtgagaatctgttgccccaacctaaggtgactttaaatccaaggtaaaaaacacggcatgggtattagtttgaatagggaaaatgagaactctctttgagctcaag

SEQ ID NO: 90038 - DNA, 135 bp, Homo Sapiens
tatacggctgcgagaagacgacagaagggagaagaagataagatgttggaataattaagtaaagacaaagaagggaatagagaaaagatgtaaccagaggaggagaaagagattaaatgtatgtgaatgttttgc

SEQ ID NO: 90039 - DNA, 213 bp, Homo Sapiens
tatacggctgcgagaagacgacagaagggatacaatatttgaacagatcatggctaagttttccagaattaataaaagacatgagcactagaaacagtcacaagaagtaccaaaaaagaaaagtccaaacttagagatgttgcagtaagacttcaaaaggtccaggatacagagaaaaatcttaagcttgcagagagaaaagacagattactc

SEQ ID NO: 90040 - DNA, 457 bp, Homo Sapiens
  misc_feature (50)..(69): n is a, c, g, or t
  misc_feature (71)..(211): n is a, c, g, or t
gcctactactactatacggctgcgagaagacgacagaagggtttcattcnnnnnnnnnnnnnnnnnnnnannnnnnnnnnnnnnnnnnnnnnnnnnnnnnnnnnnnnnnnnnnnnnnnnnnnnnnnnnnnnnnnnnnnnnnnnnnnnnnnnnnnnnnnnnnnnnnnnnnnnnnnnnnnnnnnnnnnnnnnnnnnnnnnnnnnnnnnnnnnnacttaacctatattttactttatttagtccaatattaaaacataccaacttactacttaatagactatatactccagtatttcaatctttaccatacctctttcttcaggaacaaaaggcacacaatttaacacttgcacaatgtcacaatcaggaacagtgatcaaaagaagagatgatatctggaaatgaagaccaagattttaaaacttttgacgacaaaaactgttcaattacacttcacat

SEQ ID NO: 90041 - DNA, 362 bp, Homo Sapiens
ggagagaggaggacgcgaatcacacccgatgctgcgcgccagcccgccccgtctgtacaatgggatgctcgggactcggacgggaggatccagtgactgcgagccccgcattcgcccgatcccagcctcacacccccagccagcccccagagaccctcccacacttacgaaggaaatgcatgcggccaggaggagaatccgcaccaggagggagctctacccaggaaaaagaagaaaaggacagattcatttggggttcagcctcatgccccccacacccaagactttgtggctaagagaatcaggccaccttgaggttcatcaagttcatcccattaaaacctcccaaaactctggaaaaa

SEQ ID NO: 90042 - DNA, 694 bp, Homo Sapiens
  misc_feature (158)..(158): n is a, c, g, or t
ctagggtgaaggggaagctgggaatgtgacctgatcctccctgtggttctctgatatctaccaaggaaaagtgccctctgataggagctttgagctgggagtcagaatacctaccttctagttctggccctgactcataactgctgtgacacttgttnttggtcttcccgtctgtgaaatggtgttgattctcaatgcctctttgagttccttcttggtctgctattctctccgtctgtgggtacccccccatgtctactggtgggctggggtgttttaggctccatccctggctgcacaactgattcttggtatgaccttaggcaagcagctcttctttcctgaggctgtttcctcatctgtaaaatggggctaaaagaccctaatgctgtaacgatttaatgaagttgctttggtaaatccctttagtgcctgacacatatagtagaccctcatggaacagtagcatttgtaaaacccagatgccattttcactggtgcctcagagtcacatgtgtttgttgaaagggtggagtgaatggtctcctctctattctgccaagcagaagaggctcaggcaatgggctctattggactgggaaaaaacttatccctcctacccctctggctcaagtttgtgttttccctgggatgtttcccagaggaagagctgggtttcggggcatcttggaca

SEQ ID NO: 90043 - DNA, 179 bp, Homo Sapiens
ttttttaacagggagaaatggaaattttactgctttttgggctttttcttttaataagataacatgataaataaaacctgcttctgtacagctatttaatatttcagaaatacgtacatgttacgtgccaagaagggaccctggtttgcttgtaagaaacaaggcgagatcacagttgg

SEQ ID NO: 90044 - DNA, 380 bp, Homo Sapiens
agagctcctgagaggtcagcgtggctgacagggaaggctgacagcaggaagaggggagatgctcctaagaacagtttgaacacacgatgcataaacaacctcccttcctatccacacaaggtgacagtgaaaaagacaagcaaatgtaaaggaggtgatagactcttagaagctaccgtactcgctcgtggatagagtgatggcggcagccaactctgccaaacctgctgctcctggcaagtcccacagccagtgccatgttgggcacggtcatctctcttggactctgacactgcctcgcggcagcccttgttcctgcagcctcaccccagtggcttgttctatgctactaacaaattagaattggttgcctcctgaaa

SEQ ID NO: 90045 - DNA, 850 bp, Homo Sapiens
cagtcgacggtaccggacatatgcccgggaattcggccattacggccggggcggaaacagcagctggtagagcttggtcttcttcgtgaagaggaaaagcaaagggctacaagggaacatgagattgtcgtcaataaactgaaggctgaatcagaaaagatgaaaatagagctgaaaaagactcatgctgctgagacagagatgacactggaaaaggccaacagaaagctgaagcagagtgagaaggaatacactcagaagcttgccaaatcttcacagatcatagcagaacttcagacaaccatttcctctctgaaagaagagaacagccagcagcagcttgctgcagaaaggcggctccaggatgttagacaaaagtttgaagatgagaagaagcagctgattagagataatgaccaagcaatcaaggttttacaagatgaattagaaaaccgttctaatcaggtgcgatgtgcagagaaaaaattacaacacaaagaattggagtcacaggaacagataacttacatacgacaagaatatgaaacaaaattgaaaggattgatgccagcatccctaagacaagaacttgaagacaccatttcctccctaaaatcacaggttaattttctgcaaaagagagcttccatccttcaggaagaactgactacatatcaaggcagaaggtaactgcacgagagaatgcaacggatgcaatttccaggctgtgctgtggacttcttccagcaggtttgaagatttggatattgtaaactgtgagatcagtggcattttttaaatccttaaatgtaattaagatcataaaaacatgcatcattcatacactaaa

SEQ ID NO: 90046 - DNA, 371 bp, Homo Sapiens
tggccatgggaagaccccatggagtgtcagaatgatgccgttgagggcaaggattttagaccggtcatggattctgcctgtgcactgggcttctaccactttctagctatctggctactagcaagttaccttaacaatctaagtttcaacctccccattcgtgaaatggagatgatgtcttagtcatagaagtagcaagtctactgcatatcaacagtgtagcactgagcctggctctttctatttataaggaaacaggccgagagacgcaagtcaaacagcaaaggatggtctgctgtctgtctgactccaatgccaatggtctttcctctataacctaaagcaataaaacccctgcaacatctaaaaaa

SEQ ID NO: 90047 - DNA, 535 bp, Homo Sapiens
tgaactatcacatgagagaagaggcccaaaagcttgcacactacagtcaagctggcccttaaagagatggacctagaagatgctgagccagatgtactcaattacttctccaaaattcatcaattagaactgcttcttgctgccgccatatgaagaaggacgtgttcgcttccccttcctccatgattgtaagtttcctgagacctcgccagccatgctgaactgaatacaacatgtttaagaccacagaacatctgcataggcgggtaaatttcgttgaatgatggatgcaaagatggaagacagatggatagaggaaaagacagaatcagatactggatgagttagtactgctgcctgtgcttcagagctgtcttattaccacaaggccggcaagcatcaatgtccccacatccccctctgcctccccctgaaatgtaccgatttatatgaaaattaagattacaaattaaagcctggctatcctggagttttccagttcatcagccatccaataaaaatgatgtcaagcctg

SEQ ID NO: 90048 - DNA, 432 bp, Homo Sapiens
agactccagatttccctgtcaaccacgaggagtccagagaggaaacgcggagcggagacaacagtacctgacgcctctttcagcccgggatcgccccagcagggatgggcgacaagatctggctgcccttccccgtgctccttctggccgctctgcctccggtgctgctgcctggggcggccggcttcacaccttccctcgatagcgacttcacctttacccttcccgccggccagaaggagtgcttctaccagcccatgcccctgaaggcctcgctggagatcgagtaccaagtaagtgcggaggataaaccagcctccttcctttaacccagctgcactgcgttgtcgcctctcacccgtttagaaacttctggtggacggccctggtggtgaagaggcgagggccgttcaggaagccagcccgctccgc

SEQ ID NO: 90049 - DNA, 733 bp, Homo Sapiens
gtttcttcagactccagatttccctgtcaaccacgaggagtccagagaggaaacgcggagcggagacaacagtacctgacgcctctttcagcccgggatcgccccagcagggatgggcgacaagatctggctgcccttccccgtgctccttctggccgctctgcctccggtgctgctgcctggggcggccggcttcacaccttccctcgatagcgacttcacctttacccttcccgccggccagaaggagtgcttctaccagcccatgcccctgaaggcctcgctggagatcgagtaccaagttttagatggagcaggattagatattgatttccatcttgcctctccagaaggcaaaaccttagtttttgaacaaagaaaatcagatggagttcacactgtagagactgaagttggtgattacatgttctgctttgacaatacattcagcaccatttctgagaaggtgattttctttgaattaatcctggataatatgggagaacaggcacaagaacaagaagattggaagaaatatattactggcacagatatattggatatgaaactggaagacatcctggaatccatcaacagcatcaagtccagactaagcaaaagtgggcacatacaaattctgcttagagcatttgaagctcgtgatcgaaacatacaaaaaagcaacttggatagagttaatatctggtctatggttaatatagtggttatggtg

SEQ ID NO: 90050 - DNA, 376 bp, Homo Sapiens
  misc_feature (24)..(24): n is a, c, g, or t
aaatattattgcaatctatgaganagccattctggcaggggctcagcctattgaagagatgcgacacacgattgtagatattctaacaatgaagagtcaagaaaaagctaatttaggagaaaatatggagaagtcttgtgcaagcaaggaagaagtcaaagaagtcagtattgaagatacaggtgttgatgtagatccagaaaaactggaaatggagagtaaacttcatagaaatttgctatttcaagattgtgaaaaagagcaagacaacaaaacaaaagatccaacccatgatgttaaaacccccaatacagaaacgaggacaagttgcttaattaaatataatgtgtctactacgccatacttgcaaagtgtg

SEQ ID NO: 90051 - DNA, 542 bp, Homo Sapiens
ttttttcccccagaaaaagggccaaaaacaagggttccctggggctgcgggccacttctagttttgggactctggaagatggagagttttgctaatgatgcgcggctgcttaagaaccaggtggcttttctggcaatcactcttcgggtgccatcttttataaaggtgcttcttgttgctaagagatcagatgcttagagaccaaaccattaaaaaaatatatatgtcaggggccaacataaattatagccaaattttgtcatttcagcttcgccccctgaatgttcggcttttgtaatagatcgtagcgtaccaagagaagctaattactaatcacaaatagaaaactgaccatgaggaggagaaaagatctgtgcgtacgctcctgtgaacagagagtaatatcatgcctcccttccatggagttacatagttgctgggctctctgaaactttggctcctcgtagggggtcctagacatatgccgtaaaaatagattcatgcacacacatagatacctgtcccaggaaaacttgaatgca

SEQ ID NO: 90052 - DNA, 455 bp, Homo Sapiens
ttttaaacgcagaaggttaactctggcaatctaaatgcacctaaggatatgagaaagtgctaagccaattgatttctgaatagcattgagtgggtcagcatgaaaactcgcttattcactttagcacgcgcctcacagtatatgtactgtactatactgaaaaattttataactacaattttaaataataaaaaataaaactcaaagcaaccgcaaagataatgtacaactatgttatgcatagcacattgcctgttctaaggggaagcatgtgagcatctcagtttatacaaaaagcaggacgtaactatatagttctcagtgcatcctgatgaaggcatttttgccttcagcttttttgaaaatttattataagctagatgctaatcagaaaatattttgtattttttaaaatttctttcatacatggtaaagacttattttattatttcccc

SEQ ID NO: 90053 - DNA, 890 bp, Homo Sapiens
gtttgccaaaatcccaggcagcatggacctcagtcttctctgggtacttctgcccctagtcaccatggcctggggccagtatggcgattatggatacccataccagcagtatcatgactacagcgatgatgggtgggtgaatttgaaccggcaaggcttcagctaccagtgtccccaggggcaggtgatagtggccgtgaggagcatcttcagcaagaaggaaggttctgacagacaatggaactacgcctgcatgcccacaccacagagcctcggggaacccacggagtgctggtgggaggagatcaacagggctggcatggaatggtaccagacgtgctccaacaatgggctggtggcaggattccagagccgctacttcgagtcagtgctggatcgggagtggcagttttactgttgtcgctacagcaagaggtgcccatattcctgctggctaacaacagaatatccaggtcactatggtgaggaaatggacatgatttcctacaattatgattactatatccgaggagcaacaaccactttctctgcagtggaaagggatcgccagtggaagttcataatgtgccggatgactgaatacgactgtgaatttgcaaatgtttagatttgccacataccaaatctgggtgaaaggaaaggggccggggacaggagggtgtccacatatgttaacatcagttggatctcctatagaagtttctgctgctctctttccttctccctgagctggtaactgcaatgccaacttcctgggcctttctgactagtatcacacttctaataaaatccacaattaaaccatggttctcactttcacatgtttcatagcaacggtttatttactgatgaggcttcttgccaccaca

SEQ ID NO: 90054 - DNA, 1043 bp, Homo Sapiens
gcggccgcggaggagggggcgaccacaagatggcggacctctcgctgcttcaggaggacctgcaggaggacgcagacggatccctggactttgtctcacaagatgaaatgttgacgcccctggggagattggacaagtatgctgcaagtgagaacatatttaacagacaaatggtggcccggagtttgctcgataccttgagggaagtctgcgatgatgaaagagattgtattgctgttttggaaagaattagcagattggccgatgattcagaaccaactgtgagagcggagctgatggaacaggtgcctcacatcgcactgttttgtcaagaaaaccggccttcaataccatatgctttttcaaaattcttactacctattgtggttagataccttgcagatcagaataatcaggtgaggaaaacaagtcaggcagctttgctggctctgttggagcaggagctcattgaacgatttgatgtggagaccaaagtgtgccctgtcctcatagagctgacagccccagatagcaatgatgatgtgaaaacagaagctgtggctataatgtgcaaaatggctcccatggttgggaaggatattacagagcgtcttatcctccctaggttttgtgagatgtgctgcgattgcagaatgtttcacgttcgaaaggtctgtgctgccaattttggagatatttgcagtgtagttggccagcaagctactgaagaaatgttgctgcccagatttttccagctttgttctgataatgtatggggagtccgaaaggcttgtgctgaatgcttcatggcggtttcatgtgcaacatgtcaagaaatccgacggaccaaattatcagcactttttattaatttgatcagtgatccttcacgttgggttcgccaagcagcttttcagtctctgggacctttcatatctacttttgctaatccatctagctcaggccagtattttaaagaagatatgaaaggtcccagagactgaaaagctgcttgatcccaacgaattccggaccagtaccaa

SEQ ID NO: 90055 - DNA, 987 bp, Homo Sapiens
  misc_feature (68)..(68): n is a, c, g, or t
  misc_feature (73)..(73): n is a, c, g, or t
  misc_feature (126)..(126): n is a, c, g, or t
  misc_feature (174)..(174): n is a, c, g, or t
  misc_feature (343)..(343): n is a, c, g, or t
cggttgcccaggtgatgttgggagaaactgggcacagggcccctcaggattcttccctctggtccctnctggnctgggtttccccccagaggttctgtcaaagctctatgtctagatctattcganggaagaggagtcttccaggaatgggagggagttatacaatcctgaatntaagagagctgaatctgtgaaagtggtgccaacctctggtcgtaacatagatttgtagttaccagttttttatcatcctcattactagctgctccctggtgagattctgaggacaaagtacaaagtaaagagctgtccagtggaacactaatttcacctagaggcttcnccggatgcctcagcagcatggtcttccatcgtgttttccagtatgacactggaattactaacactgagatctgaaggagtatcctctggcctgacttgtacatcctctggggcttcttgatctctggtcctatttttgttttctactgacatctcttctgaacttttgctttcttctttaaaatactggcctgagctagatggattagcaaaagtagatatgaaaggtcccagagactgaaaagctgcttggcgaacccaacgtgaaggatcactgatcaaattaataaaaagtgctgataatttggtccgtcggatttcttgacatgttgcacatgaaaccgccatgaagcattcagcacaagcctttcggactccccatacattatcagaacaaagctggaaaaatctgggcagcaacatttcttcagtagcttgctggccaactacactgcaaatatctccaaaattggcagcacagacctttcgaacgtgaaacattctgcaatcgcagcacatctcacaaaacctagggaggataagacgctctgtaatatccttcccaaccatgggagccattttgcacattatagccacagcttctgttttcacatcatccctcgtgccgaattcgccacccaggcc

SEQ ID NO: 90056 - DNA, 426 bp, Homo Sapiens
gcaaaggtgaccagtgagccacagaagcctaatgaagatgtggacgaacagaccccatcaacctcaagtaccaaagggaggaagaaggggaagacaccccgtcaacgaaggtccagaagcggcgttaagggcctaaagaccaccaggaaggcgaaaagaccccttcgagggagctcgagccaaaaagccggtgaaactaacacccctgcaggaaaacctaagaaagctagaggaccaatactgcgtggtcgttatcaccggctgaaagaaaaaatgaagaaagaagaggccgacaaagagcaaagcgagacctcagttctgtgatgtctctagaggtccgccactgaaaagtcatcaatcatacagtcagtgaattctacaccaacaggttaaaaccatgaaaataaaatcaacctgaatcgaaaa

SEQ ID NO: 90057 - DNA, 921 bp, Homo Sapiens
ggaagacagctcctcctactgtcttctgtgttagggatcacttccttgttgagtgggacctgagtttgagagggtcttctgctcctcttcgtctggtcccttacttccaagaccccagagaggaaggcatgctgtggctctagctctgcttctagctttcctgcctcctgccagtcagaaatcttccaacttggaagggagaacaaagtcagtcaccaggccaactgggtcatcagctgtaatcacttgtgatcttcctgtagaaaatgccgtctacacccactggtacctacaccaggaggggaaggccccacagcgtcttctgtactatgactcctacaactccaggttgtgttggaatcaggaatcagtcgagaaaagtatcatacttatgcaagcacagggaagagccttaaatttatactggaaaatctaattgaacgtgactctggggtctattactgtgccacctgggataccactggttggttcaagatatttgctgaagggactaagctcatagtaacttcacctgataaacaacttgatgcagatgtttcccccaagcccactatttttcttccttcaattgctgaaacaaaactccagaaggctggaacatacctttgtcttcttgagaaatttttcccagatattattaagatacattggcaagaaaagaagagcaacacgattctgggatcccaggaggggaacaccatgaagactaacgacacatacatgaaaatttagctggttaacggtgccagaaaagtcactggacaaagaacacagatgtatcgtcagacatgagaataataaaaacgggattggtccagaaaatatctttcctcccataaaagcagggggtgtgggtttcccaaattatctgtcgggacgcatcttcctttagagggaaaa

SEQ ID NO: 90058 - DNA, 493 bp, Homo Sapiens
ttcaaagttggagcaaaaactgccaaaggctggtcattcctttgggccaaatacatttctataggctctgaagcagagaagggcgagaatactagaagcacgtgccagctcagaggatgtgcggaagctttgtgggtatggaatctccgaggaatatgatatgcagaaaccaaaagaatgcaaacgctgtgctcttggtcaggagctcatttttgagggaatctcttttccccacttctgttacaggccaggcctaagttggacagtgtggtgaggagactacaggtgctgggctttatctttatggacaagcagaaaatcctttgcccaaaagggattacaagatgtcaggagtcacagccccctcctactccttgctcaaaaagtcttcctccccttggaatgttgtcttatacaccacaattggtactccatagtttaggaccaaggcattgctttgtgcaagctgtcattttaaaaatgtaggcatttc

SEQ ID NO: 90059 - DNA, 427 bp, Homo Sapiens
  misc_feature (74)..(74): n is a, c, g, or t
ctggtaatgcaagaaacaccacacccacccctactctgtcccagccagcatctcagtgatattaaacgcctacntgtgtaccgcataccctgcaaagcacttgacatctttatgtcaccaaatccttacaacggcattctgcgggtaggtttcaccataccactgcacagactggaaaactgaggttcaaggaagcttaaacggcccgaaattacacagcaaggtgcaacaggaattaagaactgaagtccatctaagtaaaaaaggagtgtgctcttaactgttatgctgttctgccaggcttcagatggagcctttccatttaaaaaccacttaccatcaactcttggagatcaaggtggttctgaacatctcattctggaattgtataaacggaataaaatctggcttcagataaaactaaaaa

SEQ ID NO: 90060 - DNA, 1172 bp, Homo Sapiens
  misc_feature (36)..(36): n is a, c, g, or t
  misc_feature (50)..(50): n is a, c, g, or t
  misc_feature (68)..(68): n is a, c, g, or t
  misc_feature (92)..(92): n is a, c, g, or t
  misc_feature (192)..(192): n is a, c, g, or t
  misc_feature (205)..(205): n is a, c, g, or t
  misc_feature (234)..(234): n is a, c, g, or t
  misc_feature (331)..(331): n is a, c, g, or t
gtggcgcttccgggccatactctcacattagtatgntgtgataaccagtncaccacacaggctgtatngttgttgctagaaataagggttanatccactgcatacctgcggttttcaacactctatgactcaggcacttgcagagacttgatgacacagttcagctgagagagtatcgccttgttaggcagntccatttgccaanacgcattgtgaaagaatttaccccaattnactttacttgagaaatattgttacagataatgatgcctattcaatgcagctgaattaccactgcatctgcaacaattgagcacatctacccatgganatttaccattggagatcttaatgaggcaagtaaatggatattggatcccattacttattaatatcgattttgatgatgatagctatctaatgaaaaatgatcttgctgaattacgagctagtggccaaatcctaatggaatttgagacaatgaagcttgaggatttctggtgtgcccaattcacagcatttccaaacctggcaaagacagctctagaaatccttatgccatttgcaactacatacctttgtgagttgggattttcatcacttttacatttcaaaacaaagtccagaagctgctttaatctgagtgatgatatccgtgtggctatttcaaaaaaagttcctcgtttctcggacatcattgaacaaaagctacagctacagcagaagtcactgtaagctgatatacttttttaatgaataatttcaatcttaatatcattgtaaaattaagctgtaattctgtctctttcatatttatgatatactgaattctatgtctaaaaaacttaagaactttaattttgaatgaggcatgtgaaaatatgttttgagaataaaaacacagcagaaaagattaagtactactgactagttgctatcatgaagattttcccaatttctaagtattctgcttaaaccctggtcggtgcgtatattgagaaaagattaccctaagcacctagaattatcccgctaaatgggtgcataggctaggacattgagccagagaaaaagaagagatattcacagaagtcaagaagggacagtgaacgatgtattagccgactttgtataggaaacggtcatgagactaaagaagatatgacatttcg

SEQ ID NO: 90061 - DNA, 421 bp, Homo Sapiens
tgactcctcaagctaactgcttttaggcacttctgcacacgggccaagttaatcatggaaagaacttagattacagtttaactggaaagcaaggatgataagagttcctttccaaaactaacctctgaggagataagaagggcatgcacacaagtaacaatgttatattgaagacttgtaggagcgctgtgacctgagcaaggacaaagttttgcaatctccttgggcccctgctgatgcccaagtgtctgtggtcaccagccacccccctcacctcagtctcctccttgttccccttcagtgtaccccttcaatgtacaaagaagcttgagattcatgcctttaaagatggttcgttaggacatgggtccagtatcttcctgacttgctggctctccaaataaagatgcttttcttgctc

SEQ ID NO: 90062 - DNA, 1071 bp, Homo Sapiens
atttcatagaaaacaatgttaagccttgaaagtgggtaaaatgtgccttcgattgaagtcatttattctgttgatacacttctacaacatatatattttaaacctgctcagataaagtgaaatttagcaaaaggatatcccctcccacccccaaatctaacatgccattttaaaaacagcacaaaggaacaaggaaactaaatattattttgagccatcattacttagtgaaatacaaacatccaaatagaaatgattgttgttccaccagaagattagaagttaaattatttccacacaataggaatttcacttcgtgtcatcggggatgtagtaggagttgcattatttgtcaaaccaaatagagatgcgtgggctgactttgctgaaatacaaaagaattgaaccttatctgaaggcgttttctaagtggcccctcccatagaagccgggaagttgtccacccctagcagaagccacattaatatttacaaaatggttataaatccttgaagacatttttgcccattttgtataagaaacaggagtaaacaaggtgtttatacttgttatgtttcattaatgaaatattattactttacatcttggggaatgtttgttttctttagaaatgaactaatgatcactacaaaggaagaattcatgacagcatttcctagagaaaaagcttaggtacgcgtctccaaatgatggtttctttttctacaccttagctttttcatagctcaattcttcttacaacttctcttgtgttttttctttgattgtcagttttctttcaaagtttattttttgttacttaatgcagaaaagtgagctctggtctccccagtgtaaaagtcgattgtgtctagaaagaaggcagtaaaaacagcaaagcaggcgctgctttcaaaaagccctgcccaaatcatcccgcccagaaccttcttaggtttgcatcctcatttccccctcccctaatttcaatagctggaaagtaatcaagtatcccgagaaccaatttatgcactagactccaaataaataaaatatttttttcaaagtgtc

SEQ ID NO: 90063 - DNA, 492 bp, Homo Sapiens
cagctggtaggcgattgacataagtcatgtatctgaaagctcaattagatggagaattattaactagtttagtccactgactggatatcgctgattgaaatcctgcatctcctccaggagaatggagtgagtggctgatcctttatgcaaattagcccttttctgtatcttcttaagaccagtgttaaagccaattattatatagcatggcagaaaagagaggggctcatcattctgagacaagcttaaaggtgtgaaaatcaaggaagataggctggtagatggcattagattaggtagtacaagttttcatccctatttgtttgggttaaaatatgtggggagttgtgcctatataaattcttatgtgtgatgattactgctagttattatcttatgattgtttacaatctgtattagctattgatctaaaccattttattgttttctttcaagagattttaactaataaactttcattcacaaatcaaa

SEQ ID NO: 90064 - DNA, 466 bp, Homo Sapiens
aatgttactggtttcagaatacctgaaatactgtaagtatctcatcatgctgaatgagactctggtgtctaaagatttgaattaccactgaacatacccccaaatataagctaactgtatcatttgaaactcaacatgagaaaccaccacaggaacacctttcgaaactcagcaggtttcaacaagggaggaaagactgactgtgttggacttaaagaaaggaagctcatggctctctaacaagatgccttcccatgagattcttgaagataattttgccctaatgattttcacctcacccactgactacagaactgagtcttcatgtaaactgagatattgccgtagcctttaaaagcatcccacaaagaaaaacattaataatccagtctaaaattttcagatttgaaaacatgggtatgtgtttgtatatgtcatgctaaatataactgatataaagttcaaa

SEQ ID NO: 90065 - DNA, 751 bp, Homo Sapiens
  misc_feature (105)..(113): n is a, c, g, or t
taaacaaaaaagataacttcattactcatctgtaggccttttaaaaactgaaaaaccagttcaactaaattttgacatgattgtctggaagctagtagtattaannnnnnnnncatagtaaaacagatgtaataattgattcatatagtctacaagagaagatattgggtgtttttttgtaggtggcaaatataaaatggttaattgtatccaggcttgcagcaagtttatccatgcattaaatggcaacatgagtagaatacatggttgaaaaatgaggatcagacacattcttctgcagacatcaaaagaggattgatatactcaaaaccttcaaattcagactgatcaatcttcctcacaatgtcatcgtcatctggagtgagctggacaggttcattagtaaactgagaatcaaagttgtccaaaccaaattccccagaaatatttggtttaaagggaggtaccacctgtttttgctccatcatatcccaatcaacatttcggaagaacgggtgtccctgaatatcagcaaatcctgtttgaggatgacaacccaatcgttccttagggtccttattaagaaaactcttcagaacacttgcagcttttacagacagagaacgtggtatgcgaatttgtttttcctaaaataacttggaagagataatcccctgtgtttctggtcagggttatcggagctcccaacaatatcaaaggagacccttctgcctcatctaaacatgagcac

SEQ ID NO: 90066 - DNA, 898 bp, Homo Sapiens
  misc_feature (702)..(733): n is a, c, g, or t
tgcctcttcttgcccatggaaggacatgcagcttcttactcctctgctgcccaacacagtttactggctggccactccatggctaggatccttcacactacctgagacctgatgtctctggctccaaaggacgcagctctgctcatcccccagtgaggcctgtcatgagttgctgtggctgtggaagcctgccatcctgggatggagacttttcccaccaccctgtccctttaatttcagcaggcacatcatcccgcctcatgtggatccccagagcagcagatctggaatctcctgtgatgctgaggccttcagggaccacaggaaacccatcttaatgatgaatcctggactttctttgcccttggaacagtcctggtttcacacatttacctccaaaagagcacttaacagctgccacgtggctgccctgaggtttgggctgaaacaacatgaccgtcataccttcccagagtcctcccaagaatggtctctaggttctccttcgcacagtggggtacgatgggctactctgcccaatctgtgtactctccttgggctactctgcccaaactgtgatttggggcatatagctatgccttctctggttcctctgtaccaaggtctctccagtggctacctcttctactcagcaggacagagaagctctcttggtttttattcttaggatccaggttcagnnnnnnnnnnnnnnnnnnnnnnnnnnnnnnnnctcatggtagctaatctgccccctcccttctctatgaaatgggcaggcagagaaaatccccctggccctgcctagcccatccattcctaagggaccttcccatagccagattgcaagaggagagcaaatttaaatgaaataaaaatgaatttcctcctacatcac

SEQ ID NO: 90067 - DNA, 1066 bp, Homo Sapiens
  misc_feature (699)..(707): n is a, c, g, or t
cccctgccctggaatctctgaaaacaggaagtgagcacagaagttctcaaagggaagctgactggtagttgagatgtgctgagctacacctctctacatggctccacggctattctcagagggagggtctacatcaggcgcttttctggaacaaaataaaatgccatcttaaaaaagaaaatttaaaatagtagcgttcacacacctggttttattagcctgtgatggaagttgtagttgaaatttgctcacatctaaggaagctggcagtacaacctcagcctccaggcctatttggttttcctccttccagcactagctgttatactgcatgctttccggagggcagctctgcgggcagtgcaggcactgtggtggacactctgctgcctgcaaccagcaactcagtatctcaagactaagactaaatgaagtcagaatcttcccccaaaatacatacggaaacgcagtcagtaaagaagtgtaggagcaaaacaaaataaacaccttacagccaaccacacgagcctaagggtcaccaggaaatggctacttcaccaatcaaagatcaccataaaaaaagagctctgggtccctacaactaagtgagcttcaaaatatgtacaggtatgacttagaaattgtgacttccttcaaaagctataaactcaataagagaacaggatgcttgtcccgtannnnnnnnnatacatacttttcatcaatacccaaggctttgtttgctattgagaaaaagaataaacaaaatagtggacactcaagtatttataaacacaaaagacttactgtgatatagaagtgtaacgaaatgctgttaacagaatattcttgacttatagaaaggaccctgttagaaactactttgtacccctgccaataatggcgtggttaagtaatttgaagaataccttactggcccagagctaaataaatatacactccacctccctcaactccttcaaatttaaagtgagcttgttattcaacaacaataaaaaccggacgcgtggtcgacgatatcccggtaactccggagccgtaccag

SEQ ID NO: 90068 - DNA, 456 bp, Homo Sapiens
tctgtgccatgagtgtccctggccccttcctgccatgggcaggcccgcaggaagagccggtaggggtggaaaggggactcagatgagacacaccccacagctgccaccgccttgtccctcaacaagctcacccccaatcccttgcagccaggccacaatgggggaggtgagtccagccccttggaacaggcttgcccaacatggagggatggcgttggcagtgccagcctccccagcctgtgccaagcttcaacaggggcaagaggaggggccggcccctcctcaggaagctggtatgagtaaggccttgagggtgcaggcaggcagccctgtaccccacccacatagactatactgtacatacagattttgcagtaggcttggggcagctgggtttgtccttgatgtatgatactgttattataataattattattattctgcgaaacaaaaacc

SEQ ID NO: 90069 - DNA, 327 bp, Homo Sapiens
aagacacagagataaatgttttcctgctttggttacctttcctttcccctttaaaaggaattagctatagaactgctttgtaaagatgcttcttgatattttacttttgttccttttccctaatcattcccttttctccccactcctccagaaggcataacccttttctccacaccccctacccccacccccgtcctaggctcccatcctttccatcaagaccttcattagcttatgatatttgctgccgagatgttataacaaggactcgttcatgtatataagctatttcttgatccatttaaaaggaattgtacattgtgtaga

SEQ ID NO: 90070 - DNA, 1341 bp, Homo Sapiens
  misc_feature (798)..(830): n is a, c, g, or t
tttttcactatagcaatgctttatagaagacaaacagcttatttctaggctgtcagggacttctagaatattgatgttgttattagaaacaatcctctgtaatccagtcccaggttgaaatctgatctggccttcaccagcaggcattcactaggtcttctgctctgcggctgttgcggtctgggaaggggcttctggcttcatgatctggtaagtgataagatactctgggtatgcctgggaaggacaagaagaaaaacaaatcacccttctagtaggcacaatattaaagccttgccgaatgtggaagcctcaaaggctgttaatcgtgaccaatattctatatagactcagtttcttaataggtgcctgaagaatttgaggttcacctacttaactgtaaataaatgtgtataaaccctacaatctagaaaactgaatgttatttctacttcgaatactgtcaattaagctccattcatcccttattagagagccatgtgtcataagcagggaaactaaggcccgaggtagcactaatatctttttcacctcacagagcattggtgctgtcacacagcgtgtgttcaataaaagtttgctaaatgaaagaaaaattttgctgaatccagtccaaattaatcatagaagatgatgtaacccactgagctagaaggagtaagggtgagatgtactgagtcaccaataacccagaaacaacagtttgggaacaatatttaaaaactgactactcaaaggcatcatttacaggagagataagggctccgatttagactnnnnnnnnnnnnnnnnnnnnnnnnnnnnnnnnngcagtcagtaaaacacaaggctgtgtctggaatgggaagagttcttcttggtgggagcaggaaaaaggaggctgatcagaggaagctgctgaaaacctaaccagaaattgcagtgaaggcagcaatttggaaggagaggtaggacaccccttagtgagtagactacataggaattcttcagccctaactataacatgacgatgaaactagattcagtagttcagagtggtctgtgactaaaagaagactcttgggtgagcaaagtgttttggggaccaaaaatagtttgttcaatgctgaccaacaaactacttgcatatagatacaggataagataataaaaggaaagaaagataagtaaaaactgaatagtaatattaggattttttgtgagaactaaatgcaaaagtcttagaataggtctggcatagtaaggatctattattgttattatttttattagtattattcattagagagtactccctcctaaaagctctcagcaaggact

SEQ ID NO: 90071 - DNA, 983 bp, Homo Sapiens
gaggatcatgtctgcatcttaaaagatccctttctgtagacaatggactgaaggggtgacccagtcaggaggcagttgctgcattgcaagatgaaatgctggaagtggtagggattgatgcagacctccttctgcttggaaccaaaaggaaactcacagcattccagtggttttagttcatggtggctctgaagatcgggccagcgccacacacggcagtaaatgacatgaggcagtcccttccggtgggagacttgcagcctgccatccagagagcggggaatggtgacacagttactcggttgccctgggcagctcaaggccttttccagttcctccatggcacctttctttttcttcagttttttcaccaaagcatcaacagctttctctgcccatttttcttcttcatcgccctgtttccacccaagaagtctcttcacagctggacttgtaaaggaaaataaacttgtcacattcataatgacagcactagttatactccttggatatggtgaaataaagctgtctccaaatgcaaaaggacagcagaagagatttgtttatttacagagaagtctctttaacttcttagtttgaagtccagaagagtagaaattaccattcctagtgtttaaaaaagtaacccagtcagcaccgggttggcggcgcgcccgtccgtgcgggagcacgagtggccgggcgagcggggtctcgcggcccgggtccggacggccgggcgctgcgccactctccgctccccgagcctcggcccgggttgagccgctcggcctctcctttctccgcccgcccgcctgctttctcctggagcactggattgatctggtcgcgctggcgtcagggagtcggagctgcccagcctccactcctcagctgccaatacccggcgcactcgcctgcctgcccgcccgctacacgctcacccgccctcgtgccgatctgaaatctcaggctctaccgta

SEQ ID NO: 90072 - DNA, 949 bp, Homo Sapiens
  misc_feature (25)..(25): n is a, c, g, or t
ggacatacggtaggtacgaggcctngtgttgaattcggcacgaggggagaaagcaggcgggcgggcggagaaaggagaggccgagcggctcaacccgggccgaggctcggggagcggagagtggcgcagcgcccggccgtccggacccgggccgccgagaccccgctcgcccggccactcgtgctcccgcacggacgggcgcgccgccaacccgctatgcaatttttaaatacacggtgcaagataaccagtaaaggcgcgttccttctgaaaattgaggccggtctcagaaccatctcctgagaaagcatccttttcgtgctgactgggttacttttttaaacactaggaatggtaatttctactcttctggcacttcaaagctaagaagttaaagagacttctctgtaaataaacaaatctcttctgctgtccttttgcatttggagacagctttatttcagccatatccaaggagtataactagtgctgtcattatgaatgtgacaagtttattttcctttagcaagtccagctgtgaagagacttcttgggtggaaacagggcgatgaagaagacaaagatgggcagagaaagctgttgatgctttggtgaaaaaactgaagaaaaagaaaggtgccatggaggaactggaaaaggccttgagctgcccagggcaaccgagtaactgtgtcaccattccccgctctctggattggcaggctgcaaggtctcccaacggaagggactggctcatgtcatttactgccgtgtgtggcgctggccgatcttccagagccaccattgactaagaaccactgggaatgctgcgaggttcctttggggtccaagcagaaggaggtctgcctccattccttaacatatagaagagtcaaaagcctgtagtacttccgggcctgttccaaaaacaggcaatttacctctaaga

SEQ ID NO: 90073 - DNA, 350 bp, Homo Sapiens
gccatattgccaaggaaatagtatgttacagctgtaggtgaggcccccacatagcctccctgaaaccctttcccctctatccttctccagaggtagccagtaagctgactgttgtgttcatgacttccatgcatgtcttatattgtctctacatagacacgtagctccacgctgtatatcattactgtatggctttttttactcaacattacatttttgagatttactcatgttgatgcatggagctctacctatttcacggtccagatactccagaattctctccatttctgttgatggacatttaggtgtcttaagtttttaaccaatacaccattgcaccgaaaaaa

SEQ ID NO: 90074 - DNA, 537 bp, Homo Sapiens
atctgtcacgtcacagaagcaaaccgtgccttctggctctgcgccccatattcccagcatcatagacatccaacagcaccagcaggagagtgggctagcctgctggatgctgttcgtgcctgtccctgctctgcctcccacccagttgcctgaatcatcccagctcagatgcagccactgtctcttgtcaagtgggacctcatactattctcagaaggctaacttgagaggtttggggccttgttccccagagggtccccagggactctgcagtgtccttggcaaatccccactgtactcaatgccctacattctcttctgtggtctctcccctggcttgcttcatggccactgaaccaatcactttgtatgctatgctcctactgtgatggaaaacaaaatgagtataacttattttatatccatattcagactatatagagaatattctatgcatctatgacgtgcttactactgcagtgcatttgtcattagtcttcatgttaatacagtacatttattctttggtaaaaaaaa

SEQ ID NO: 90075 - DNA, 536 bp, Homo Sapiens
tgcacacacagtattctgaaaggagatttgacacttaattcccattttcttaaaataacagttttgttgacttaaaaatatcagatacataggatgtgaaaaaaaatgtttgcagtactcagcaaaaaatagggtccataaaccagggtgcctgtccatccactgattctggggtgagaagcgatttctaccctcgcaagagtgactagaaagtttctaggagcacctcccaggcttgcaaagaaagtgaggcctcttggtatcctttcctcagtgtgtatatgacagccagtataatcaataccctaggttatgcgtctatatgatactcatctgtgaatattattggttttgtaatctttgttatataagaggatgtttaggctgtatatactggggtagattattgcctgccccttatacataggaatatgctgcataattgcgcataacttccatctcccttactggcttgtaggcagaggaaactgtatatgttactgccttgtacttttctcatacaccaaaaacacacc

SEQ ID NO: 90076 - DNA, 483 bp, Homo Sapiens
gggacagctctttgggcgttgattctagggtcagggccctcactcacactgctggaaggttaaagtcgacttcacgctagtttaaggaaatatctgacgctgataaccatgtcccaagcactgctctaagttcccaatgtgtccggaattggtgggttcttggtctcactgacttcaagaatgaagccacggaccctcgcgttttagactatgctaaaaacagcctcaggaccttcagcactgatcaacaatcctgggcatgggctgaccgacagttttcacccagagagtgaagatcatggaggagccatcttaaattccgcccagcgcaggctcccaggaatcctaatgtcacgatctcactgcagccaatgtgacaaacacagcagtaattaagtctagagagctaaacacacctcaaaaagaattgtctcttggtatgagtggaatggaataaaatacatggaaacccaggaaaaaaaa

SEQ ID NO: 90077 - DNA, 322 bp, Homo Sapiens
  misc_feature (13)..(13): n is a, c, g, or t
gaagaaaaaagantattgatgggatgttaaggactgcccaaggaaaaaggaagagaaaagagaagattatgaaatgcaaatgtgtatatttagcaacaaatcagatggccagagtaaatgacaaataccaataaaaaatggctgagatttcattctttggaaagtcagtctcagatgaggaagctgtaagtattcacaaagttcatggaaaacactaaatttctttaggtcatcaaaaaaatatgagaagatactccttcaaacatgaaattattctcacattcataggagtattctaatttaaaagtattcttatattttt

SEQ ID NO: 90078 - DNA, 440 bp, Homo Sapiens
atgtgtagtagaagccaatcaaatgagatggagaatgtctgccaagaaatgatgaatctgattttggaattaatcacttgtaggcctatctgatagtagttagcaaggccattcgtttagcccaaaacaaatctccaggacatgggaagaaaatactattattcttaccctttaaagtttctagggattttgtgtatatttcataatgaatacaaaatattttgccagtaacacatgtattagtttttaaatacattacctatgttagaaatgtaactcattcttttccccaatgctatgtgtgatttttaaaagttttgaggccaaatgcagtggctcatgcctaattctagcactttgagaggccaagatggaagaatcacctgaagccaggagtttgaaaccaagctgtgcaacaaagcaagaccctgtctctacaa

SEQ ID NO: 90079 - DNA, 422 bp, Homo Sapiens
gcggccgcttccatcacgatgtacagtttcccgttgcacacctcgatgaactcgaagacgtgcacgatgtgcgggtgtcgcacgccccgcaggatggacagctctcgcggcaggaacttgttgacgaagtccgggggcgctcgccgccggtccaccaccttgatggccacggtacccttgtacttcttggatgtggccaccttcaccttggagtagctgccctctccaattgtgcggcccagcttataaccgagttcgctcagaagtttgtctcccgacatggtggcgcctagggcgcacggagggcaggaggcggctgctgtcggggggcggccggactccaatctcgggtctaagccatggcgcttggcacctacacccccgcacccccatgtgcccactgccagacattggccgctgtg

SEQ ID NO: 90080 - DNA, 760 bp, Homo Sapiens
tagagcacaaataaatcacagtattgctatgcagaatgggaaagtggatggaagtaacttggaaggtggttcgcagcaagcccccttgactcctcccaacaccccagatccacgaagccctccaaatccagacaacattgctccaggatattctggaccactgaaggaaattcctcctgaaaaattcaacaccacagctgtccctaagtactatcaatctccctgggaacaagccattagcaatgatccggagcttttagaggctttatatcctaaacttttcaagcctgaaggaaaggcagaactgcctgattacaggaggctttaacagggttgccacaccatttggaggttttgaaaaagcatcaagaatggttaaatttaaagttccagattttgagctactattgctaacagatcccaggtttatgtcctttgtcaatcccctttctggcagacggtcctttaataggactcctaagggatggatatctgagaatattcctatagtgataacaaccgaacctacagatgataccactgtaccagaatcagaagacctatgaaaagaaagttgtatgtgccacataaaactctgaatataaaagttgctgttctactattttaactactggcaaagccacttgcatttttcattagtagcaacaatagcaatttagtgattttccttttctgacattcaatttcaatctcagatcaaatactaataaacaattagaaatcttactttaaaaaactt

SEQ ID NO: 90081 - DNA, 557 bp, Homo Sapiens
agtttaaatattacgtagtttgtgaagccttttgcaattctcccaatcagaataaaccagcctctaatccatggactcagaatgaatgaatggtctactgccacccttgtcacaggggaccaagcaaccttggagaatccacctgcaacattcctcagagaagctgcaacattactttaaaagaagttacagcagtgcatactattgttgctttcctacaatgtagcaaacagaaactttggttccagaatgttcctgaatataacacagtaaaatttcttgataggagtgcttcacaaaagatgtcattaaagatacccagtttggaagttaaggcattggctctgacattacttttgccccatctaagcttagtttggtagagtcatatatagggcaggatctagctaataattgtccttaactcaaaagcataatcttatttcaggtagaaagccacactaacttaattgccaaccagataaatggtgatcacttgaaatctgttttaaacttataaataaatcttgaaatattaattatcagtacttaaaaaa

SEQ ID NO: 90082 - DNA, 592 bp, Homo Sapiens
ttttttttagccataaaaagattttattaccccttcaaaccacatttgccaactaaagaatttctgttgagtctcttgcaaatttttgatgcagtgattgtgcacaaacagttctatttgttttataattttgaatattggtttttacctatgaaattcccttttattaaaataacatatgaagaaatccctttacctatcagaaacaaaacactctctggtttataaaacaccttaattctactgctcttttttctccaatcaccagcatctgtttttcagggggtgattttacttttgtgaattccttagcctttcttccttggtgcataaagttaaaatgcacatcagcagaattgctgcatattaacatctcaggactcttctcttgtaaagaagctgaaattcgtactatattggccaaagtgagcgagttaggtgatcttggtttcaatttccgagcctttgttaatatggagaattatggttcatatcagttatgtaggacctttggacccagggtcctacagatagatatggtgtgcccagattttaaaaataccttcaaaaataaaaaatacattcagtgaaa

SEQ ID NO: 90083 - DNA, 565 bp, Homo Sapiens
  misc_feature (326)..(326): n is a, c, g, or t
  misc_feature (512)..(512): n is a, c, g, or t
  misc_feature (527)..(527): n is a, c, g, or t
tttgcaaagatatatgaatgtttattaaagctatgtttttaatgatcaaaactctaaataacttgtgtccatcagtaaagatttggtaatacaaattgtggagaatacattactgttcagtcatcaaaatgtgggttatacaaaactatatggtgatttggaagatgttcataatatagtgaatggaaaaatggagattatagaacattgtacagtttaatcttatattgcaaagctgcatgcacctgtgtatgtgcgctcacacacacatattctgagcccaggagggcttgatggttccatctcttcctcctcttctttgcatnattggtttttactgttaaaagaactttggttgagctggaggaataggagctgatgagtacacaggtatcccatttctgcatcgaatccgatgccacagaagagaacacaaatgggagccactggcagcagaagaagtaacgggcactggaattcaaggcttccatggcacaggactgaaattcctntaggtgcgaagaacncgtgggtagggtactaaggacacaaagatgaaaatgat

SEQ ID NO: 90084 - DNA, 467 bp, Homo Sapiens
cagaaaaaaagaagcactgtcctaaagatagtagatgatttgaatcagcgtgtgatatggggtgctgatttttccaaagcttgaatatatgggtccaggaatcaaggaccaagtgggagtgttttctccactattacacaagatttctcacttacagaatttttatattcttcctctatcaagctctactacctttggttccaacggaaacatgcctgtaccagggccagcaccctcgaacagtgactgacaggagctggtatttatatattccagattcttctttggctggagacaaccctgaggtgtgtgtttcatgctatctgaaacccccgtgggattaaactcctgttgcatgtagtggtaacgagtttgataacacattctgcctacatttttttaatcttatttcctcctcctctactggtggttcctgaaactcttaaataaattgattagactcaaaa

SEQ ID NO: 90085 - DNA, 587 bp, Homo Sapiens
agatgtgaccccgctccagctgggcacttccaagaagtctgtgaaagaacagagcaagtgtgacgggcagggctgtgaacctctgagtgcttcagatgtaaaagtgtggaagacgtcgggctgtgagtgtcacgcagcagaaaggtggaggaggcctctcaggtcggaagtaacatggtgcgcagaaggcagtttgtatgcacagtggagcacatgtgttgatgcctgaaagcccacattgagatcctggctcaacctctcgccaacggtgtcatttggacaaatctcttaatctatgcaacgtacaatgaggacagtagtcacaggacataacttatggagttctgtgaatataagggaatctcctcatctttgccaccggtggggtaccctccccactcatcctgaggtacctgggagcagacagacatgaaacacgcatcaactttgtcactgagaacggcagcatcagctcctttttggaaacaaatcctctacaattccataaagatacacctctttacagtcatttatcagttaaagtcagatgtataaaaatgcatatcctaaaaggaaatgaatataaa

SEQ ID NO: 90086 - DNA, 334 bp, Homo Sapiens
ttgatcacatacacacgtttacacctggcagaagaggaagaggaggcatgaaggaatggcctcttcagaatggagaaaagccttccccatgagaacatgcctaagacagactgctgaagaaggcggcaagtggaacagcgctgaatcagcctggtcatcccagtcaagcctccagacatgtaagcaccctcctctgatctgcagagctgcctggcccaaatactgttgaccactcttgagtaagccccaccaagatcagctgagaacagtagaactgaccagatgactctaacctcatgaataaatccaagtgtttttttatttgcctctgaaa

SEQ ID NO: 90087 - DNA, 525 bp, Homo Sapiens
tctgaccggttcctggagcacttaaagtggagcaactacttcacactcagcatgtgctgttttattgctacgaacacatctttttaggttcaggccctgtttattcaaataaattatcagggccttgagggcaagaaatgattttatatcagcttgcctcactaggacttagcacaatgctctcaaataataggagcctagttaactgctcctttatttcaacagttctttaatcaaacttcaaaggcagcatttattacatttacaagtcttattgtttgcatctgtccccacttccagcctggaaacatcacatatccctcatccgtgactcagcactgagcacctgggagctgctcagtaaatattgctgaggaattgagttgatggttctcgtcaatactgatgattaaccaggattaacgttttctcttttaaatttcattttccatctctgcgtgccgtctttttattgttctgcatttactcaaattattagacagtgaacttaaaacattcaacttg

SEQ ID NO: 90088 - DNA, 454 bp, Homo Sapiens
gtaaagaacatcttccaggaagaagaatccataaggcaaaacagagaggagagtgaaaattgtagaaaagccttttctgagcctgtgctttcggagcctatgtttgctgaaggtgaaatcaaagcaaaaccttataggtcattgccggagaagccagacatttcagattaccccaagcttcttgctaataagcagagtaataacatccaagttttacattctgtgtttgaccaatcagctgaaatgaatgagcaaatctgaatacaggtatcactgaacagaacttaagagttatctatttaatggcacatttcatctgacaaaactcagagtctagtttacatattctgaattgctctgctttcttaaaaaaaagagaagggggctactattaaaatgtcattttctagtatttacatgatagagtaaataaaatgaatattgatgtggaaaa

SEQ ID NO: 90089 - DNA, 386 bp, Homo Sapiens
ctcttctctgttacaaaacgagataagcaagtgttagaattgccttaaggccacactggcatctccctgaccttctccagggacagaagcaggagtaagtttctcatcccatgggcgaccagggccatctcctcccaccagtggcccccactcacagggagctggcaatgccctacctgcctgttctccagatggagaaacaggctctgagatttcacaggtcttgcccaaagtcattgattttgatgattaaaaagaataaacacagtgtttcctgagtagcagtgattgttatgccttgctattttaataaagattctattttcgtataacattgtcaagtggaaacatgctgaaatctattaaaccatctttgtttgtgaaaa

SEQ ID NO: 90090 - DNA, 1135 bp, Homo Sapiens
  misc_feature (68)..(90): n is a, c, g, or t
  misc_feature (350)..(358): n is a, c, g, or t
  misc_feature (937)..(986): n is a, c, g, or t
cacttcatatgtcgaagtctgtttggacaaaaatgccaaaggtgctaagacttatatttaataccatnnnnnnnnnnnnnnnnnnnnnnntggagttgtttctccccacaaccgtgactgttacaggcagttcctcaagagactggctggcaagcaccataatgcacgttctcctgtagtctcacgtggacttcagggtccgggcacctgaattgccttgtctagtttgggctgtaatcaagtttcacttgctgatgaaattttatgtggaaagctgccaaccgccaacttacagctatgtcattcaaaatctgataaacatttcttcttttggcggtatctgtagattnnnnnnnnngttgcattgtagcttctcatctttctgaatttaaaagccggcacgcatcatgcaggtgccaaagacttccctactcttgtttatatctagtatccaccatacactgagctacattaggtggttacagattgtaacttaataaactgaactgtgttagtttgttaaattgtatactcattcacttgggaggaagtcacaagtgaaataacatctccttcttgactaaagcagtaaataagattcttatattggcaccaaaagtgtgtgtttttacttaaacatggtcagcatccttggtagggcatcacgagtaccctgttccatctacatgatcccagacaaccagctgaaatctggaaaagttcggtgaattgaccactgtgatttttacattgcattgctgattttccaagtgtcatcaaattgacaggttttgtagtggtgtaagagtaaaaggtggtagatggtggtttggagacagagtctgggcaacaagagcaagactccatcccccaaaaaccccccaaaaaataacagacaaaagagaagcagttggagccacgagggtaccttgctccnnnnnnnnnnnnnnnnnnnnnnnnnnnnnnnnnnnnnnnnnnnnnnnnnntttatcccagtgagaaaatacttacattctgggagggaggagaaagaggcctggaggacttagagaggtcctagagagacagaggtaaacctggacattctgtgcagaaggagatggtttgaagcagaggagtgagggtcgggctttga

SEQ ID NO: 90091 - DNA, 518 bp, Homo Sapiens
tgttaacagtctctgtgtacatttctgggtagcctgtgacagactctgtactacatagctgtgaggcaggacaatagggtctggaggcaaggaacttacggctgattcatgctgactttctagaactaaatcaaaaggaaagccccaactttccacagctaagtaacaaagggacccggccccctcccccaccaccgcccttttctgcgtggcagacggaaaattgaaagtacctcggattggttgctttccataactaattaaatgtttgcatagggtgtaacctttgtaacttcgcttcaggctctgattggttgctttccgctatcagactgattgtgggccactatatttgcgtggggtgtacaccaagtggccaatgggaaacctctagagggtgtttataccccagaaaattctataacccggccgccccgctcttgagccccatgttccggctcttcacaccctgtggagtgtactttcattttcaataaatctctgcttttgttgcttca

SEQ ID NO: 90092 - DNA, 412 bp, Homo Sapiens
agtcggcatgaaccgtactttccttggcagggttattaggtggtaaatacctgcagaataatgggattgtactagggtttcttctggctttagaaacccatttgtttactaatagattcccagaggataccttgatctcaccaagctatttgccagaatgtctcctgatggcctcattgaagaaagggggactatgagccagatgctggtgccctgaagatttgtagtttgtgggatagtcttaacttggcagggtttgattaacagaatgaagtctgttccttagagggaagtctttgcttgctgccctgacctgctggacactgttaattgggatgaggtcaaagaaggcatagttaccacatttgcaggagaccctaacctggaaatagtaaattacataacattcaaa

SEQ ID NO: 90093 - DNA, 560 bp, Homo Sapiens
ctcaagttctggctggcacagctgtagtcacagacttaaaacagccaactcattcgttttgtgcagttttacagttgtttatggcagaggtgtgatttgggtccctgttatctcatcatggctagaagcagaagttttggcaaattattcttgtatctttacatttgaaaattaagggaaagtttcacccatggaatattagcattgtgacaatgctaatgagagtttctccagaaactatgatcctggtcagcagccagtcatttcatagaagataaacttcaagaatattctctgaagagcaatgaaactgagataagatctaaccactgttaccaacaaccaagaaaaatagagccgcctggacagcttccgtgtggacgtctgaaacggagagagctcagtcactcagtgctcagctgaggtcccagaggccaagctgcaccctcctctctgtccctgcagcacagttcatccaccttctgaaactcaccaacagatgggtgggcgaggaaagaaaatcagtgtttacaattccagtaaagacattaaaattcaaa

SEQ ID NO: 90094 - DNA, 946 bp, Homo Sapiens
  misc_feature (481)..(482): n is a, c, g, or t
tgcagcgggccgctctacgtggaccgcatggtgctgctggtcatgggcaacgtcatcaactggtcgctggctgcctatgggcttatcatgcgccccaatgatttcgcttcctacttgttggccattggcatctgcaacctgctcctttacttcgcattctacatcatcatgaagctccggagtggggagaggatcaagctcatccccctgctctgcatcgttggcacctccgtggtctggggcttcgcgctcttcttcttcttccagggactcagcacctggcagaaaacccctgcagagtcgagggagcacaaccgggactgcatcctcctcgacttctttgacgaccacgacatctggcacttcctctcctccatcgccatgttcgggtccttcctggtgttgctgacactggatgacgacctggatactgtgcagcgggacaagatctatgtcttctagcaggagctgggcccttcgnncttcacctcaagggggccctggagctcctttgtgtcatagaccggtcactctgtcgtgctgtggggatgagtcccagcaccgctgcccagcactggatggcagcaggacagccaggtctagcttaggcttggcctgggacagccatggggtggcatggaaccttgcagctgccctctgccgaggagcaggcctgctcccctggaacccccagatgttggccaaattgctgctttcttctcagtgttggggccttccatgggccccctgtcctttggctctccatttgtcccctttgcaagaggaaggatggaagggacacccctccccatttcatgcccttgcatttttgcccggtcctccctccccacaaatgcccccaaccctggtgaacgtaaaggcctccttttttcccttcccaataactcccccactcccaaggggccctaagaccctgggaggcccc

SEQ ID NO: 90095 - DNA, 435 bp, Homo Sapiens
gaaggggaccaagaggaacgggatcgtggattgagtatgtgcagggctcttcatttctaagttgggctgatttcaaaatagtgttcaaattggacatcctcacagaaatctcactcaactacttgctcgtgtgaaaagcaccacactcagtccaactgctgttcttttcaaaaggcttctcattttgtacccattttattctagtttcgttaatttgttagtaattaatattaggaaagccagctcatagagaccagaagttgagctaattctctaaaataactctactctgtaaatttctatataaattcaatgctcctttcaaaacgtcttaatttgttgcatctaaagaaaatgagaaaataatgctatacgtttgactctattcataaaaataagtgcaaaaagttttccaggaaatattacttggcttta

SEQ ID NO: 90096 - DNA, 542 bp, Homo Sapiens
tgtaagccatctacgaagaccgaggaaaagctgcggcctaccaggacatcctcggaaagtatttattctaggccaggctccagtattcctggctcaccaggtcatactatctatgcaaaagtagacaatgagatcctggattacaaggatttagcagccattccgaaggtcaaggcaatttatgacattgaacgtccagatcttattacctatgagcctttctacacttcgggctatgatgacaaacaggagagacagagccttggagagtctccgaggactttgtctcctactccatcagcagaagggtaccaggatgttcgggatcggatgatccatcggtccacgagccagggctccatcaactcccctgtgtacagccgccacagctacactccaaccacgtcccgctctccccagcatttccacagacctgatcaaggaatcaacatttaccgaaagccacccatctacaaacagcatgtactgtttgaagtcatccttttgttgttaatttaagaataaaattctcagcatttgaa

SEQ ID NO: 90097 - DNA, 458 bp, Homo Sapiens
gtgaaatatgagttggcgaggaagatcgacctattattggcctagaccaaggcgctatgtacagcctcctgaaatgattgggcctatgcggcccgagcagttcagtgatgaagtggaaccagcaacacctgaagaaggggaaccagcaactcaacgtcaggatcctgcagctgctcaggagggagaggatgagggagcatctgcaggtcaagggccgaagcctgaagctcatagccaggaacagggtcacccacagactgggtgtgagtgtgaagatggtcctgatgggcaggagatggacccgccaaatccagaggaggtgaaaacgcctgaagaaggtgaaaagcaatcacagtgttaaaagaaggcacgttgaaatgatgcaggctgctcctatgttggaaatttgttcattaaaattctcccaataaagctttacagccttctgcaaaaaaaaa

SEQ ID NO: 90098 - DNA, 583 bp, Homo Sapiens
cagtcagtctgcatgagccactgtttctaataagactgtggatagagtgatataatcacctctaaccatatcaaatgttacacgtaagtttcagattttgagacatgagttgataagatttgaagttcaaagaccatgactttagtacttcctgagtaatcaactgaaatatgttttacatatgtgttttccaaattgctgaccattcattataagtgcttctgaatttaaaggaggtacttgatgtataggtaagaaattacctttaaattctggaggtctaccctcaaagtgtatacagaggtttaattggatgtaagacacaggatcacctttagggttctgtttttttgtctatttaataaaacccaaactgtagtatgctttacatgcctttagaatcatataaataaactgctgttaagtaatgttcccagttgttatgtttctgttacaggtgaaaagcaatcacggagttaaaagaagacaagctgaaatgatgcaggctgctcctatgttggaaatttgttcattaaaattctcccaataaagctttacagccttctgcaaagaagtcttgcgc

SEQ ID NO: 90099 - DNA, 494 bp, Homo Sapiens
  misc_feature (48)..(48): n is a, c, g, or t
cccttgtctaaaataaaaggcattattggaaatatttgaaaactaganaatgatggataaaagggctgataagaaaatttctgactgtcagtagaagtgagataagatcctcagaggaaacagtaagaagggataatcattaagatagtaaaacaggcaaagcagaatcacatgtgcacacacacatacacatgtaaacattggaatgcataagttttaatattttagcgctatcagtttctaaatgcattaattactaactgccctctcccaagattcatttagttcaaacagtatccgtaaactaggaataatgccacatgcattcaatgggatcttttaagtactcttcagtttgttccaagaaatgtgcctactgaaatcaaattaatttgtattcaatgtgtacttcaagactgctaattgtttcatctgaaagcctacaatgaatcattgttcaaccttgaaaaataaaattttgtaaaacatcaaaa

SEQ ID NO: 90100 - DNA, 424 bp, Homo Sapiens
  misc_feature (210)..(229): n is a, c, g, or t
tttaaaagccaaggcatatttaaaacctataattgataattaaaggtattctcagtaaccctgtaacactgtaataccactttgttgtcagtgtaaacaagggcgtatccggaaagcactgaggccttcctatcagaaacccttaacccagtaacctgcggatggcccagatgtgttcaatctgtagcggcagctgctttgctaacaggnnnnnnnnnnnnnnnnnnnnggccatctatacaaattctaagttaatttagactaaacaggctcttattaatagcaaagaataattgaaatcccaaacttacaaggttttcaacaaaagtaaaatttgctaaaagttaacagtgtaacatgtattatagtaacttctaatcttgtggccttcatctagtccacagacataaagaaagttcgcttt

SEQ ID NO: 90101 - DNA, 332 bp, Homo Sapiens
  misc_feature (164)..(175): n is a, c, g, or t
tctaaggccacaagattagaagttactataatacatgttacactgttaacttttagcaaactttacttttgctgaaaaacttgtaagtttgggatttcaattatcctttgctattaataagaacttgtttagtccaaattaacttagaattggtatagatggcnnnnnnnnnnnnccttcaattacccaggaggaaccatcgatcatcctgtcctgaagggagttcctcctaggtctggtcgaacctttgtatagtaattaagatttaaatcccctgttaggaaacctgctgggttaagggaattttcaggggttaatattaaatcatcctt

SEQ ID NO: 90102 - DNA, 398 bp, Homo Sapiens
  misc_feature (78)..(89): n is a, c, g, or t
  misc_feature (249)..(309): n is a, c, g, or t
  misc_feature (314)..(325): n is a, c, g, or t
gtacaaaggccctaccatacctaggaggaactcccttcaggaaaggatgatctatggttcctcccaggtaattaaagnnnnnnnnnnnngccatctatacgaattctaagttaattttgacaaaacgaggtcttactaatagcaaaggataattaaaatcccaagcttacaaggttttcaacaaaagtaaagtttgctaaaagttaacagtgtaacatgtattatagtaatttctgatcttgtggcctnnnnnnnnnnnnnnnnnnnnnnnnnnnnnnnnnnnnnnnnnnnnnnnnnnnnnnnnnnnnncaggnnnnnnnnnnnngaaggggcagaatttacataaaaagagtgttatatggtaaattcttgtcctgaaataaattaactggttgttt

SEQ ID NO: 90103 - DNA, 450 bp, Homo Sapiens
  misc_feature (22)..(22): n is a, c, g, or t
tgcataggcttctccctaactnggagcaagtcaaaataatagagacagtcttatattccttgtctcgggtcgacggaatctgagacgagtcaaggtaacagaggcagctgtttgaatagattcatcggagggtctaaggcagtctccagaccaagctgtaagggaggtaagatagaaataatcattcaggtaccacagtagacagaccttgaaggtaccagggccctcacagcttaatcagacttagcaagcattttttgcctctgaccttctagttgaaacaaaattagttatcagtggacttaggcgaatgctatactgtacgtagacacataaccccaacctatataaacactaagaatactgtaacatttcgagttggtctggtggagttatctccagccttctctctgtatccagttacagcaataaatccccttctttcctaaa

SEQ ID NO: 90104 - DNA, 582 bp, Homo Sapiens
  misc_feature (120)..(120): n is a, c, g, or t
  misc_feature (218)..(218): n is a, c, g, or t
tctcttcgaccctgtaagaacacagtcccctgaaattacgcttggagaactcctctaacagaaaaccccatcgttctaaaggctgagtcacgggatgagaccgtaagtcgagcctgattnccctaaggacttctggtttgctctttaagaaagctgtgccccagaacaccagagacctcaaattactttacaaatagaaccctgaaatgaagacgggncttcatcccaatgtgctgcataaataatcagggattctgtacgtgcattgtgctctctcatggtctgtatagagtgttatacttggtaatatagaggagatgaccaaatcagtgctggggaagtagatttggcttctctgcttctcataggactatctccaccacccccagttagcaccattaactcctcctgagctctgataacataattaacatttctcaataatttcaaccacaatcattaataaaaataggaattattttgatggctctaacagtgacatttatatcatgtgttatatctgtagtattctatagtaagctttatattaagcaaatcaataaaaacctctttacaaaagta

SEQ ID NO: 90105 - DNA, 527 bp, Homo Sapiens
cagtgggcccaactttcagctttgaattagatgtagaagatggagaagtagaaaattacgaggccctgttaaacctggcagagcgactgggagaggcaaagcctcgtggactgactaaagcagatattgaacaacttcctttcttatcggttcaatcctaacaaccaccagtcagaacagactttgtgtgtagtatgcatgtgtgattttgagtcaaggcagctacttagagtcttaccctgtaaccacgagttccatgccaagtgtgttgacaaatggcttaaggcaaatcgtacttgcccaatttgccgagctgatgcttcagaagtgcatcgggattcagaatgaccaacctaagaagcacaaatttagtttgggtgttcctcatcacatgtatatacggactatccattgaacttaatctgtgtggcttccagccctccctttaccaaaagggtcaatggacctttctttgcactgtgtgacttaatcaactataaaagcttacaattagtcttcacaaaaaa

SEQ ID NO: 90106 - DNA, 1189 bp, Homo Sapiens
ggccggattccgggatctgataacgtgggcggagctctagctcgcgtatcctgaggaggcggggttggcctaggcgaagatccggactctgggtgttttgctaccgtgaccgtttagaacagaaactgttcatacttggtgcgctgtggactcttgtgataattaaccaagagtagctctatttgtccaacctcacacctaaagaagaaagaaaatggcttgtgctgagttttcttttcatgtaccaagtcttgaagagcttgctggagttatgcagaaggggttaaaagataactttgctgatgtccaggtctctgtagttgattgccctgatttgactaaggaaccctttacctttcctgtaaaaggcatctgtgggaaaactagaattgcagaagttggaggtgtgccttacttattgcctcttgtaaaccaaaaaaaagtttatgatctgaataaaattgcaaaagaaatcaagctgcctggagcctttattcttggagcaggagcaggtccatttcagactctcgggttcaattctgagtttatgccagttattcagacagaaagtgaacacaagcctcctgtaaatggaagttactttgcccatgtgaaccctgcagatggagggtgcctactggagaaatacagtgagaaatgtcatgattttcagtgtgcattactggctaatctttttgccagtgaagcccaacctggcaaggtaattgaggtgaaagccaaaagaagaactggaaccacttaactttgtgacttgtatgagagagaccctggaaaaacattatggaaataagcctataggaatgggaggtactttcataattcagaagggaaaagtgaagtctcacattatgcctgcagaattttattcctgccccttgaactctgatgaagaagtgaataaatggttgcatttttatgaaatgaaagctcctttggtttgtctaccagtttttgtctccagagacccagggtttgatttgcgactggagcacactcatttttttagtcgtcatggagaaggtggacactaccattatgacactactccagatatagtggaatatcttggatacttcttacctgcagagtttctctatcgcattgatcaaccaaaagagacgcattcaattgggcgagattaaatcagctgatacttatttagaaaaag

SEQ ID NO: 90107 - DNA, 663 bp, Homo Sapiens
gtggctgcttgggcacagtcattactgtttattccactgtgctgcacatcttgaagctgtaaagatataagaagtctcgcacagccggggttcagcttacaatccttcgcacctaattgtacgcctttgtgtgagggtttggaggagtctccaggaacacctggtgtttcctttctcacaggtatttccagtcctcacgggcaagtcagagagtcccagaggcaattgaacaagccctcagagatcacgtagtccgttcactctccatgggaacccgcacttccctagagacctgtagccaaatcatttggagagcttctgaagcttctctgccttcctctgtctcaaagaatcccatgtgcctctagttgagaaacattcctctggagattctaggttattctcatgagaatgttacgatactcaggtgggctggggcagaaaatggatgagaactagtatagtccaatggctttgctttggtaactgaacccacagaggaggaaaataacaacagctcagcttttctcagtgttatacaccaaccattacgctagttacatgatatacatactatttaattctcatcctttgaggtctggtatcactattgccactttacagataagaaaacaagggttggccgggtatggtggctcactc

SEQ ID NO: 90108 - DNA, 517 bp, Homo Sapiens
ttatgaaatgcaaactttttaaccaatattagtaatagtaatctcaaatctcatcatcatcaaaatcttatttatgaaatataggagttagttcatatacagccttagccttttccacattataaaatatattccatatatatgtgtgatcttcatttaatattcaagtaaatgttgtaagatattgttatttttattctaacatttcacaggtatagaatctgaaactcagaggtcaactgatgtgtcaaagatacctccacaaatcagtaccttgattaaaactaaaattggagtcatcttcatatcttcatctttctccctcttcattaggaccgattgtagtctgtttccctctcactcacttgcaatctttattgctttagtgttgcatttgatttttatctttgtttttgttttaaatactgtcattaaagtcatagaaaaatctaaggtaaaactggttgaataaaaattttaaaatcgactctaatgtaataaaccagacaaaaatgat

SEQ ID NO: 90109 - DNA, 2845 bp, Homo Sapiens
gggccatttccttctcggtgtcctgttcctgaccgtcgctccccggggcccccgcttggcccaccctgtgtgtcgaggttttgcagttgggccactaggccccggccctccagtagactgattccgccgcatgggtccacgtgtgcgccaccttagggccgggcactggtcacttgctgggcgttccctggacacccagcaccccatgcaggtccctctctgcctgggacagtcacaaagccctcagcattcagctgccctcagtacaccaatgtccaggcccaccccaggtaggaaagctgaggctcatgggaaagacaaaaaaccccggtccccgccctacagcagcacagaggaaaaacagaattgggcagtggggacttgcggggcagctagagatgggcatgggaatggcagctcccggctccaccgctgctggtgcctggagagctccagaagcaaggggggaagaacagagagcttgagccacacgactcccgagacccccgcccctcagaggacagtcctgggtctggcccaccctggagccctggcccaccctggagccctggccctgtgtgatcctgacaccctcagctaccaaggcaaggcctgttggtgcgactggctggagtccattgcggagcttgaggtggggtgagcgcagctgacggaggaaccagcccctgccctgaggtcgtggcccagggacccccaggctcagcacctacctacctggttgcggccaagctctcgagccacctttgcgttgtggtcacagagctcggccagtggccggccaagccagcgcataacgctcagctgtgtccacaaaccagcgcatgccgccgccacctggctccgtctcaaagacactgagggcactggaggcgaggcctgcgaagggctcggcagggtccagcttgcgcttaaagaagatggggtggcgccggtcgccagtgtagggcttgcgccccgactcggcagccacgaggctctccttggcgggcgaaggccaggtccccgaagaggccgtagcagaggccatcagggttggcgcgctcgacgggctggctggcgtcgcggaacaggtgctggcacagcgagctgtccttggagccagacagcaggaaggaggggtcgtgggggtggcgccaggcaattcccgtggtgacgtctcggtgttcctcaaacatggcagctggcacgaagggccggcgcacgtcccaaacatagatgttgtggtccaccatcatggagcacgtggccaggtggtggcggcactctggccgccacttcacacgggccaccgaggcgatggtctgcacacagtgcatctccttggcacggtgcgtggtcatgtcccagaccttcaccatcttgtcgcgccctccagtggccaaccagcccctgtcctcggggtgccagtcgcagcagaagacgggtccgttgtgggctgtgaacatcctctcgcaccggtcgggacgccggatgtcccagagctgcacattgccgttctcaaaggtggaggcgaaggtgaagtagtcccggatactgaactgcacgtcccgcacgctctccgactggcccgagaaggtgctgacagagtcctttctgcggaggtcaaagcacttcatgaagccatcctgggagccactgagcagcacgtgggcttcggtggggtggaagcagactttgtttaccgtgcgcttgtgttctgtgaacagctggtcctgcttgttgcgggatggccggcccaggttccacgtgaccaccacgccattggtggctgctgtggccagcaggttctcatccatctggtgccagaccacgtcagcacagctcaggttaagcgaaggcttgcgccccacacgcaggttcagctgtgtccacgaactgttcctcctcgatggcatagatcttgaagatgctacggcctgccacgaccacctgggcatgcgtcagcggcacacactgatggcattggcgggagcatccaggtggcagtgcatggtacggcctgtcagcacgcctgccacccagggctgtggtcacacgggacatcttctccatggctgcacaggtgatgaggtcaggggtcaggaggtcagtgaggtgggctggcctggtcagcctgggtgggtcatcagttcagaccttccacccaggttgggaccccagaactgcttggtcccgggctggtcagtcttagtgagccaatccagggctgtctatcagccaatcagcctgacaggcaagctcaaattcactggagtctgtcagtccagcccatcaccctggctgagcggtgaggggacttcctagcttcccttaggcctgtcagtttcatgtctgacttccacggaagactctagctggacattcccggcccaggccacctctcggtacccccatcagccagatctgggcagtcactaaacgctcggtcagtcaatcccagcaggggagcgaggagactcccgccgtccacactgtcagccctgagggcggcggggctctagggaggaacaaaagaggggagggaacagagggctagaggggcccggggactcaggcgatagacgcgggaagggcccagagggacgtcaaggaccgagctacttaaggagctcgaggtgtctggcgggaccggaggcaggagagaagccggcgaccccggagtacagggttcctgggagcggcgcagtggcgcgggggagcggacgctgcgggacgagaaccagagggcccggggcagcccttctcccccgcgcgaaccccaatcttttactaaaagcgcacggttgtccggaaccgatcccaaacttccagaccgtaccagcct

SEQ ID NO: 90110 - DNA, 120 bp, Homo Sapiens
aacaaaaattgaattatgttgaaatatgtcctgtaatttgtgttttaaacttaataaatcttaggcattttccctgtgtgtgtgtataatgcagctattaaaaatgagtctgaggccagg

SEQ ID NO: 90111 - DNA, 897 bp, Homo Sapiens
  misc_feature (838)..(846): n is a, c, g, or t
gtaacgaagcagtttaccctctctaaatctcagtttctgcattcactaaatgacaggatttaatgtgatagtgcctttttaaaatccattgttttataaattcttgtttctatttttgtaaaatttattttggtgtgaaaatgatgacattttacatacaggactcttctaaaatcatatgaaacccattgaaaaaataggagcaaataggccagggaacaaattttagagcccttccactaacaatattacggagggctgcattctcatctcttcgtgtggctttcacacattataaaattgctttgccaatattgcttagtggaggtgggggaggggatattttaaaactaggaattggatgtttcacttggttgctccctcatccatcttaattttgacatcgtaaccacacagcacccagcacccaccccttccactctgatggaaagaatagctatgcctacgaatgtttaaaagcaaaaatggaagggcatacattttactgcaaacacagacgtttctcttcctctttctcaagtaaaagcctaagtagtaaccttttagagaatgctaagaattgaaataaattctttgttgagttcataaatccaagtaattctagtaagtcagggttcctttaaggaatatggataacgatttaaaaatatgttaagggaagggagggaagcaaaagtaaaaggaactgttaaaaccagcaacctccataaataagccacatcctgaatattaataacgtattgtgtaaaattcattagatacattttatgtttcagacatctatagccagcaatgatacaatggagctagaccagannnnnnnnnaacttcaaggatcacagaattagtataccttaattatattaatacaaaatt

SEQ ID NO: 90112 - DNA, 368 bp, Homo Sapiens
  misc_feature (310)..(326): n is a, c, g, or t
tgaacttagcccattcatatactgttagtttgttggctcatttatatgtaaactcctggctcatcaactccagtgaccactcagcttcacattggaagagtatttaggactcggggctccctatataaatgtaccactgcctcccattaaagtcattctggggttcatcccagaataactgaattagaatctcatgtgggcctaagtgtttgaattttaaaaagcccctccggaagctctgctaggtttgagacccactggtttaggtaatttcatgacaggtttaggcagctaatataaggaattctcnnnnnnnnnnnnnnnnntctaaacaccaaaatccctcaaaatatagaaaacaaaataaa

SEQ ID NO: 90113 - DNA, 338 bp, Homo Sapiens
acacgaagggtgatctgtgtcctatctggaatatcaaggggatgaaggcaatggaagtagctaccacttggtgactaagacaaactcttaatgtaaaaccaccatcagagccaccctggagttatggcaaggccaccacagtctcctccaaaggccactgatatggaactgggaacctccctccatagaatgctaaatggctgatgtgaacttggttaaggatctataattcttcttacgaagaggaaagttctggaagaccaaagaaaatatgtcatgaaatcaagccattaagaagttgtgactccaaaaaagtaaaagcgtgagctactgtacac

SEQ ID NO: 90114 - DNA, 433 bp, Homo Sapiens
tgaaggcaatggaagtagctaccacttggtgacttagacaaactcttaatgtaaaaccaccatcagagccaccctggagttatggcaaggccaccacagtctcctccaaaggccactgatatggaactgggaacctccctccatagaatgctaaatggctgatgtgaacttggttaaggatctataattcttcttacgaaggttaaaatggagttaaaattcacagtgaacagataagaagacctcttcactgatttgtcagagttacaactccccagcagctggagagcactaacgataaaaggaccaacccgcaactctggctttctgcctacacatccctgaagatctggcagcttctgtttgcatccttgtcctaagacttcctcttccgttcagcaaaccttcctaagaagttacaatctcaaaggtc

SEQ ID NO: 90115 - DNA, 1004 bp, Homo Sapiens
gcaggctggtaccggtccggaattcccgggatatcgtcgaccacgcgtcgggacagtagactgcctatatcagttgattcaccaccaggctgctgctgacagcaacaccactgcagcatctagtgagtaccatttacaccagtggtcctctcatatacttgacatcccaacacatactataggttcttgtgcccaaaatgatttagctatagacatgcctgagcctctatatgcccaggctagaaactcaagaacaggaaggtcacattttctaaaccaaacttttgccactattaggatgcctagtgatgcattcggaatgttggcaaaagatagcataggaccatttactgtggcccattcatctcagccattcttatccctgaatacagaattagttagtaacataagtgggttacctcctaggccagtcatcagaataactgaccaggcttctgcctctttggataaacctgcacagaaagaaaatgaacagttttctgatcatcagaaccctagtaacagtaacctacagttttctataaatagcaacaatcttgtcacttctgcatgcctctatcctgatgacacagaagctgcattgttggtttctgaggataatcaaactgtttggtatgaatatggttgtatatgatcaaaactgcacaatataatatattgatgttatttgatatacactgtctcctatatgattgacagtggtgttacaaatatcattggtaaggtttaattttattaaaatggtgccaggtcagtgtcctgaggctgttataatggggatgggttccgcaaaaccgggtgaaataaatactggcccattggggcctttaaaacttaacagaagggccctcaattgggcgggaaagtgtttcgtctgacagtataggggtgtttcagaatcaagaatgtgtgggtggaagaaatcgcccccaggcgttacgatttaaagaaaggtggaaaaacataaatatgcgattaatctg

SEQ ID NO: 90116 - DNA, 535 bp, Homo Sapiens
ttttaacaaaactaagatggacatttcacacaacgcagagctacgagaacatctcttatgctccttgccatgggattttaatgccccaaggttcataactacagcaaagaaagtaagtcaaaaataaactgagcttaaagaaggtggcaggccaattttcccaaaaagactgtggactgtgggctgctgtgtagcctttgctacaaggctgaggaagcagaagaaagatgaattgggcaattggtgatgaaaagtatttgccattttcaaaggcttctcagtgtggccatagattttgctagtcaatttttaaaaaattatatttttagctcaacacacagctctaaagcagggttcagtgtagtgtgttctctaccgaaatggttatatacagatggtatggaaatggttttaaagattactcataaactatccttttaaagaaaaactagactcggtcatatttgttaaaatgagcaatgtcaccaaacagaaatgtaggtgggaaatactgaaccacaaacatttggagttg

SEQ ID NO: 90117 - DNA, 437 bp, Homo Sapiens
  misc_feature (77)..(303): n is a, c, g, or t
caatcactttaaatatctaccttcacagtcactttgcttctttctcctttctctgtctatccctcctctgtgtctcnnnnnnnnnnnnnnnnnnnnnnnnnnnnnnnnnnnnnnnnnnnnnnnnnnnnnnnnnnnnnnnnnnnnnnnnnnnnnnnnnnnnnnnnnnnnnnnnnnnnnnnnnnnnnnnnnnnnnnnnnnnnnnnnnnnnnnnnnnnnnnnnnnnnnnnnnnnnnnnnnnnnnnnnnnnnnnnnnnnnnnnnnnnnnnnnnnnnnnnnnnnnnnnnnnnnnnnnnnnnnnnnnnntctactataacatcttaacttattacagtctacctttaagtaatattacttccattttactcttctgtgtcctattgttgtcatgtgtctcatttctatagaataaatttcacaatatattatttttgcttaaa

SEQ ID NO: 90118 - DNA, 458 bp, Homo Sapiens
  misc_feature (207)..(226): n is a, c, g, or t
agagagagaccagaagaaggcgtaaagcttggggtggctaaggctgatattacaaataagttccagagagtgaagtccagcctgtgagaggcccatagcactgccctttagaggatcaacatggagatcgttaggtctccctccaaaccagcctgcatgatactcattgcactccagcctgggcaacaagagcgaaactctgtctcnnnnnnnnnnnnnnnnnnnngacagaaagcaaggggtgcctaaatctagacttggggtccacaccgggcagcggggttgcaacccagcacctggtaggctccatttctccccagcccagccgcccagccacatgtgtctgcctgacccgtacacaccaggggttccggggttgggagctgaaccatccccacctcagggttatatttccctctccccttccctccccgccaagagctctgccaggggcgggc

SEQ ID NO: 90119 - DNA, 964 bp, Homo Sapiens
  misc_feature (45)..(71): n is a, c, g, or t
  misc_feature (181)..(189): n is a, c, g, or t
  misc_feature (253)..(320): n is a, c, g, or t
  misc_feature (332)..(389): n is a, c, g, or t
  misc_feature (408)..(427): n is a, c, g, or t
  misc_feature (820)..(857): n is a, c, g, or t
tatttgaggtggtagggggaaatcgtggcacgcccggttgaaatnnnnnnnnnnnnnnnnnnnnnnnnnnntattttgggcggaggttattttaaaagacaaggcccggatcgctgttggtcgacgttttgtaattcccaccctacttggggaggtatgggggcggacgggttcacctgannnnnnnnnaattcaagggcaagcctgggccaacattgggggaaaacgccgtcttttttagaaaaatacaagnnnnnnnnnnnnnnnnnnnnnnnnnnnnnnnnnnnnnnnnnnnnnnnnnnnnnnnnnnnnnnnnnnnngcttgaacccgnnnnnnnnnnnnnnnnnnnnnnnnnnnnnnnnnnnnnnnnnnnnnnnnnnnnnnnnnnagagcgaaactctgtctcnnnnnnnnnnnnnnnnnnnngacagaaagcaaggggtgcctaaatctagacttggggtccacaccgggcagcggggttgcaacccagcacctggtaggctccatttcttcccaagcccgagcagagggtcatgcgggccccacaggagaagcggccagggcccgcggggggcaccacctgtggacagccctcctgtccccaagctttcaggcaggcactgaaacgcaccgaacttccacgctctgctggtcagtggcggctgtcccctccccagcccagccgcccagccacatgtgtctgcctgacccgtacacaccaggggttccggggttgggagctgaaccatccccacctcagggttatatttccctctccccttccctccccgccaagagctctgccaggggcgggcnnnnnnnnnnnnnnnnnnnnnnnnnnnnnnnnnnnnnngaaacaaaccacctctacatattatggaaagaaaatatttttgtcgattcttattcttttataattatgcgtggaagaagtagacacattaaacgattccagttgga

SEQ ID NO: 90120 - DNA, 452 bp, Homo Sapiens
  misc_feature (70)..(81): n is a, c, g, or t
tttgcatttaaaacatagttgctttaataaaataaagacaatacaataatttccagtaagcgacccatcnnnnnnnnnnnncagtgcaatagcccttaataaggtgagtcatgtgtaatttcgtgtgcagctgggcatcaccaagtcacagtttccagcgtgctgctcagccctccgagtgtgtgtgctcatccttttcatagaagtcccatcggccatggagagggttgggctgcagagctgtgattgccagaggcccttccttgagaactgtggggaaggaggccctgggggtttcttctgtaggcagagctcaggccccagtcacctctgccaccctcagcctggcactgttgtgccagagcctctgctgcctctctcttcctacccatctgcagaccagcagaatattctccccctctcatcaccaaccaggagtttggtgtggtttc

SEQ ID NO: 90121 - DNA, 366 bp, Homo Sapiens
gaccacatatcctgtatccagcccactggattttcacaaagtgaacacatctgtacatctcacacccagatgaaaaaataaaatattagcagagccccaggagcaccccctccaacctttcagataccacccccaaccccaagggaaagcatgcccctaggactacctagctggctgtattttaaattaaccccttcgttctggccaggacagcctgtgctcttctgagagaaaccttttcttgcagcaactgtcacttcaaagcagggggaaaataaagtgtgtgtgagggagtaattttgtgtgtaggagaaaagtgtttctaattttcagtcctgaaaatgtgaggggaagaaagaatacgtg

SEQ ID NO: 90122 - DNA, 365 bp, Homo Sapiens
ctgtacattttctttttacaaatataaactaggcttaagttacagctaaaattcaacaggttttgattcacattccatgggaaaaagtaggcagcagttccttacagtgtggcccagggacccccgggggatacctgagactttcaggagatctatgagatcaaaacttttcataatacaaagacattattatttgtctttttcactgtcccctcctgaatatacaacggagcattccagatgctagagtgacagcctcactcagactcaggggatgcatgcttgcgtgtacagtactcgtatgttttaaatttgttttaactcctaatatgtaagtatcaataaatataatcaccttaagtaaa

SEQ ID NO: 90123 - DNA, 458 bp, Homo Sapiens
agcgtcacgggtcaggaatgctgcacaggagagtctacggacaggctagatgacccttagcatggagggagaggacccccgacatctgtcagctctgcagtgctcgtggttccgtcatggtggagctgccgagtgacccgctggcctccctgagctgggcttgaccatatgtacgaaggaaagaaaaggcatcccatggatgtctcctagttccctcactgtggcccagtgttgtatatcaacgtcatcatggatacacctcctgtgggaggtgattaggccatgagggtggagccctcgtgaatggaattggtgcccttatagaagggaccctggaccctggacctccactctgcaaggatacagtgagaaggcagaacccagcctcaggtacactcatctcagacttgcagcctcctgaactgtgagaaataaatgtttgttgtctgtggtaaaaa

SEQ ID NO: 90124 - DNA, 567 bp, Homo Sapiens
aagttccaaggattcttaactttctttttctttgtgggatccggaaacccccttttagagcaaagccaatatctctcaagaaagaatgcaaagaccattcacttagccaaggcattttactcagcatggtaattcccaccctgatggtcccaagatggctgcagcagtttcagccatgttatcctaatccaccaacatctggaggtatctgtcttttcaatctccatctattacaaatgtaggatacttttaccagaaggtcctcctctagactactactcatgtttcattggacaaatttggtcccatggaatttcttaagtcatttactgatgaggaaagtggaattatcatgactggattagactacctaagattcaccactcctgagcctggagaaagataattttctcagagcaaacaactgcatatggctgaagataggaatgaactataaaacaaaattggagtcctccaggaaagaaagggggaattaaagggaaatgattgtgtaggcaaaacacaatagtctccaacgccaaataaactttgttttgttactctctc

SEQ ID NO: 90125 - DNA, 424 bp, Homo Sapiens
ccagtcagaaccttagaatgtgactttactgagaaatagtctttacacatctaggtagttgagatgaggacatattggataatggtgggccctaaatccaatgactagtgtccttataagagggagatacagacacacacagggaaaaagtccacgtgatgacaaaggctgagattgcagtgacagagtgataaaccaaggactgtaggcaaccaccagaagatgagagggaggcacgagacagattctccaatacagcctccaatgaaaaccaatcctaacaccctcttcaattcagacttctagcctccagaactgtgagagcatacatttctgttgttttaagccaccaattttgtggaatttattatggcagcccaaggaaacgaatacaagggctaactttaaaaactggatcttcaaa

SEQ ID NO: 90126 - DNA, 557 bp, Homo Sapiens
  misc_feature (62)..(62): n is a, c, g, or t
  misc_feature (106)..(106): n is a, c, g, or t
aaaatcaggcgcagggggcctcaggaggggttaggcgggaagtctctgtgccgtgacgctgncgaagacgggggctcgctgtggccggcgctgcagaaactggccncgtgtggaactgggctgccggtcagacctcccagtgcggcaaagccctggaaatgggcgtgtttggcgcatatttcaacgtgctcatcaacctgagggacatcacagacgaggcatttaaggaccagatccaccatcgtgtttccagcctcctgcaggaagccaagacccaggctgcactggtgctggactgcttggagacccggcaggagtgacgaaaccccagggacagcaggaccttcgacgctggaaggatagcctcgcttcccaggtgcagctcccggcaggtctggacagttccacagagcacggtactggccctgtcctcagttcccgtccacccttcaaccagtggctcctgggagacttttcctccctgcctcagctccctgcccagccagcctcctgtctccagagaagttctccattaaaaaataatttagcaaatcaaa

SEQ ID NO: 90127 - DNA, 382 bp, Homo Sapiens
  misc_feature (35)..(35): n is a, c, g, or t
  misc_feature (232)..(244): n is a, c, g, or t
cccaaccacgtcccggcaactcacaagcccccagnacgtgttcgtttcttctgtggctgaaactacttctcaggccactgcttcagaagtacagaccaacagagatggtgaatgctgacagctgccgggagactcacgccttagtgacagtctccaggagaagactgtgaggccaccatttgggccacactgagaaattgtttttcatggttctataatgcatcttggcagnnnnnnnnnnnnncccaaagctccttgtgctgaactcccaaaatgtagcaagtccagcccctgccataggcccaggcttcgtgctccccacccttggcaagttctccccacccccagccccacagtttattaaatgtttgattttcaaaaa

SEQ ID NO: 90128 - DNA, 414 bp, Homo Sapiens
tttaaagtggcaaaaaatgtgtattctatgcctctgtgaccccagccccctccatcttcagcggactaggttgaagtgctggtctgctcctctggtcctcttcagccagcatgggactggtgaggaaaaggttgtgctggactcctcaccgcctggctacctgaccttggtgttgagcttcaggtatgccacatagtgtgtcaggagcagcctttggaaggcaccgctgtagaaggcccaggccgggatcaggctcagaaagcccgccaagatttcatgggcaaggcagccacaggtttcaactcccatttgtgaataaattaaatgactctttacaaaaccatcagcagtcttggtgtatcacatttggtatttagaaacttttgtcattgcagtcggggaagcatattgggg

SEQ ID NO: 90129 - DNA, 593 bp, Homo Sapiens
gcggccgccgcctccgcccagggccacctaaggagcggaccccgcatcttcgccgtctggaaaggccatgtagggcaggaccgggtggactttggccagactgagccgcacacggtgcttttccacgagccaggcagctcctctgtgtgggtgggaggacgtggcaaggtctacctctttgacttccccgagggcaagaacgcatctgtgcgcacggtgaatatcggctccacaaaggggtcctgtctggataagcgggactgcgagaactacatcactctcctggagaggcggagtgaggggctgctggcctgtggcaccaacgcccggcaccccagctgctggaacctggtgaatggcactgtggtgccacttggcgagatgagaggctatgcccccttcagcccggacgagaactccctggttctgtttgaaggggacgaggtgtattccaccatccggaagcaggaatacaatgggaagatccctcggttccgccgcatccggggcgagagtgagctgtacaccagtgatactgtcatgcagaacccacagttcatcaaaccaccatcgccaggctttcccaggtcact

SEQ ID NO: 90130 - DNA, 686 bp, Homo Sapiens
  misc_feature (341)..(342): n is a, c, g, or t
  misc_feature (458)..(458): n is a, c, g, or t
  misc_feature (471)..(484): n is a, c, g, or t
  misc_feature (615)..(639): n is a, c, g, or t
ggtctcaaaaaataaataaaatagaagcagccttgtaactgtatttaccatgataatatattctgcacggtaagaattccttttacagacattctttatcaagaggtcggcccttctttttcaggcacataagccaaatgcaggcctgtgtgtagctgtgtgttttttctgtggttgccgcatttattccacctccagctggaccccccactgcaaatagagaacagcggtgggggatgggggttaaaaagtagagaacctcctttctgttaaactaatttcacgtgacagtgcatgtatttattcaataaaacctttatgttagctcaaaacacccagcnnacccctatcccattccccaccccaactcccctttctccactccatttccaacctccctaaataataaccaatctccccccattcctctctccctatccctatccaccactcctaantttttgccggggnnnnnnnnnnnnnntcaaaaacttttttcaaacctttttcttgttgccgcccgggcccccctcacggggacaggcaaccgcgggccaccccccgtttcccccaaaaaaatcctccggccacacaaataaagggcgcgtgggattnnnnnnnnnnnnnnnnnnnnnnnnngcggggccaccccggaccgttttttggaaaccaactccaggaacggg

SEQ ID NO: 90131 - DNA, 457 bp, Homo Sapiens
gaaagatcaggacaaggttatgatttctcacccaagttcctggggaaaaggatcatgagggaattacttattaacaaggaaaaagcaaagaggaactttacaaactattacagttttccatcatcacttgactgctgacaagaagcctctttgaattccagtatacacgatcacattttaaaaccttcaagacgccgtttaatcaggagttgtaaggcacatttgttagagagagctgcactttaaaaattatacagacatcacctgaagttattaaagttatcaaaacatattaaaaaccttcaagtaagaggctactccccaggaaacgtgtggagccagtgaacggaagaaaaacaatggaaggaaggcttgaaaagtccattacaaaactacagtcctttgaaaaagatttcaaagatattaaaatgaaaactgattacattaaacaataaaa

SEQ ID NO: 90132 - DNA, 394 bp, Homo Sapiens
ttctcccatggttggcacggtccggcatttccgggatcgaatccgaggtatttgagatcacggacttcaccactgcctcggaatgggaaaggtttatttccaaagttgaagaagtcttgaatgactggaaactgattggaaactctttgggaaagccactcgaaaaggtcagatctatttgctggtgtctctaaatgactatttactttgaaacctctattttccagccctttgctgcatttggcacatttgaattaaatgttttttaaagttacgtataatctataaacatcaaatagcatttggaagaatttggatttaaatctgtggcaaatgatatatgtaagacatttgtgaaatgtttaataaagttatatatatgtgtgtgtgtaaa

SEQ ID NO: 90133 - DNA, 645 bp, Homo Sapiens
ataagtattttttgtgtattatgactacgttaggagtttattattgtcaaggacagtacaactgcaaagggatgctgtatagcaacacatcagaagtcggaaggaactgacacattctctcagagctcaaggtcttaaagagcttgagttaaatctaggtacagttacaggcatgtatagacttaaatggatgcaatggaagctaactaaaataaggcttagttgtcctttctatttaaataccccaagttgtcttcttacttcctctcccctctcccattttgcactgtgtgtcgatgcaatcttcgctagcacaaaatattgtcgctaatagtcatttctgttttcccattgtaaatgctgttgagctttattctattttatgttactttgttaatgaaatttaggaaagcagttgtttctttaaatttattgtgatattctatatctagcggcctttatatgcaaataaaattgcaagatttttaaattcgtgctgtttagagggttggatggtggaggatggtagtttcgtcctggggaaggagggatttattcatatgcaacatcagtaatgcctttcagaagaattagaataagtgatttttttccctaattttcaataaatttttattacccaccaaa

SEQ ID NO: 90134 - DNA, 450 bp, Homo Sapiens
  misc_feature (34)..(35): n is a, c, g, or t
tcactaaatgcggttgaagagtgtgtgtgtgtgnntcgcgcgcgcatgtggccaaaaaatagtgccataatgtcaaattcttcctttgctctgtttttgagagttgatgacatcaggcacttttcagtgtttggggaaattgattgggatacctcccccaaaccaactcaagtctgtaactggaagccaggtggttggttttctggtccgctttgtcctctttcttttaccgtcatcctattcaccagcacttaatgtaagtagatgttttagaattgcaatatttattggtttagtatttgtcatccttagaaatgttaatgatgtatttttatattgataatataaatttatgtacagtatgtgtgtatatgtatttcaggatgttatagtattgtactttgtatgtgatggtttttgtgtcttcataataaatatgtcccttaaaaa

SEQ ID NO: 90135 - DNA, 651 bp, Homo Sapiens
  misc_feature (376)..(376): n is a, c, g, or t
atccctctgtatattgaatatcagcaataataatattgatgacattacagacttagaactactagagaatcttaatcagctcatagccgttgacaaccaacttctgcatgtgaaggatttggagtttttactgaacaagttgatgaagctgtggaaaattgatctaaatggaaatcctgtttgtctcaaaccaaaatacagggacagactgatattggtgtccaaatcactggaatttcttgatggaaaagaaattaaaaatatagaaagacaattcctaatgaattggaaagcatccaaagatgccaagaaaatcagcaaaaaaaggagcagtaaaaatgaggatgcaagcaattcactcataagtaacttcaanacaatgcatcatatagttcctgtttattacccacaggaatctctctttgaagcaatctgaaagcttgctgacaaaaaatgatgtgcatgaacctcacctcttccataacccagaagaaaaagaaaatttgtttgtggaaaatgagtaaattcagcctcaagtgacaggaaacgtttgattttgtttttaaccttatatgactaggcaacaatatcttttgtgggtttgtagctttatggtatctcataatataaggaaaaacttttaagttaaaa

SEQ ID NO: 90136 - DNA, 377 bp, Homo Sapiens
acgtacaaacataccagattcgcacagcacccactagcactattgcccctggagttgttatggcatcctccccagcacttcccacacagcctgtgaagaagcagcacgaaagagagaggtccgtctaatgaagaacagggaagcagctcgagagtgtcgtagaaagaagaaagaatatgtgaaatgtttagaaaacagagtggcagtgcttgaaaatcaaaacaagacattgattgaggagctaaaagcacttaaggacctttactgccacaaatcagattaatttgggatttaaattttcacctgttaaggtggaaaatggactggcttggccacaacctgaaagacaaaataaacattttattttctaaaaaaaa

SEQ ID NO: 90137 - DNA, 351 bp, Homo Sapiens
ggcacgagggcttttggctcagagtctgtatctagcctgtgtcaggatattgcctgttcttcccaccttgacttccagagcagccatcgctggtgagctttagttctccttagggttccaaggcattagaagtaagagtgtagcttggaaaccaacttctgtgatttaggaaagctgtctctttcctaaggtaatagggggtttatttcatttaggccccagttggtaggttttaaaataatttataaagtgttttaataatttggttgtcttttttaccttgctaaaccaagcctctaaaaactcaaattattcccttgataaatttttataatggaaaagcaaaaaaaa

SEQ ID NO: 90138 - DNA, 456 bp, Homo Sapiens
gatgctgtaacatttatagaagtattataggatttgtgaaactacgatcaaataaagtgaaaagatctcaaaaacttgtttatatggggaaacttaaagagaaggagtcctttggtgagattagcgtccttcttcaagttcctttcacgtgcacaatcattaccaaaaaagaagttgagatggcaatcattgaagataaggacctatttgtggcctagatctagaaacaacctcagtgaacattaattaagaaagtattgactaaataatggaataattgcattctggaatactatcaaactaccagcaatgaatttggtctattgtgactacatatcctggattccccaggaaagtcccactttcgaattgcctttcaaacacagtttttattagcagtctttcttggtttggatactaaaataaatatagttatcattgcttgatttaaaaaaa

SEQ ID NO: 90139 - DNA, 1306 bp, Homo Sapiens
  misc_feature (1233)..(1241): n is a, c, g, or t
gggacacaggccttgatgatgatattgaaaatgaagctgacatctccatgtatggcaaagaggagctcctacaagttgtggaagccatgaagacactgcttttgaaggaacgacaggaaaagctacagctggagatgcatctccgagatgaaatttgcaatgagatggtagaacagatgcaacagcgggaacagtggtgcagtgaacatttggacacccaaaaggaactattggaggaaatgtatgaagaaaaactaaatatcctcaaggagtcactgacaagtttttaccaagaagagattcaggagcgggatgaaaagattgaagagctagaagctctcttgcaggaagccagacaacagtcagtggcccatcagcaatcagggtctgaattggccctacggcggtcacaaaggttggcagcttctgcctccacccagcagcttcaggaggttaaagctaaattacagcagtgcaaagcagagctaaactctaccactgaagagttgcataagtatcagaaaatgttagaaccaccaccctcagccaagcccttcaccattgatgtggacaagaagttagaagagggccagaagaatataaggctgttgcggacagagcttcagaaacttggtgagtctctccaatcagcagagagagcttgttgccacagcactggggcaggaaaacttcgtcaagccttgaccacttgtgatgacatcttaatcaaacaggaccagactctggctgaactgcagaacaacatggtgctagtgaaactggaccttcggaagaaggcagcatgtattgctgagcagtatcatactgtgttgaaactccaaggccaggtttctgccaaaaagcgccttggtaccaaccaggaaaatcagcaaccaaaccaacaaccaccagggaagaaaccattcccttcgaaatttacttccccgaacaccaacctgccaaagctcaacagactgcagcccttatgcccggatcctacgctcacggcgttcccctttactcaaatctgggccttttggcaaaaagtactaaggctgtggggaaagagaagagcagtcatggccctgaggtgggtcagctactctcctgaagaaataggtctcttttatgctttaccatatatcaggaattatatccaggatgcaatactcagacactagctttttttctcacttttgtattataaccacctatgtaatctcatgttgttgnnnnnnnnnatttacttatatgacttctatgcacacaaaaacagttatattaaagatattattgttcacattta

SEQ ID NO: 90140 - DNA, 432 bp, Homo Sapiens
  misc_feature (289)..(318): n is a, c, g, or t
atgcaattaaggcagagaagaaataagatggaaaatggggagaaataaacagattcttttccattaagtattgttttgagatttctaattttttcaggacctctaagaaaattgtgaggtgtcacttctctcttctgggtctatctgtaattgaatctaggtcactattctaaggcaagaaaagtctgctttccactttcctacatcaggctgaaatttgggggagggacaagggtcttgcaatttcatttaaaatgtaatggtggatgaactgataagcaaatacggnnnnnnnnnnnnnnnnnnnnnnnnnnnnnngcatggttttaatatgctacagatggggggaaaatgatttacatgagagtttatttcctctttgctgatatgaaagaattacagatacaaaacccactgatctatagaataaaa

SEQ ID NO: 90141 - DNA, 634 bp, Homo Sapiens
acgagttaaacatctacgttaagttaaccccgccccctttgttaaagtaacgcttttcagtctcttagggcaacagcgaactttatttagtgctaagtgcgaggtgttttgcctagctccccttcccacccatttaattctaaagcacacttactgcgggtcttccaaacctaaaagaaaaagttgagtcctgagaacatgtcacacatgtagagaaattctcgaggcttttggcaactttccaaggtcttcactcctctactcctcaactgatcgactatttcttaacactctatgacaaaaaaatcccgatccagccaagcagttccatggacttgtgcctacaccgtgctcattcttgccctttgctcacgccatacatcccatctaaattgtctcctcccctcttaagcaaccaccaacccacattttcttaaaaggtgactctggacatcttatttttgcttcattactctgcttcctggctcttacttaatccacatgttgaggcgtatctgcattccgcctggggtgcctgtgtttctatatccaaccagaatctgcttaacacagcgagttctgggggtgccttactggtgtctagtagagaaaataaaaccatgaacagcaaaaa

SEQ ID NO: 90142 - DNA, 541 bp, Homo Sapiens
  misc_feature (284)..(284): n is a, c, g, or t
tgagccctagttgtttcatttattaaattcttgagaaggttcagtgccattaatacctaaacccaggcacatgttctctcgtcacctcacccttaatagcagaactgtttgttaacaacatgattaggcatcggagatggatgttggtgaatcatattttcctgaccgttgccacactccatccagtgtttgtcagggcccagactggaaggacctccatttagcccgttcagaggataccgaaaatgttcctgcgctccagagcccttccaggcgaacgtcantgtggcctcctgggacaatcactagattagcagaggtcctaggtttgccatcttactcccatcactcgctagctgtgtaacggggcaaatcatttaatttctgactctcagtgttttcatctgtaaaatagggataatgcataccttttctactatacgaagttgttaccaaatgagattttggcggggaaggtgatttgtgaattataataatacatcaagagtattttccaaataaatgaccaaatccccagggt

SEQ ID NO: 90143 - DNA, 355 bp, Homo Sapiens
agctgtgcatggtggtgtatgcctgtggtagcagctactctgaaggctgaggtggtgcggctgaacaagctggaataatagaagctggagatgaaattcttgctattaatgggaaacctctggttgggctcatgcactttgatgcctggaatattatgaagtctgtcccagaaggacctgtgcagttattaattagaaagcataggaattcttcatgaattttaacaagaatcattttctcagttctcttctttctttagcaaatcagagtgacttctttaaaccacaggttgttgaaatggccaacactggtacagacacggactataaaaatctccaagcttgtgcttacaaa

SEQ ID NO: 90144 - DNA, 898 bp, Homo Sapiens
  misc_feature (44)..(78): n is a, c, g, or t
gagaacgacgagcgcagcgagtctgtgagcgaggaagcggccgnnnnnnnnnnnnnnnnnnnnnnnnnnnnnnnnnnncagtcgacggtaccggacattgcccgggaattcggccattacggccggggctgtccagaaagaccatccccctggagcctggcattgaaaacacagaacaaaggatgcaagtacagcagcaacacagccaggaggccagccccagaattgggaggccaatcagtgctactgggctcaagtgctgttataaggagaagtgtggctgtacacgatgctctgtgtgttcaagtgctcaagacctcggctggcctcggactgagtctggatggggcaaaatcatcggtcacgggagatgggcccttggtcattaaaagagtgtacaaaggtggtgcggctgaacaagctggaataatagaagctggagatgaaattcttgctattaatgggaaacctctggttgggctcatgcactttgatgcctggaatattatgaagtctgtcccagaaggacctgtgcagttattaattagaaagcataggaattcttcatgaattttaacaagaatcattttctcagttctcttctttctttagcaaatcagagtgacttctttaaaccacaggttgttgaaatggccaacactggtacagacacggactataaaaatctccaagcttgtgcttacacatgaagcctgacttaactgtatgtgcaacagcaatgaaattaactccagaagccttccacctgcgtcacccaggccgggagggttccttcgttccagtgcctgtcccctacctttatgttatgtttactgatggggatacaagatgtgacacacccttctttatttgaaacaaacaaacatttagctagaaa

SEQ ID NO: 90145 - DNA, 518 bp, Homo Sapiens
  misc_feature (54)..(54): n is a, c, g, or t
  misc_feature (61)..(61): n is a, c, g, or t
  misc_feature (63)..(63): n is a, c, g, or t
tattttaatgaaaatggacagtatgacaaggatatggatttttgggaagagaanaagttgnanctttcactaaggatctggatgtgtggaggcaaactcttttataatcccctgctctcgagtaggacatatcagtaagaaacaaactggaaaaccgtctacaatcatcagtgctatgacacataactacctaagactggtgcacgtttggctggatgaatataaggagcagttttttcttcgaaagcctggtctgaaatatgtcacctacggaaatattcgcgagcgtgttgagttaaggaaacgactgggttgcaagtcatttcagtggtatttggataatgtcttcccagagttggaggcatctgtgaacagcctgtgaaaggaaaacaaatcactttcattaataaagggttaaaagtctcctagtcattcaacatagtgtcacaagagtgtaagtttggaacatcgtggaattacgtgaaatgcaattaaaaaaatatgaccagacgtgaaaa

SEQ ID NO: 90146 - DNA, 448 bp, Homo Sapiens
accccaaaaagggtactctgatagtactggagaaggtttactgctttgtcctgtcatcgtagttcatgtttttttccccaaggccaaagattgggctgggattggggtggtagtgtatttgaatgatgctggagataaccaaagccaacagtctttgccagagctgggctggtggtatttaactgtctttgagttaaatgtaaagtttttaataaatacccagaatccattaactgctggaggggtaaagtgaagctctgttgtaaaataaagctgattcccattatgcgtggtcctgtatacacaggctgtgggtgaccattatggaaccaaaaaatacttatttgttattttgtgctatagaataggaacttcaggggtggatacctatgctgtcaggaatgcttgttataagaattaattaaaacactttgcttaattattaaaa

SEQ ID NO: 90147 - DNA, 279 bp, Homo Sapiens
cggcgccgaagaagttgttggtgtcctgcaggcggcaggagaagatctggcccacgtcgccgccgtcgccgtaggggctcagcttctcgtcgccgtagggcagcacctccgacatggtcgcgtccgggggctccgccgcggcgcctcctccgcccgcgtccccgcccgcggcggacagggtcagcggcgctggggccgggggcggccggccggggacggcccgcgggctgctgcggcggtggcgccggcgagaggccggggggacgccgctagggcaag

SEQ ID NO: 90148 - DNA, 653 bp, Homo Sapiens
actttcccttttgtaagttgagggccaggggtagggatattttttagtttgtgattttacatttatctgtacatactttttcaagattgatcatttttataaccatggttttcctgaaatcctcaattcatcaatatgaaggaaatgaaccacatagactttatgcaataaataacagtgcaagtgagtataactctaactgatgttccacaaaacatttttgatttcaggtttgtatgatgtagtttttaatcgtacattttcatatgcttcaaactaacacatttttaaagctttcccccacttttctctctatttgtattgttagccatcttgaagtgatgttgtttaacataaattgtactgttgaatttggctttacgggtgtaaacactgatggtatatcagtatctgagaccccaaactctccaaatactgatggtgcattttattcttgaagtgaaatctgtgcaataaaataacagactgtctgcaaaactggccttcaatcttctgttttatccagaggtatcattattgatttaaaaaaatctcattaatctctactggtaatttatagggaatctgatcagtgattcaagaacatagtaattctgcattgccttgaataattaataagttttattttaaaa

SEQ ID NO: 90149 - DNA, 483 bp, Homo Sapiens
tcggaagatgaccctgggcttgtcttcacattttccgtgttgtcacttgccggtcctttggaagccgtccctagatgtacactgtcttgccgggacctttctcttctcttcccctgtgaccacgcaggttttcgattccctgccccctgcccgaggacctgcctcctccctgcccgaggaccaagcttcagaagaactgcacatgggaggaaataccaaccgcttaacttcttcagagacaacctctaacccggctcaccaccacgctagctaaaaaagggccctctcccagggaagatcccggaggaagagtgggaattcaccctccccttgggggaggagtgctttctctacccttaatttatgaactgagaaaaatcctaacaagcctactatgaaataaagatgcccttaacccatttatgcctagtgttccattattggaacgctaagcttgtgggagttatttatatcctactgctc

SEQ ID NO: 90150 - DNA, 323 bp, Homo Sapiens
gtgtgagccaccatgccttgccaagaaagaaaatatttttgtatagctgtacaatgtgtttgtgttgtaagctaagtgttaatacataagagtcaaaaagtttataaaatagtaataaaaaagatatagtaagccaagggaaagaaaaatattcttttgtagatttaatgtcgcctaagcgtccaatgtgtacaaggtctacagtagcgtacaataatgtcctaggtcttcacattcactcactgactcactcagagcaacttccagtcctgcaaactccattcatggtaagggccctatacgggtgtcccattataaaatct

SEQ ID NO: 90151 - DNA, 557 bp, Homo Sapiens
tttggaggttgtataaaaatacaaatttaaaaaatgaacttttattaatcataaatacaaaataattgagtggtatttgggctcccaggggctcaaaggcctgaaaacagaaaggaaaataggagtctccacctgtgattcaatgaaaaagatgaaactcctaattttgctaatgctgcgagcataccatttgatggatacataatttaaccagatattaacaggggaaacatataagccatctcactattgtctcagtaatagactgagcttaccccaccaacccctcagaacggctttctataagcaataaaactgctccttttctcttcccatccttctaacctgggttctctctgctttatgcttaccagaagtaaatgtgccagcaagttcagtatctctgtatgttttagtattactgaatttatttgtattcactttttatgttcaagacaagaaaactcaactgaaggagtatattaaacctttcttttctccctctgaacactcatggcccattcatttatactttcaatttgcccgacttcctccat

SEQ ID NO: 90152 - DNA, 451 bp, Homo Sapiens
ccaggtatctgaggaagaagcacccagtaattgaagctggcatctcaagaaggcacattgagattggttctataagtgttgggaaacccccaaattgcaatcagctgctactactagcaggcactattgctttcggagtgaagaattgttgctagagtgagacttaacaggattaagaaacccatccgaaggaaacagcaaattccttcttccttctctacctgtgaagtgtcacgctggtccctctattggcagagcctaacagggagacagaaatgcttgcagaattcaaaagagtgggtttgaagccaagagacagtagcttactgtcatggccttaattataatacaagtggaagataatagaaataatactttaggtatgtataattgggtgcatgtaaacattttctgggatactaactactgggtagacatttggccttattgt

SEQ ID NO: 90153 - DNA, 573 bp, Homo Sapiens
ggtttagcactaggatttagctatgaagagagctcataggctttcaggtgctaattgagatctgccctgttagagtcttggggtgctagattggtcacattgacaccagtggcagggaaggcatctatgagtttgatgctttttatcacacacttcagtgtttagaaagttattaccaatacttttaaacaacactccaagaaaatttgctatatttctttctcatcactacagagagagtagatttccccatagagagcacagcctccattagtaaggttggtgactattggtaagaggtggacttcattgacaccaagtgggaggtagggaaagcccagaaatggcaggatgatatggtggttctgtcgttgggaaaggtattgggttttgctgtttgtatttatactgtataatagataccacgctttttcttattatctgtatatgtattgcttttcatgtttgatattttcccatgccaagatttgtttatatatattttcaatgttaaattaaattgatttgggtaactttcttccccaagaaagtattttcccccttaagtataaa

SEQ ID NO: 90154 - DNA, 607 bp, Homo Sapiens
attgctctatgtctgccttcgaccacagcaagccatcatcctccattgctcccggggactcaagaggaatctgtttctctgctgtcaacatcccatctggctcagcatagggtcactttgccattatgcaaatggagataaaagcaattctgacttccaggagctaatctgaccgttctattgtgtggatgaccacataagaaggcaattttagtgtattaatcatagattattataaactataaacttaagggcaaggagtttattacaatgtatctttattaaaacaaaagggtgtatagtgttcacaaactgtgaaaatagtgtaagaactgtacattgtgagctctggttatttttctcttgtaccatagaaaaatgtataaaaattatcaaaaagctaatgtgcagggatattgccttatttgtctgtaaaaaatggagctcagtaacataactgcttcttggagctttggaatattttatcctgtattcttgtttgaattcctcctctatttaagatatatacatggaatcgaagtgtttatgtaatagttctatccttttgcctgcaggtcagttgtaataaatctaggatgtgatgatg

SEQ ID NO: 90155 - DNA, 384 bp, Homo Sapiens
aagaaggctttcgcaagaaatgaggctttcacaagaagacccttgtcaagtatctgagagatttcacttctatagcaattacatcgtgagagcactggccctataaagccaagaaggaatgaaaagaggctaagacaaaaaataaacttcagattttgtaacatgatagtctcaaagacaggccaacacaggcagctcattggaaacaagagacctggtacttccaacagccaaaaagctggccaaacatcaggaacaagggaaagacacatcaggtctgagcaagcaggaaatcaactctacaaactttgaaacttggtaaatatgaaaacattctcaataccatttgtcatttaataaatacaaattatactattaaaaaaa

SEQ ID NO: 90156 - DNA, 607 bp, Homo Sapiens
cctgggcagtggggagtggtgagctccattgtgtacacttggaagcagcccagaaaggtgaagacctgttcgtgaactccagaggccattggaagcatggaaggctatggctggcactcttcctctttttccagttcactgaggcagatgggaggcccggaggagaaagaatgaaggaaggcatttcagcccgagtaaactccccaggcccgctctgtgccaggcagtgttgcaagcctcgggtagggtgcttctagcacggtgctttgtgcacagtaaacactccagcggctgttgaccaatgaatgaatgaagattgtaggctcaaatattcaagttatcaaagtgcaaagaatgagaggttgtttgcactggacttaaaaaataaatagcctggacctgtactgtcttatacaacagctatgagctactggtatgtggctagtccaaactgaaatgccctttaagagtaaaacacacactggatttcaaagacttagtacaaagaaaaaatgcaaaatagctcattagtaatttttatgttaatgacatgttgaaataacattttgatatattaagtaaaatatagtattagaattaaaaaaaa

SEQ ID NO: 90157 - DNA, 441 bp, Homo Sapiens
gaaataaagactgagccggacttgaacatacacaactccgggcagatgggacccgggatggggctgctccatcaggccacagcttccagaaagagagcatccatgatctctgaagagcctcttgggcagcttggcccctggttataactatgattcattcattaagaaatgacaaaacaccccacagatgtatttggaccaagtaagcacaataaaagagctaaatcacggcttcttctagggcaaaatattatctggggaaagattacttgcttctgataattaaatagctaagaggaaccgttagtgccttttctctgctcagaatatcagaacaggaacagactgtggatatcctccaattccctctgacaatgagggttagagagaggtgcctagcagttagaaagcagcaaagccagattgtcccaagtccctacg

SEQ ID NO: 90158 - DNA, 350 bp, Homo Sapiens
tggctttcccagtgctgaggactggggtcggccgctggggttgggtccgagagggtgtacctggaaggaagcaagaggggagcttccttccctcctcttccactgagacctgtgtgaggcgtcaccagggggagccaaagggccccaggtcagccactctgggcccctgacgactgccatcctactggttggaccagcttccccaccgaggcacagacgtggaggtgggcaggacggagtaggcagttggattcactctcaagaccctgtcaaatagccaaagatttggcttaaatcctcctttggcttattgttcctttttcctggagcaataagaatgatcagttaaa

SEQ ID NO: 90159 - DNA, 1080 bp, Homo Sapiens
caaccggccacagattctgacacggagagccgtggtctgcgggaataccactctgtcggggtgcaagtggaagatgagaagcgacacggacgttttacacgttctaacagcgtcacggccgccgtccaagctgacctggagctggaggggttcacaggccacatcaccacggaggacaaaggccttcagttcggctcatccttccagcggcactccgagcccagcacccccacccagtacagcgcggtgagaactgtacggacccaggggctcttcagctatagagaagactatcggacccaagtggacacctccaccctgccccctccagacccctggctggagcccgccatcgacacggtagagactgggaggatgtctccgtgccgcagggatggctcgtggtttttgaagctgctgcacgcagagacaaagaggatggaaggctggtgcaaagagatggagagagaggcggaggagaacgacctctcggaggaaaaattgttaccagctcatgctttacaagaaaatgccttggcattatgccaaagagaagtcgatggaggtgacgatggacgccgaatgttggggagatgctgccttccacgtgacccacagtccccgcagcacggctgcatggggctggtgcaagtcagcacagccgtgttccgatcgttcacacgccgtttgcatttctcatggttagggtacatttaacagagtaacttcacaattttgatatctaaaaatcactcattttctgcagcatcttccacccttgttagtatatgcctcaacttggccaaattgtcttaattataaaagggatttataatctttagcacaaagataaaacacagaaaaactgcattgcctaagttgacgccaaattaaattgccagctctggttttgtgcatgctgacaggggcagcgtagggctggggtgccttccttccaggatgagagcaggtgatgagacctgcatgtcactcaatcaagctgtgttttctacaccatgtgtttcctcaaaagaacacctttgaggaggaggagagaggaaaaaatttaggagagagaaa

SEQ ID NO: 90160 - DNA, 548 bp, Homo Sapiens
  misc_feature (291)..(291): n is a, c, g, or t
ccgtgttgggggagaatattgagaatgcaaagaccgcttttattcccccaagtatcttattttaagcaaaatcaccaatcaaaatccaaaagagttttgtttgaacttgaatttttaaatttcatctggaagaataaacgagttgaacatagtcagaaaacttgtgaagtaatgtggggggtacttgccttaccagaaccctaaaatgtgcctccaagacagtcgtgggaacagtatggagccagcagcagaagccactcacgaacccaatggaggagaacaactcagaanacagacccaagtcaatctaaggtttaactggagaaatgttaaacatttagggaaaatgtttttaaaatcagtgattgggactgcttaacaatttgagggaaaggttcaattcctaccacaatcaaaataaattccacctggactaaagaattaaatgttttaaaaaataacatcataaacatactgaaagaaaacataagtatatattgacataattctgggataggagactattgccagacataatactaaaagca

SEQ ID NO: 90161 - DNA, 529 bp, Homo Sapiens
gacgtaattaaatccaactttcacagtgaagtgcctttttcctagaagtggtttgtagacttcctttataatatttcagtggaatagatgtctcaaaaatccttatgcatgaaatgaatgtctgagatacgtctgtgacttatctaccattgaaggaaagctatatctatttgagagcagatgccattttgtacatgtatgaaattggttttccagaggcctgttttggggctttcccaggagaaagatgaaactgaaagcacatgaataatttcacttaataatttttacctaatctccacttttttcataggttactacctatacaatgtatgtaatttgtttcccctagcttactgataaacctaatattcaatgaacttccatttgtattcaaatttgtgtcataccagaaagctctacatttgcagatgttcaaatattgtaaaactttggtgcattgttatttaatagctgtgatcagtgattttcaaacctcaaatatagtatattaacaaattaaaaaaaa

SEQ ID NO: 90162 - DNA, 420 bp, Homo Sapiens
cttccccatccggtcacagcacagatctccgaggaaaatagaggctctgcgctgtgtgggagacatactggcctcaccaccgagttgtactccagaggaaagcttagttgtattagggcaatgtcagagtcataacttagtgtgttaaagtcttcatgcactattatgtgtttggcccttctcacctgtatcggtggcaagtaagcaaattacaacgtaagaaagtcaaagaatccagcaacttccttgttgatggtccaaaataatcctaaatttctgcacttacatacataaacaatgcagaagactttctattaaatttaaaagagcaatattggtttacaatttgcagggggctatgaaccaccttctggataaaggtggtgctggagaaataaagctttgaaaacctgaaaaaaa

SEQ ID NO: 90163 - DNA, 393 bp, Homo Sapiens
  misc_feature (302)..(302): n is a, c, g, or t
  misc_feature (358)..(358): n is a, c, g, or t
  misc_feature (365)..(365): n is a, c, g, or t
tccttataatataccagaaatcaaaatgtagaaatgtaactccaaagctgttcaatgaaaaataattaaaagaagaaattaccaacttcattgaactgttgcagttgtcaaaatattccatagatcctaatgctgtaaaatatgtaacaacatttaaaccacaaaaacctttgtaaccttagaaaaagcacaaaaaaacaactcttttggaaatggatgtcagcatttgcattgggatgtcatatggataattactggttaaacaatcaatgtaaaataaacaagttatgttgaacttcatntctgtgacctaaactgtaccctataaaactcttacaagttttcttattgggctgtncatgttntaatacacaaaaataaaaaccattcaac

SEQ ID NO: 90164 - DNA, 488 bp, Homo Sapiens
ccgtgttaccatgtgactaattcaaactcattctaattcctgctgttgctgcttttgatcggttacaaattttcaaggctgtgttaacagcacctcgtggaatcctttttagactcaacttggcttgagttattagtgaaggtttcatcaataacttctaattcaaacatgctaactaaatgactcaaactagcttttctggcctaacgtggatacaatatctcattagtggaaagcctgaaaaatttcaattcagtaagaggggataatccaatttgtactctcttaagaaaattgcttctcaaaagtcacggtggaataatgacctggaatgaagaaaacagaaagaaagttgaagaggcttggaaggaaatactaattgaactgtgaaggcttttaattcaaagctattgtttggcattcatttctgtaaatgtattaactaatatgctgatacctgactcataaacagacaagtacttgtcaaa

SEQ ID NO: 90165 - DNA, 963 bp, Homo Sapiens
  misc_feature (81)..(115): n is a, c, g, or t
aagaactgcagaccatatagggcgctcaccgtcacagccgaacgacgagcgcagcgagtcattgagcgaggaagcggccgnnnnnnnnnnnnnnnnnnnnnnnnnnnnnnnnnnncagtcgacggtaccggacatatgcccgggaattcggccattacggccgggcatcaaagcatggatcagacatcacacgatttttggtaaagaagtaaagtagaaaaatatatgaatgaatgacaaatggtttacatgtggaagactttaatacagaagttttccatgtttgtttaatatatcgagagtaaaaattttcagaacaaaaatcaagaattcaaattctcttctactaattacttttagtattaaatacattttgaaagtacttaacagaaactaagatacaatactgaatatttctgtggtctttttgatttgattcagactcgcaattatgtttcagcaatgttttgtaaagctctttacccctaatatgcctaatcactgtattgtgcatagattgtgtttaaaaaatgtactctcaattacctaaaaatgcttctggattagtattgttctggactgtcataggtatgagtggaacattgcaaaaccttatgggaaatttcagacgcaaatcattatttgggaattctgggccaagcatgaccagcctgcttaggattcaagagagactgtccactaaatacctccagaatgagctaggggcacacattttgggtgttgcttttcttgctttatttcttagctagtcatctttatcaaaaatatccttttcaaaatgaggtacctatggtgtttgtggacaatttgggggttctgtgtaaagtaattgttaaaactattaaataactgaaaacattaaaatgtcaaaatgccacttaagcttgaattttagaatctttttttaaaacatgtataaaactagggttactgttgaagaaa

SEQ ID NO: 90166 - DNA, 618 bp, Homo Sapiens
tccattaagatcagtgacctaggtggtggtgtcccacttcgaaaaatagatcgtctttttaactacatgtattctactgctcctagacccagcctggagcctaccagagctgcccctttggctggatttggttatggtttgccaatttcccgtctgtatgctagatatttcaaaggagatctgaaacttgtattcaatggaaggagtgggtactgatgctgtcatttatttgaaggctctttcaagtgagtcatttgagagacttccagtttttaataagtccgcatggcgccattacaagaccacgcctgaagccgatgattggagcaatcccagcagtgaacccagggatgcttcaaaatacaaagcaaaacaagacaagatcaagactaatagaactttctagaggactgaatgctgtggtcctctctgtgaagaaagattgccttctgcaagtcaaacagagagaactgctttctcccacctgctctgagcgtggcatcacagttattcctagtgcttaaatgtgtattttctctctaccacctggactttcccaaagagtttttcctgtagctactccagatcttccactaaagtagtaactttttaatgaaa

SEQ ID NO: 90167 - DNA, 601 bp, Homo Sapiens
tgcccatgcgccatggagcatgtgttaggtgcctgccgtgggtcaggcacttgattctcaaaacactgccgagaagctcttaccaacgtgacagttgaggctgagagaggttcatgagcttgctcaaggccacgggtagtaataagaggcatggccttggtgccaagtgcctcccaaacaaacagccggggccgtggtcctgcctaaactctcacatccacggcaccacgctgggcccaggcaacagagataaggagagccctggctcttgggatggggtcgcgccgattcacatgctgtgccacggagccccggcttccatccatgatgtgcccctgtggcgggataattgggaaacaacctttttctgattcccagagaactaatgagctgcaaaaagagattagacagggaagaattgctttcggggagaagccacttactcggctcgccttggtttttgctaacaacgtctccttaaactgctgtcaaatctttttctccctgtgtaggattcatcaatcttcgtatgcaaaagaacaccactgcactgcactgctaaaaattcacacaataaaatggactttaacttgcaaaaaaa

SEQ ID NO: 90168 - DNA, 561 bp, Homo Sapiens
tcgggctgggaactctacatggctgacggcatgtggcctcagttcagatccattcaggagaaggtagtaatcatcctgaacaacctagagtgtgctatcttttacctcaatttcaccaaaatccccactctggttcagatcatcaagtcccagatgatgtgtgcggaggacacccacagggagaagttctgctatgagctaactggagagcccttggtctgctccatggagggcacgtggtacctggtgggattggtgagatggggtgcaggctgccagaagagcgaggccccacccatctacctacaggtctcctcctaccaacactggatctgggactgcctcaacgggcaggccctggccctgccagccccatccaggaccctgctcctggcactcccactgcccctcagcctccttgctgccctctgactctgtgtgccctccctcacttgtgggccccccttgcctccgtgcccaggttgctgtgggtgcagctgtcacagccctgagagtcagggtggagatgaggtgctcaattaaacattactgtttaaaaaa

SEQ ID NO: 90169 - DNA, 510 bp, Homo Sapiens
gttaaatgtgagatacttgttaaaaaatgtttagcaatgaattgaggcctagtagcatgttatcttgctgcagaagagatgggagtctacttctgggggatggtcaggggtcctccatacaggctgcaattgaagtcatcggtgcaggctcagtccctacaaaggccagggtatttcctgtccacctttattctgatgcatgactcttctgggtctcaaccagagccagtggacttcagtatgggtcgctttcattggcagaccctcaatccacttgttttccatctaatcccacgcatgtgtgcaaaagctgctgtgcttctttgcatctcagtagttccttctggaattcagcaatgaaactcagggaaatgggttccaaatgcgaggctgactttcgtcctgggtttccttcttctccatcttcacctcatgtctgtttactgccatgttagcaatttgatgtattcaatcatgggttttatattctgtttggtgtcccccattgtt

SEQ ID NO: 90170 - DNA, 583 bp, Homo Sapiens
  misc_feature (217)..(229): n is a, c, g, or t
tttttcacatgaaccagtttgtttaatccttatgatgatcctatgaagtaggtaatattattacttctgtttttcagatgaggaaacagaggcacagagagggggaaaacttgctcaaggtgcccaaggcacacagggcccaaccccaaaccattattgaagcagctgaactgttaactgctgcttgtattcagaactggctcaaaaatccatttgnnnnnnnnnnnnntgtgtcctacacactatatgtaactttccatatggcaaataggattgttggtcctcttctctcaggcaggagttaatggcagagttgaagcttctagaactctgtgctctttctagtacattgggctggaaccagggagctctgggttccatgcacatggtctggaaggccagtgtctgtgctagctcccggcaggggtcagaatgcgtggctgctctgtgcactgggtgtgtgctgggaatgcaggggccacagggatcatctgatgaggggaaacaaggacactgtttcacgggatgaggcagtaccccgctttggaaatgcagtgcagagttgcggggacatcaaccagga

SEQ ID NO: 90171 - DNA, 607 bp, Homo Sapiens
taatttttcttctccctgccctagaattgagctccttgagagtaaaaacccgcctgggtcgccatcaccctaggcttggtgcagggcctgccaggcgctcgaatttgttgaagaggtgggtgttcagtatcgaaagagccgcggattgtacattagaaagcctggctttgcgccgcgtccttgccacttgctgaccaggcccctccacgtggtccccgccggggcagcagctctcctcacccgtccaaaggcacggggaggcgcgtggcggccccgccagagctgagccccctgggatgtgaggccgtctcgctctgagcttcagagcagggttgcaggagacacctcagaaggtcgttttgaggacgggaggagatgaactgctcaaagcctgcttaactagataaatggtatcgattaacttttctttgactccctttccacacctataaaatgaagatgacgggaaacttgtcatactttttttgtggtgggtgggaaaggtctttatgaactgtgaagtcctatgcaaacgtgagatgtttcctttcgcaatctgattagcgaagcaaaaacacgcgagtcaaaaacatacacagaaagcaaa

SEQ ID NO: 90172 - DNA, 469 bp, Homo Sapiens
tgtgatatgaggtcttatgtctgctcatgacagccttaaaagcaataaacagatacaacttccagcaacttcccactcagctgcaaggctgcggggggtcctgcctcgagccataaggtgagcagctagccagtgccgggccagtgtggagaaggctgaattgcctgtgaagctggggttgcaggcaggaatattcatggagcccctgaccatgtactcacactgctcttcctcagttcagggttcttggatttgctcaagtccacccaaatatccctttacgattctcagggtcccactccttccagatccaatgccctaaactttacataagagttccggcaaggctgtgacttcaacttgtgttgtaactgcaacctgcagaatcaaatttagggttatgttttcagttgtatcagtcttacggctacaagatattaaagagattcttttctgggtattacaccgg

SEQ ID NO: 90173 - DNA, 461 bp, Homo Sapiens
cttccctttcctctctccccctcggtgaatgatggctgcttctaaaacaaatacaaccaaaactcagcagtgtgatctatagcaggatggcccagtacctgggctccactgatcaccctctctcctgtgaccatcaccaacgggtgcctcttggcctggctttcccttggccttcctcagcttcaccttgatactgggcctcttccttgtcatgtctgaagctgtggaccagagacctggacttttgtctgcttaagggaaatgagggaagtaaagacagtgaaggggtggagggttgatcagggcacagtggacagggagacctcacagagaaaggcctggaaggtgatttcccgtgtgactcatggataggatacaaaatgtgttccatgtaccattaatcttgacatatgccatgcataaagacttcctattaaaataagctttggaagagattaaaa

SEQ ID NO: 90174 - DNA, 570 bp, Homo Sapiens
  misc_feature (275)..(275): n is a, c, g, or t
  misc_feature (465)..(465): n is a, c, g, or t
tcttgaagctctccacgtggcctcccagccttggaatcggtttttgctgtttaccctcttggatgctggagagaattccttcctcagacctgagattttgaggctcatgaccctgtttatgcggtaccggagtagcagtgtcctctctcatgaagaggtgggtgatgttctgcaaggtgtggctttggctgacctgttctaccctctcgaacacccacactccagcccctgcatggcttcttccagcagctccagagcatgggacacctggctgnaccacagcatggcccagaccctgcaggcctccttggagggccttcccccctagcacctcctcaggccagccacccctgcaggacatgctctgcctgggaggggtggctgtatccctgtcccacatcagaaactgatcctcaggacttgaaggcccagaagtggagagagaatgagacctggagacaaagnggcataattgttggggaaatggatgacagctgaagctattcatatggagccatatactctattgttgaaatagaataaggaaataaaatgatacactcacataaa

SEQ ID NO: 90175 - DNA, 387 bp, Homo Sapiens
acttgtcttgccaaacttgagttctctcagatactcagaagttgtgtctctgcctattctcctgtttcatccaccacaatcacctttccaggtctcctcagaacatcagttaatgtgcctctttctcttgctttgaaggcagaagccatagctctcaccaaacctccagcatttaaactttgctgtggagtctacgtgaccccaccacgaggtgaccctcacctttccctccatgcctggggagacagacatggcagtggtcactaaaccctgggatgacacgctaccctcatcctttatgacaccctttgatatgttgcttttgatgcatttctttgtatcccatttggtttcatttttagcaataaactcattcttggtacaaaa

SEQ ID NO: 90176 - DNA, 576 bp, Homo Sapiens
ttccacgagcaaagggactgtgatgaacacaatgtcatggctcgttacctccctgccacagtggagtttgatgtccaaacattcaaccaacagagcaaggactactatgcctacagactggggcacatcttgaattcctggaaggagcaggtggagtccaagactgtattctcaatggagctactgctggggagaactaggtgtgggaaatttgaagacgacattgacaactgccatttccaagaaagcacagagctgaacaatactttcacctgcttcttcaccatcagcaccaggccctggatgactcagttcagcctcctgaacaagacctgcttggagggattccactgagtgaaacccactcacaggcttgtccatgtgctgctcccacattccgtggacatcagcactactctcctgaggactcttcagtggctgagcagctttggacttgtttgttatcctattttgcatgtgtttgagatctcagatcagtgttttagaaaatccacacatcttgagcctaatcatgtagtgtagatcattaaacatcagcattttaagaaacaaaaa

SEQ ID NO: 90177 - DNA, 498 bp, Homo Sapiens
  misc_feature (117)..(144): n is a, c, g, or t
gaattcgggcacgaggggaggattgcttgtgcccaggagtttgaggctgcagtgagacattaattgagccactgcaacttcagtctgggtgacagagcaagactgtctcaaataacnnnnnnnnnnnnnnnnnnnnnnnnnnnngaaccccaaacagcccactgtgagccatggtgaccccaaatctccagcgtccctgcggggtcccaggccggctcagtgcaggtattctcgcacagtgagctccttcagggtgatgcctcggggcgtgggcctccggagctggctctcctccagcctctcctgcagagtcacgaagtccttgcccagcgcgtaggccaggcggaccatggcgtccagcagaggcgcatagtagcgatggccctcccgggcctgcaggcgctgcagggccctctctccggccgcgaaggcctcggcggggcggtcgaggtcgcggtggcacagcagcacggcgcacagggccgggacggcggccgc

SEQ ID NO: 90178 - DNA, 511 bp, Homo Sapiens
ggggaacactgcccggggagtttcttcctctgcaaaataagggagtgtgtactgaattaccgtttccagctccaacatccaggatttcagcactacctgcagagtagtgggaggagagatagaggaagaagtgaagataagaaaccactcgaagccggtgtctggtgctgggaccgtggtggctgggacggcagcagtcgtgctgtccatctgctcttccgaggggtggcacatcctagcctctatcttttccccagagaagatccccctcgtctgctcttcccccgtctcagccttttagtgtgtgaacagttctggtgttactcagcaacgcttttgttagcgcctttaccagcaagtacttgttaaacacttaaatcttacaagtggaaagaaaattccgtggtaaatttaagtacaaaagtcaaccaaaattctgagtctcggacaagactggttaaaaatcgttctacaatgaaactaataaattaaatcatataaaactttaaaa

SEQ ID NO: 90179 - DNA, 933 bp, Homo Sapiens
tccaaacctccttcctcatcttcccttcccctctgtcttatgcctggcctggccttttttgttgttgttggcttttcataagtaagaaaaatttattgtagtatttcaagactgcagaatttcaagtgtatatctataaatctttttttaaaatcttcggctacacagtaacatcaattaaaacagaagagtgagtctaagtctgtaatatgctgtaggaccagataagattttgaatgagactaaacttgactgccatattttaagaggaaattgaaactttatggtggagaatggatgagagcaagtctatgatatatatgtagtcattgtataattagaaacaccaaatgctgaatcctatcactgtgttcttgggggccaggccttggatttggttgtcatttaaactccttgaagattatatgtaattataatgagcagaaggcaaataaagtttttgaacaaaagcccttgttttcagtatttaaaatttggtaatatattttctttttcagttaaactatcttccccacaaaaaatattatacttcagttaaactatcttccccacagaaattattatactacgaacaagttatgagtgagactgagaagcttgaagaagctggtttttaagcagctcatataatattttgtgttaaagaaagtgtcattgtttcctgttgggaggcaaataacaacaacaacaaaagaaattgtcatgattctttctgagccaaactgtcacgaaatgttctgtgacagaaccactactcttttttctgccattctgcctactggagagttctatgttgtttttgtttttaatccttgattttaaaaatattaatggttttagtgttgcttagcttcagtttgaagtataactttcactaataactgcaataaaaagaaaagctttgctcttaaa

SEQ ID NO: 90180 - DNA, 375 bp, Homo Sapiens
taaatttcaaaggcaatttaaaactggggggaaatacatttttaaaattttggggttgaagttcactacactatgagactaatttcgtatgtggcaagttgcaactctccaaaggtgtgaataaacatcagaaagcccaaagtgaagagccagtacatcaacatgcatgatcaggaatcctatgaaagtcacaaggcattgggatttggtgatttacattaacctcctcctggtagaagatagtgtttcatgatgaatgcagactgtgctcactgctcatgagacacacacatcactactgctgaggtcccactttgtgataatttagaaatcatccaaatttaactccagaaaatataaatctggaatatgaat

SEQ ID NO: 90181 - DNA, 977 bp, Homo Sapiens
tgtttttaggtcccaagattctaggtctcaaattagcgcaagatgcatgacccggacccctgagggaagatccaccacgccatggcatgagtgattgtctatgaattgatggagctccacacccaacgttgcgcaatttgtttccaacgtcagccaggtggttcgaaaagacttcgagcatagttgacatgaacttcatgaattgggtttgctcaaggatcactctttggaggggcggtatttccagaattacagttatggaggtgtgattcaggatgaccatattccatttttaagaagaggtgttccagttctgcatctgataccgtctcctttccctgaagtctggcacaccatggatgacaatgaagaaaatttggatgaatcaaccattgacaatctaaacaaaatcctacaagtctttgtgttggaatatcttcatttgtaatactctgatttagtttaggataattggttctagaattgaattcaaaagtcaaggcatcatttaaaataatctgatttcagacaaatgctgtgtggaaacatctatcctatagatcatcctattcttatgtgtctttggttatcagatcaattacagaataattgtgttgtgatattgtgtcctaaattgctcattaatttttatttacagattgaaaaagagggaccgtgtaaagaaaatggaaaataaatatctttcaaagactcttttagataaacacgatgaggcaaaatcaggttcattcattcaacgatagtttctaaacagtacttaaatagcggttggaaaacgtagccttcattttatgattttttcatatgtggaaatctattacatgtaatacaaaacaaacatgtagtttgaaggcggtcagatttctttgagaaatctttgtagagttaattttatggaaattaaaatcagaattacatgcgaaaaacatgtttttcattttaattttatttcttgt

SEQ ID NO: 90182 - DNA, 963 bp, Homo Sapiens
  misc_feature (887)..(887): n is a, c, g, or t
  misc_feature (893)..(893): n is a, c, g, or t
  misc_feature (909)..(909): n is a, c, g, or t
gtagcgaggcctgggtggcgaattcggcacgagggcgggcccgcgcaggcggtggcggcggcggcggaaccgagctgacgggcgtgcggccgctgcgccgcaaactcgtgtgggacgcaccgctccagccgcccgcgggccagcgcaccggtcccccagcggcagccgagcccgcccgcgcgccgttcgtgccctcgtgaggctggcatgcaggatggcaggacagcccggccacatgccccatggagggagttccaacaacctctgccacaccctggggcctgtgcatcctcctgacccacagaggcatcccaacacgctgtcttttcgctgctcgctggcggacttccagatcgaaaagaagataggccgaggacagttcagcgaggtgtacaaggccacctgcctgctggacaggaagacagtggctctgaagaaggtgcagatctttgagatgatggacgccaaggcgaggcaggactgtgtcaaggagatcggcctcttgaagcaactgaaccacccaaatatcatcaagtatttggactcgtttatcgaagacaacgagctgaacattgtgctggagttggctgacgcaggggacctctcgcagatgatcaagtactttaagaagcagaagcggctcatcccggagaggacagtatggaagtactttgtgcagctgtgcagcgccgtggagcacatgcattcacgccgggtgatgcaccgagacatcaagcctggcaacgtgttcatcacagccacgggcgttcgtgaagctcggtgaccttggtctggggcgcttcttcagctctgagaccacgcagcccactccctagtggggacgccctactacatgtcacccggagagatccatgagaacggctacnactttncagtccgacatctggntccttggggctgtctgctgtacgagatggccagccctccaaagccccctttctt

SEQ ID NO: 90183 - DNA, 592 bp, Homo Sapiens
  misc_feature (34)..(34): n is a, c, g, or t
  misc_feature (82)..(82): n is a, c, g, or t
  misc_feature (101)..(101): n is a, c, g, or t
gaaaagcccagcttcaaccctttgggagccactntgttttgcagaacaccacccccttttcttttgagggctcctaccactntgacccagataactttgangaatccatggatccctttaaaccaactacgactttaacaagcagtgacttttgttctcccactggtaatcacgttaatgaaatcttagaatcacccaagaaggcaaagtcgcgtttaataacgagtggctgtaaggtgaagaagcatgaaactcagtctctcgccctggatgcatgttctcgggatgaaggggcagtgatctcccagatttcagacatttctaatagggatggccatgctactgatgaggagaaactggcatccacgtcatgtggtcagaaatcagctggtgccgaggtgaaaggcatagagaaggagacgtgccagaagatggaagaagacgggtccactgtgcttgggctgctggagtcctctgcagagaaggcccctgtgtcggtgtcctgtggaggtgagagccccctggatgggatctgcctcagcgaatcagacaagacagccgtgctcaccttaaaaaaagaagagaataaaag

SEQ ID NO: 90184 - DNA, 490 bp, Homo Sapiens
gagagagatggagtctcgctctgtggcctaggctggagtgcagtagccagtcatagcttactccagcctcaagctcttgggctcaagcaattcccccacctcagcctcccaaatcaccagtattataggtaggaaccaccatatccagccgaaaatttttaaatctcacaagtgtccagataaacaaaactatgtgaccaaaaacatttctgagcaagttatcccattaagttatacactctcaaataatctggaattatagcatcatatactttaaaacaacaggaataaaaagccaaattaaatacaggggaaataatttaaaagctctgtctacacattatatttcctctaaaaaggctagtaaattacagtatcatgtcaaatttggctattgatacctgggaagagctatctatactactcaaacacataatgattacttctttgaaagcaaatatatgcagttcataatttagaaaatagggca

SEQ ID NO: 90185 - DNA, 1419 bp, Homo Sapiens
gtagacaacgctcttgcatagcccgaagcccagagagaaagagttggctggcttgtgagaagacatgaggagttgggaaaaggaatgccagagttccctgaaccaatacaaatctctatgcaactcaaggctgccttatagagccagctccaggactctgccaccagctttcagctctgctgaaacctaatccattcccaggcctggatacaagttggtagcctgttggtttgcagagacatcttttaataatcttgggtttggccatccagaaggcctctttctgctcagggtttctgcagtgtcttttggtgacttgttagcagccagtggctggaatgttatcatgggctcatgtccttcaccagaagggcaatctgctcccgcagctgccgctccccttcctgcactttgctctggcttcgacacctcagcaactcagtcttgtggtcctgatgatgcatagggcagtagctctgtggttcacacagttccatatattctggaaagaagtctctgtagccgcctttaaggatatatagctctgggtagtacaatgcaggatactggttcagagacctgtcctcttcacgcagacagcggcacattcgggggcccctctctgaggagaattcacagtggaacacgatgattattctcttctgggtgtccaaagggacgatgggcttcttcagaaagaagttaaacagttcttcctgactatataagtttaaggctccctggatgtgtcctcccagatactcatatggatagcgacaatcaatgacataaaacttctcaatcagaccctggaacttccccgacagtaaggcagccactgtttctgggttgacatacttcagatcttggtgtttccctgacacggttggcagcgcacataccttggaaaaatcaccaatcaggtgcccctggttagaatcttcctccagcatctgagtgatagtaatgtcacacagagagactgtcttctttaaacataagcccttcctgagctttccttggccagaaaaatacttttttttaactttatctggtattgtgttgtccttgaatttttccacctgcttcagtcttggcctgttcaagttctctggcatcgacggggagcgatataggccacttctgctcacctttgcttcttgatctttcagggaaaactccattaattcatctgaaatctcttctgcctggtcttctcctaggtttggatttttatccaattttggaacagtagtaatgggactgcccaaatatttcatttcactgtccaccaagtttccattgtcattttctttatttgcagatgaactacacattgcatctctctttctatggccacggtccaaaccattcggagtgctacaaagaagctgtgctgggctacatttcattaggtgc

SEQ ID NO: 90186 - DNA, 936 bp, Homo Sapiens
  misc_feature (685)..(689): n is a, c, g, or t
  misc_feature (694)..(695): n is a, c, g, or t
  misc_feature (699)..(699): n is a, c, g, or t
cagtcgacggtaccggacatatgcccgggaattcggccattacggccggggagaagaaaacaagtacagactcagaggaaagctgccctggtcctgagtgtgactcccatggtccccgtggggtctgtgtggttggcaatgagctctgtgctgtcagctttcatgagggagctccctggctgggtcctgttctttggggtcttcctccccatgactttgctgctgctcctcctcatcgcctacttcaggatcaaactgattgaggttaatgaagaactgtcccagaactgtgatcgccaacataatcccaaggatggctcttccctgtaccagagaatgaaatggacgtgaagttggggactttccaataactaaagcacaatgagtttctactggtcagcaagcaatggccaacagttcagctaataaagtaggttgataaactagaaccatagcaaaatagaaagaatactaagatactcattctgaaccatactgaaaagtggcagctattatctaaggggacttctcagagactcagtataacagcagctcttgaaaagtaccaagaatggatttcctgggtatatacactggacacattgtaactttttaacttttattgtgactgtgtctgctctaaacggcatatttaaaaaataaaattctgcagcatcttactacnnnnnccaanncccnaccacaaaaaggacctgtcggccgcctcgggccctcgagaagctttctagaccattcgtttggcccccggggccccgtaaggaagtggaccatgggtcataccttgtttcctagggagaatcctgggccatgacataggggccttgggatttcccacccaaaataaaaaacgccccgggggggaaacccgaagggtttctgtaaccaaattcccgaaatggggaagttctggaaggc

SEQ ID NO: 90187 - DNA, 697 bp, Homo Sapiens
aattcagttacgtgtgaggctctcgatggtgtctgtacagaagcagatgcgtatgctgcccacattcgtgggtgctaagcatcagaaagtggttaagttacacacaaaacttggtaaacccattccatcaacagaccaaatgttggttagccaagctacttcttcaacagctgtatctgcttcaaagccgactgcctctccttcaagcattgcagcaaacaattgtactgtgaatacgtcatcaattgcaacgtcttcaatgaagggtcttacgactacaggaaactcgtctcttaatagcacatctaacactaaagtatcagcagtgcctacaaatatggctgccaagaaaacatctacccccaaaataaattttgttggtggtaataagctgcagtcaacaggaaataaagcagaagacacaaaaggaaccgaatgtgttaaaagtactcctgtcacttctgctgtgcagattcctgaagtaaagcaagacacagtgtcagaaccagtcacacctgcatctcttgctgctttacagagtgatgtgcagccagtgggccatgattatgtggaagaggtacgaaatgatgaaggaaaagtaattcggttccattgtaaattatgcgagtgcagctttaatgatcccaatgctaaggagatgcacttaaaagggcgaagacacagacttcaatataaa

SEQ ID NO: 90188 - DNA, 516 bp, Homo Sapiens
ttgaggacagcagagccacttgatgggattctctctctcttcaaagcatagagcaaacatcaattaatcctcaaaagacgctttcaagaagaacattatcccttttggagacgcagaagctaagaggtgccgcaggagaccacggagtgaaaaaagttggaggcctaagtacagccgtgtgtacccagccgggcaccagagttaagacaactggacttgtgctcaaaaacccttctttagtaaaacaacccgtaggagtctgtgggaggaggaaaaattgaagtctggatgcaatttgccacactgagtctgttctggtaaccgcccccaacacactcacacccccttgcctgaaatggggagaggggtgggatcggtgtgtgtaaacagaggcactgccctgcctggctgctctttccatcttaggagaaccaatccagaactttctacggctcacactctgatcacagcctgtcgccatgattggcaataaacgtcacacattctcacgaaaaa

SEQ ID NO: 90189 - DNA, 698 bp, Homo Sapiens
agcagtgctcgagggcccctctcttcaagagtttatccgaagccatgcacccatggacataaccgggaatcctacatggttccttttataccactgtacagaaacggtgatttctctatttcatccaaagatctgggctatgactatagctatctacaagattcagacccagactcttttcaagactacattaagtcctatttggaacaagcaagtcggatctggtcatggctccttggggcggccatggtaggggccgtcctcactgccctgctggcagggcttgtgagcttgctgtgtcgtcacaagagaaagcagcttcctgaagaaaagcagccactcctcatggagaaagaggattaccacagcttgtatcagagccatttataaaaggcttaggcaatagagtagggccaaaaagcctgacctcactctaactcaaagtaatgtccaggttcccagagaatatctgctgatatttttctgtaaagaccatttgcaaaattgtaacctaatacaaagtatagccttcttccaactcaggtagaacgcacctgtctttgtcttgctgttttcactcagcccttttaacattttcccctaagcccatatgtctaaggaaaggacgctatttggtaatgaggaactgttacttgtatgtgaattaaagtgctcttcttattttaaaaaattaaaaa

SEQ ID NO: 90190 - DNA, 534 bp, Homo Sapiens
acatatgaacaaattaagtggatacacacagtgagaaagatacatgcattctatggtaacaactactgtcaataacatctgatgttacatgcacatttatatatatataattttaaaaactgaactatgagaagccatggtataaatgaatattgtggacatcatggacttgatatgatagaaatcaattgtcagcttgagaaagttgtttttaatctgtctaaatagttcatgcattactacagttaaaaatagtttcatttgtcttctatagacttaattttattccggttcagtataatctctgttaacagagtttcagcaaactgattggtcaaggtattaacatagcttctacttcctttacttaaaaagatgtggttttatgtaagttcttgattactgatgatcatcccaaattttgacaacaaaatcatatgtataaatttatttctcccctcttgttcatcatcttttgtaaaggtcccattgtagatcttttctgctaccaaataaaacttttcacccaaaaaa

SEQ ID NO: 90191 - DNA, 342 bp, Homo Sapiens
  misc_feature (37)..(37): n is a, c, g, or t
  misc_feature (44)..(44): n is a, c, g, or t
cagccaaaaatatataaaaaccaagaaaataccaatnacccgcnactatcacaacccccaacccaccatctaccactacggccaccccaaaggaccccgacgccaacagacagtcaaacgctgatgttgcgggcagaaaacataaaagaggtgacaattgtatactttctaggacaagcacggcttctcctttcggttcccatggacccggcaccccacctgcatgacgatttatttgtatctgggaaaatattctctctagttaaaaatgatttaaagagtcgactatacaaaaatcaatcaccaccacgaggacaagagggcaaaagcaaaacagacaaa

SEQ ID NO: 90192 - DNA, 527 bp, Homo Sapiens
ggggggaggtgaaaggtcatagtcctgtttggcggccatttctcttgaaactgcggctcgggacctgcggtacctgctgtagtcacgagggacgggcggcggcctggtcggcagagagtagcctgcaacattcggccgtggttacgatgagtttacccctcaatcccaaacctttcctcaatggactaacaggaaagccagtgatggtgaaacttaagtggggaatggagtacaagggctatctggtatctgtagatggctacatgaacatgcagcttgcaaatacagaagaatacatagatggagctttgtctggacatctgggtgaagttttaataaggtgtaataatgtcctttatatcagaggtgtggaagaagaggaagaagatggggaaatgagagaatagcatcttttgtgggggattttttttatatatatttctagacaataaagatttgtttgtttttccactgggacttctcgctggattcgccttccttgtcggaggcgtccggccaccagaact

SEQ ID NO: 90193 - DNA, 500 bp, Homo Sapiens
gtaacacaggcgataacattgtatattctgctttaaaattttcagactacttttacatctgttaactcatcgtatcaatcaataaattaccttatctgaaatggaaatttgttcaagctgagtaacactgatcccctgaatatttccccaaatgccatctactttcaccatccagaatatgtattaagttttatttggtttcatgaagaaataagtacttttagtttccctctttctcattagcatatctttgaattatctatgtaatgttcaatactctgtgcagatctgttgatgattaggacctgttcatttgaaaccaacaaaccaaccaaccaacaaacaaaatctgtcctaagaaggctacacaaatttaagagatgcacgagtttttctcactagtgttagcataagacttttacagacatccaaatttttcatgtaggtgagtcaaagggattgactggagtgactttgttactgtaaaaagagacctttta

SEQ ID NO: 90194 - DNA, 458 bp, Homo Sapiens
taaagaaagaattcgacacaatggggttgcgtcacctatagttttcatttcctcaaatgcaactcaaggtgctcagcttgataaagggagagagggagggcaggggagaaactgactcctttttccatctcttttttgcctgcacacttaatgtggactgcctccttggacttaaaaagagggcttgagccaacatgcaaatcaaaaaacatttatgaactgatttcttagctttggacttgacaactgacgaatgctctgggggtgacctggcccttgctgtccgttccactcccatccttgatgatggagacacctgtgtttatgttgtcacttcgcttgccatcctcatgccccgggctctgctggtttggaggggacagggcccttggtttgcacacctcacccgatcttggttataaggtacagtaaaagcgtctgaaaaatgcattcaaaaa

SEQ ID NO: 90195 - DNA, 997 bp, Homo Sapiens
gcctcacagttttatttgctcctcccctcccacctcacaggcggccttaggcaagtcattttctgtcatcacaaggtcgcctctgcctagtcaggtcctggcgtccagagtaaggatgtgcggcccccaggcacccgcacacctccctcagcaccaagaccgggacccccccacccacgtgtctcattgtggctgcctatggactcccgggccttgtgtgcaggccaggcccttccactgattttttaaagtgaaccattgctggatctcagattctgtggcatctaaggcctagcaggggtgggcacacgggtcacccgaggcccataccaagactctgttcctgccctaggcccagtctcaaaggaagccacaaggcgcgggggccactgaggaaggaaatgttcattttcatttgtccaaaaccaccttaagttttaagtatattaatcttgatgctttttaactattgctttttaacttgctgagatttagaaatactgttataaaaacttttttaatttctgtatttttttctgtattgtatcttcatgggacattaggggttttctatggtaagcacacctatggttttggtaaaaacattatcaaatatatatccagacggttcttccctagaagaaaaacaagtctttacacctgataaaatattttgcgaagagaggtgttctttttccttactggtgctgaaaggaaggatggataacgaggagaaaataaaactgtgaggctcaaggctggtgttctccacttatttcagcgacaagctggggccaggcctcaggggcacgcctgggggcaggggagggagttcctgcccccaactgcaggacaggcactgcccaagtctgccctgaatccgaggacaccggaactctgctcatacaggcggctcggctggcctggcacaagcctcaccttctaagctgcgagccagaggccactgggttctctcacgtggtgtctgctgttacct

SEQ ID NO: 90196 - DNA, 486 bp, Homo Sapiens
ccagtgcccctttctctgtgacacatccatccactggaaactttcgtacaactagctgaaagaagagaaacatcctatttcatgtcactggagccctaatgatcgcagccatttcaggaaatgccatcaattacagtgaggagctcattcagaagtgaaagatgagttccattctctgttacttagagggtggatatcctcctccactgaatgcaaactattaagtaatgaaaagacagcactccaagcaatatagatttataggccaacctggcaatcaagggtaactgacatgaaaatggattgcttcacattttaattacaaagatactcttcagtaccataaattgaagaaaacactaactttttgtggctactgtaattgtcaaagtataattacctgtgttttctcacctacgtatttgagatagagacaaaaccaagtaagttaatccacttataataaaaatgtcttctaagaataaa

SEQ ID NO: 90197 - DNA, 392 bp, Homo Sapiens
tttcaaatcaggattgtaatttaaatatataatgatttcccatcaaaactctggcaaaattgccctcgtttgatgacagaattgagcaggactctctggtaaaggtttcctgagtgcttttcttctaaggctttggctgattttctcaaaacactttcatagtaagctcatgttattgcctttgaccccctagaaagccaacaagcaaaatgccttgaatatccagtaaaacttttgccatgacctttgctcatgacctggtttgtttttatttaattggaccacaggtggtgtccggcttgccattactttgattatgctttttcttcaggattgtagtggtaaagtcatgtttcatctcctgttcattccttgaagaaacgcttcagatc

SEQ ID NO: 90198 - DNA, 727 bp, Homo Sapiens
tcttgatgagcatgagtctgaatagttcacaaataagccagtcttcccaggtcccccagtcttctgaggggagctcagatcagatctaatcatcacaatatctatttttgatagaactcgtgtggttccacttccccaagacttacgttagcattgtataaattcatattattatggcaaaaaaggggatggtttaatttttccttgtcaggtttattagcaagtatctttcaaactaatactttcatttgggtggtttattttttaaaagggaaagatgtcacctttgataatttcagatttagatattagttcatttgaaacagaagagaatttcattctttcatgctctgtacctcaaatgggttaagcattagtgaaaattgtggtaagacctcaaactgcaaatgactattcaagagcttttggataaggaggcaggaagaagctctttatctttcaactgtatggagcttgttaacaagcctctgaggtgacctaggaggattgagtttgggggtatacatttcacacattcttttgcaagttttaggttctgcaaccaagggccagaaatcttttctttcttccagatgctagtgttaggagttaaatggaaacaagaaggacatggggcaaatgtttttactgtcaatgtatattgcaaggtgaattcaaatgcatccttttattctacttcagaaaataaatttgatatttttcaaaa

SEQ ID NO: 90199 - DNA, 556 bp, Homo Sapiens
aattggcctcgaggcaagaattcggcacgaggatagaatataagaaatatatttgaacttaaatatatttctatatgtgtatcttcctaggcaaaagctgtaatttccagagagaccattaggaacaactgcctgcgctgctgacttaaggccccaacaccaaacacagaagcaacagccttacacagagtgttcagcaagctccaacaattgtgtaagcagcccaagctgacagagatagaaacaacacaaggacccatcagcagacgaatggatgatcaaaacgtgcttgcaggggaatcactgaaatggggacaggccataaaaggacaaccagaagagtggcttcagcaaaggcatcgtttttcagagcaagctagagaatcctgccagcgtcctcaggcagggcccctgggcacagaggttaggcaagggagtgtcccagcatgttgatgccctgagcatcagaataatgccatagaggagcttccaaagagttcatttcaggttttgtaagccgaacatttctaggcaaataaaatttgattttgtgaaa

SEQ ID NO: 90200 - DNA, 729 bp, Homo Sapiens
  misc_feature (135)..(192): n is a, c, g, or t
gtatttccagagagacattaggaacagactgcctgcgctgctgacttaaggccccaacaccaaacacagaagcaacagccttacacagaggtgttcagcaagctccaacaattgtgtaagcagcccaagctgacnnnnnnnnnnnnnnnnnnnnnnnnnnnnnnnnnnnnnnnnnnnnnnnnnnnnnnnnnnggaaaaatgaggcctaaagaagttaagaaaataccatggaaatgtcactgctgaactgccatacgtaggatccgaaagaaattggaactgtataatgatgactgcacaagataccaaatcagaagaggtcccattcccaagttctgattcataagagcttccaaagtagagccggtacatattgaattttgattcatctcggaagaatctcggacatctctaaagaaacaagggactgatctaagccacattctccatctccagctgaatcgtcagagccactgctatggttaagaaagaccattgaagacagacttaggtcactatcagagctggaacttccatcctaaaatacacaaaaggacaaccagtttaaagatgtaaacaattttagtctcagaaataaataataacatagatagcattctattagagcaatacaagaaacttagaagcatttttcaaagagctcattaattctctaacggttttgaggcacatggtaaaaatttaactattaaaattataaagacaaaa

SEQ ID NO: 90201 - DNA, 902 bp, Homo Sapiens
cgcggagcgatgagacgtgtgaattagatgtgagaagagggacgcttggtctgcgaccaccaagaccccacaggatcgatgcacccacccctgctgatgaccatgaccatctaaaggggaacatcatttgaggggccctactcatggatcagaagcccctcttcactgtggggtgtgctgggttggcgggcagttgccgtggaatcagtttcctcaggacccatatctgaccaccctcataaggttgtcagggcgattccaacattcggggttcccagcagcccagatcccccacatccagctcttcagcctactcagagctctccacgctcactcacatgtccctctcgcaagtagcccgatcaactcacctggtgtcatgggcactaaggtgttaatggattttctctggtcacctttgcagctccactgttttgagtgagttattttaaggggagaaggtgctcctcagacggttgtcacagtgatatttttcctttgtgactgccaggttagcccctttcacctgtaagagctttgagcctagattggttattcatttattcaagttttactgagtggtgtcatgccaggcacttgtataggtataaggataaggcagtaaacaaaatatagactctagggacgtggaacttacattccagtgggggtaaagagatgatacataagtaaatgtagatcagatggtgaccgatgttatgaagaaatgtagactggggtaagaatagagtggcagagaaggtgctattttacacacgaagatcagggacaggtctacccttaatatttgcaagaactgagtcagtagtacaaatggaggcccacatatcatgtctacatattttaaaactacaaattaaacggtgatgtaaaattccaaa

SEQ ID NO: 90202 - DNA, 391 bp, Homo Sapiens
cccttcccctttgtatcagagcagttctgcttttaactgttttatatgttggggttctctatgagatttcattggaacaaagagtttcactgatattcgagtttgaaaaccattgattaagtgaaaaaacatcttagaagataggaaatatgtttaaaaaatgaatgtattaaatcttatgagtaggaagatgaaatacaggtttattgtatagatacattatttatgaaggataaagatctatacatgaacagcagaatgtataagctagcatttactagcatgtctctgatgcttttgttcatttctgttaatcgtcatttctgtcccctctgcatggaattttatacttgtctagggtaagagtttgtagactctttcagcagaacag

SEQ ID NO: 90203 - DNA, 431 bp, Homo Sapiens
  misc_feature (76)..(186): n is a, c, g, or t
caatgaatactacacagctataaaaaataacatcatttcacttgcagcaatatggaaggataattttacactttannnnnnnnnnnnnnnnnnnnnnnnnnnnnnnnnnnnnnnnnnnnnnnnnnnnnnnnnnnnnnnnnnnnnnnnnnnnnnnnnnnnnnnnnnnnnnnnnnnnnnnnnnnnnnnataccagcatgtaatgagggccttctgttgcactctcagatagcattagtttaaatggcaagagaaaggcagaactctatttgagagggctgttgcaaccttacagcatgatacatcttgtgaaatatggttttgaacatttttattaaaaatgtaggcatcaaaatctctaccatttgtgtcatgttataataataactataaaactgcattattcagaatatgtaacaataaaaattaatatt

SEQ ID NO: 90204 - DNA, 102 bp, Homo Sapiens
tttgaacttggaacagagtttattttccatcactgtaaaacattctcagtgaggttactggcattaaaaaggtgggagaaatggaagaaaatggggttgaag

SEQ ID NO: 90205 - DNA, 487 bp, Homo Sapiens
ttttaatttttaagtaaggtttattgaggtatgtatattacaattcacccttttaaagtgcgcagttcagtgagttttcacagatgtatgcagttgtgcagcgaccactaccaagacacagatcatttttaccacttccccaaatcccctcctgcccctggcaatcatttgccactgcaatattattaggcctgtgttgaagacttaagtcaggagaaaactgacatatttacattgagtcttctcaccaaggaacaaactattttcttaattaatagctcatcattttttccaaaattttataattttcttcccctggatctgagtcattattacattgattctatttattatagattctgtgtggttattgtgaatttagtaatttttaaatacagtaggcattgatttttgcatatttacaactggatgctgagtagatacataaaacactcaaaagagagttgaagtttaggagcactagttg

SEQ ID NO: 90206 - DNA, 655 bp, Homo Sapiens
tttgtggtaagaccatattaacaatttttattttctgagaaacgtttttcattactttgcttcttactttaaatgttccttggatgcatcagctctcaagaaaactctataatcacgtctagacatttcacatgcacatggaatggtgtgaggccatatcttccaaaggaggccaattggccgaggagaggcgtctataatttcagtaactgcattttagatgtgcactgattcactcatgcagagatgccagctcttttcttgaaactgcttgttttcctatgctcaaatgaatgaccttctgccaatcatacatggagtcattatttctgcagccagtggaaaaggtagttactcatgaaactcaaccctagggtgacagtgaaagccagattgttatggcttggtaaatattgattaaaatatgtggagaaaaacaaaatgctgggcttccatcagaggcagaaacagtctcttatgctccttgttgaaagggcccctgccctgggtgggtgttttgtgatggtgatgttgcttcttgctgtccatagtcagcacctcctcctcctcctccatgtgccctgctgggatgtgaagacactcccttccttttctatattttctttatcccactccaggcatccttcttcccttt

SEQ ID NO: 90207 - DNA, 441 bp, Homo Sapiens
aaattctgtgtcaaagggaatgattgtgacgctattgatactgatatgtgctttaacatcaagatgcaaagtgtacatttctcccctcccacacttaacactagccatcattgatttctctgatattagtaaatatatttgttctaatgcacgttctttgacacaccttcatttatccttttctgtctttggactgaaaagttaaatctattgatcctttttctattttatgtaatataagcaatttctcccaggttgtcttgcttttcactatataaaagcatttcatcctcatgtaatcaaatgtatctgtacttttctttgtgattttgcctttaatgttattctcagaaagtccttcttaccccaagattttaaacatattcaccaaaatttctgttttgaatttactttcttcatttaaataaaatgtctgccatg

SEQ ID NO: 90208 - DNA, 998 bp, Homo Sapiens
  misc_feature (54)..(54): n is a, c, g, or t
  misc_feature (532)..(574): n is a, c, g, or t
  misc_feature (648)..(661): n is a, c, g, or t
  misc_feature (700)..(720): n is a, c, g, or t
  misc_feature (758)..(863): n is a, c, g, or t
  misc_feature (880)..(891): n is a, c, g, or t
  misc_feature (925)..(935): n is a, c, g, or t
ctgacccctcagggcacaccttgcagaaggcaaggccctgccctgcccaacctntggtggtcacccaatgcatcttccactggaacgtttcactgcaaacacaccttggagaagtggcatcagtcaacagagaggggcagggaaggagacaccaagctcacccttcgtcatggaccgaggttcccactctgggcaaagcccctcacactgcaagggattgtagataacactgacttgtttgttttaaccaataactagcttcttataatgatttttttactaatgatacttacaagtttctagctctcacagacatatagaataagggtttttgcataataagcaggttgttatttaggttaacaatattaattcaggttttttagttggaaaaacaattcctgtaaccttctattttctataattgtagtaattgctctacagataatgtctatatattggccaaactggtgcatgacaagtactgtatttttttatacctaaataaagaaaaatctttagcctgggcaannnnnnnnnnnnnnnnnnnnnnnnnnnnnnnnnnnnnnnnnnnccccaaaataactgctaaagaacctagaaaacatcatccatgaattcaggcagggaacagattgggaaaaaatnnnnnnnnnnnnnncgccctttaaaaataccctcgggggggccacatactttnnnnnnnnnnnnnnnnnnnnnaaaagggggctcactaaggaggggggaatataaagaannnnnnnnnnnnnnnnnnnnnnnnnnnnnnnnnnnnnnnnnnnnnnnnnnnnnnnnnnnnnnnnnnnnnnnnnnnnnnnnnnnnnnnnnnnnnnnnnnnnnnnnnnctaattttgggcgccannnnnnnnnnnngcccgccattttaaagcggccgggggaggagagnnnnnnnnnnnttttctttacggcggaaaagtgggggaaaaacaaacacccctcttatttgtttggggtggggt

SEQ ID NO: 90209 - DNA, 504 bp, Homo Sapiens
gagaaggggcagatgttcccggagcagaagacgtctccccttctctgcctcacctggtcgccaatccatgctctctttcttttctctgtctactccttatcccttggtttagaggaacccaagatgtggcctttagcaaaactggacaatgtccaaacccactctgggcaaagcccctcacactgcaagggattgtagataacactgacttgtttgttttaaccaataactagcttcttataatgatttttttactaatgatacttacaagtttctagctctcacagacatatagaataagggtttttgcataataagcaggttgttatttaggttaacaatattaattcaggttttttagttggaaaaacaattcctgtaaccttctattttctataattgtagtaattgctctacagataatgtctatatattggccaaactggtgcatgacaagtactgtatttttttatacctaaataaagaaaaatctttagcctggaa

SEQ ID NO: 90210 - DNA, 538 bp, Homo Sapiens
catgacagaggctgactgattctgaccgctggttggttgatggtcacgtctatggagaaaagggtagtctctgggatggaacaacctgtaggttgtgctagttaaatgcattaagatagaaaatggagtgtctgtgctgggtgtttttgcagttgcgatacgcttgaaggggaagagagcgatgggaagggcggcatcgggcatcacccacggggcgcaaatgcgaaaagaggacaccatggactttaggagagtccgtaatgaggctcccactgtcacaagccttgcgaatgcgagaccttgcggggcatggcagggaagctgcgcaggccctaaaccttcaccctcaagacttttggccctaaggccttgtcacctccataggctggttctttgcccatttcctctccactgaccaagtctaaagagaaggcataatatcttatgacctcagtcggtaagccaggccctagggaatcaacgtggcaactgcatttatcagttcatgatattatctaaacaacaaacgatgagcaaa

SEQ ID NO: 90211 - DNA, 513 bp, Homo Sapiens
tttgctgttcatatctactctgcatgcatagaaggaatcgatacctgaaatttcctaaaggtcttttactcagtccccacaaaaaagctctgatgtggtgtgtgtaaaggggtaggagtgggagaatgaagtgggtagagacggacacaaagaaatgtcaaaatacaggacactgaaggtttggagccggggccagtggcagcagccaaagttacaaatatcgggaaggtctgagagtttacagtgcagagcatgtcctgtgctatcatatgcggatgacaaaatagccgaatacacaaatctttccacgcttgtgctgaaagatgtaaccatcaagcgccaggcggttgccatgggaacccggggctgtggggagtcggccagaattcttgatgcgcttagaatgtttcttcttccggccctctggtcttcgcaattatcgtccctctcctaggtcccccgcccattctataggctctcatgagtctcttcccgtcttattctctcgctcag

SEQ ID NO: 90212 - DNA, 705 bp, Homo Sapiens
ttctgacaatggggatagcagaggagcatatttgccccatcttatcattaagttgtcaaaatctacccaggatgagaaatagaaaatagaggcctcattcattccttccagctgctgtggagtatcccagcaggtaacgactctacagtatttctctttcccctgtggataaatactcaagttgttcctaggccttcactacaacgaacaatattgacaggagcatcctggatgtgtagctttcggcccatgtacaggtggttcttgaggaaaacaccaaaaggctggatggctccccagagagggcacctgtcacactcccctttgtgtgagaggagtactgtagcccagaagggtcaccagggactctggggcagagaagagagaagaatgttgctctgctgatctcccagccgtctctggatcaatggcctttctttcaggcctcatgttctctgctgtaaggcacttcacttgccttactcactatgcctggcacttaataagtgttcaagaaaatggaagcatgaaccttttgagggaacaataaccaatattttcatgtatctttatgtagtcttttctatgcacttttaaattaacataattagtataatgctacacatagattatttttatcctatttatttgcttagtattacattgtagcattttccaggtcattaaaatgttcttaaattttta

SEQ ID NO: 90213 - DNA, 436 bp, Homo Sapiens
ttttttcacaaaacattttattactataattgatattttacttataatttttggcaacattaataaaataataaatttcacctgaaagaacaagcgagcaaaatagacaaggaaattcacaaagggcaataacaaaatagtaatcttgacatattcaatatatttgtaaacaaaacaaagtgacattgccttaaaaatatatagaggtatcaatagaaaaacagagaaagctcctgaaagaactcactatattaattttcatttggttgcaggcacagaaattgactcaagctagctcaattctaagacagaagcaaagcccttgatgatgatcgctttccagctttttcatgaaaacctaggaaatttaaatactttgaagaggaagaaaagagtggggagagagtaaagtgcctttaagaggaaaagtagaagt

SEQ ID NO: 90214 - DNA, 588 bp, Homo Sapiens
gcggccgccaagcgaagctaggctatgatcccgtggagctagacccggaggacatgtgccggatggccacggagcagccccagactctggccacgtattctgtgtcagatgctgtcgccacttactacctgtacatgaagtacgtccacccattcatctttgctctgtgcaccattattcccatggagcccgacgaggtgctgcggaagggctctggcactctgtgtgaggccttgctgatggtgcaggccttccacgccaacatcatcttccccaacaagcaagagcaggagttcaataagctgacggacgacggacacgtgctggactctgagacctacgtcgggggccacgtggaggccctcgagtctggggttttccgcagcgatatcccttgccggtttaggatgaatcctgccgcctttgacttcctgctgcagcgggttgagaagaccttgcgccacgcccttgaaggaagaggagaaagtgcctgtggagcaagtcaccaacttttgaagaggtgtgtgatgagattaagagcaagcttgcctcctggaagacgttcccagcgcatcggtggcactcatc

SEQ ID NO: 90215 - DNA, 766 bp, Homo Sapiens
ggggaggcggcgagtgtctgggcgagcgtggctgggcccggtcctgggctgggggcaggggctagggccgggtcccggggtgagccgaaacctgggggtcgggcggggcgggaaatggggcgcagtgaggctgggagccggccctgagctcgtcctgcgtaggggtagccgggctcagggggcgcctgagctggaggtggaagcgtgaagtcaggactgagtgggcgaagagaacctgggctgagcagacatggccgcttaccaacaagaagggcagatgcagcttccccgagctgatgccattcgttcacgtctcatcgatactttctctctcatcgagcatttgcaaggcttgagccaagctgtgctgcgacacactatcaggagttacttgatccttcccgccagaagaaacttatgttgggagatcaacaccagctagtgggcgtctctataaagcctcaacgtatagaacagatttcacatgcccagaggctgttgagcaggcttcatgtgcgctgcagtcagaggccacctctttctttgtgggccggatgggtccttgagtgtatcctttcatgtcactcatttttatcctggctgttgatcatctgcctaatgacttattttttgcttcccaaactccattgtctcattctcactgcttatgttattgctcttattatttcagctgcataaatcagaaagaactccactctgtatgtttccttaagagacaacaggtcctctcttcaaaaacttcaaa

SEQ ID NO: 90216 - DNA, 471 bp, Homo Sapiens
taaaatggctttttggtataatactgttaatgattagtatgcagaaaaaaatgaaaaccccggaagtgtcagttactgtgaaagaggcatattttcagttgtgcttattgtgcagttgtacttaaatacatttgctagatgtaattcaagctgctttacccccagggaattgaaggaaaagatatatctgctggtgagcttcaggctttttatgatgatggcatttcacccttctgtttacagtgtcaactgatggagataaattccataaaattgtcattaactcagatactagccttccatgttaggtgctattcacaaatactggataaaagttaatatgggaatgaaaaactaaatgcaagagtttattgctatgaatgattggttaactgcattttgcagcatggaaatcaacacactatgagagtgaaaactttgtgctgaataaattgactcagacaaaaaaaa

SEQ ID NO: 90217 - DNA, 535 bp, Homo Sapiens
acccctgttggtcctcagaatcacctggcctatgcacactcccgctaaaccactgaagtccaatttctgggagctcagccagggaatgtgtatttttaaacaagccccctaggttactctgataagtgcaaagtcagagagcgctgctctcatgcactgagcctgagcactcttctattaataaaaaaggagaggagaatcctgggttgggtgcccttcgccttctggcggcagaagagcagagccaggctctaagcacctgcacccaccgctgggctcaggagctgcgctggagaatagaagggctaatttagtcattcatgcctttttagagcaaattacatgtggagagggtggggcacactgaattttattttagccaaatgccccttatctccttatgcaattgatatttttatattgaacattagaggattggtcatttgtcatcaagtcgtctgtaatacagaaaacgataaatacaacctaacagttcaaacatgacgagttaaataaatgatggttaccaataaaa

SEQ ID NO: 90218 - DNA, 1852 bp, Homo Sapiens
aaggtagcgaggcctgggtggcgattctcggcacgaggcacgcgtcggggcgctggcctggaatgctgagcagctgtcgtccgggagccgcgaccgcatgatcctgcagagggacatccgcaccccgccactgcagtcggagcggcggctgcagggccaccggcaggaggtgtgcgggctcaagtggtccacagaccaccagctcctcgcctcggggggcaacgacaacaagctgctggtctggaatcactcgagcctgagccccgtgcagcagtacacggagcacctggcggccgtgaaggccatcgcctggtccccacatcagcacgggctgctggcctcggggggcggcacagctgaccgctgtatccgcttctggaacacgctgacaggacaaccactgcagtgtatcgacacgggctcccaagtgtgcaatctggcctggtccaagcacgccaacgagctggtgagcacgcacggctactcacagaaccagatccttgtctggaagtacccctccctgacccaggtggccaagctgaccgggcactcctaccgcgtgctgtacctggcaatgtcccctgatggggaggccatcgtcactggtgctggagacgagaccctgaggttctggaacgtctttagcaaaacccgttcgacaaaggagtctgtgtctgtgctcaacctcttcaccaggatccggtaaacctgccaggcaggaccgtgccacaccagctgtccagagtcggaggaccccagctcctcagcttgcatggactctgccttcccagcgcttgtccccccaagaaggcggctgggcgggcggggagctgggcctggaggatcctggagtctcattaaatgcctgattgtgaaccatgtccaccagtatctggggtgggcacgtggtcggggaccctcagcaggcaggggctctgttctcccttcccaaagggcgagaaccacattggacggtcccggctcaagaccgtctgaactcaaaagcgaaggatgccccctgggaccctcactgcctccgtctgttcatcacctgcccaccggagccgcatgctcttcctggaactgcccacgtctgcacagaacagaccaccagacgccaggctgattggtgggggcctgagacccccggttgcccattcatggctgcaccccaccatgtcaaacccaagaccagccccaaggccagaccaaggcatgtaggcctgggcaggtggctcggggccactggcggagccagtctgtggatccaagagacagtccccacctgggcttcacggcatccttgcagccacctctgctgtcactgctcgaagcagcagtctctctggaagcatctgtgtcatggccatcgcccggcggtcagtgggcttcagatgggcctgtgcatcctggccaagcgtcaccctcacactggaggaggatgtctgctctggacttatcaccccaggagaactgaacccggacctgctcactgccctggctggagaggagcacaacagatgccacgtcttcgtgcattcgccaacacgtgccctcacagggccagcgtcctccttccctgcgcaagacttgcgtcccccatgcctgctgggtggctgggtcctgtggaggccagcagcggtgtggcccccgcccccaggctgcctgtgtcttcacctgtcctgtccaccagcgccaacagccgtggggaagccaaggagacccaaggggtccaggaggtgggcgccctccatccttcgagaagcttcccaggctcctctgcttctctgtctcatgctcccaggctgcacagcaggcagggagggaggcaaggcaggggagtgggttcttt

SEQ ID NO: 90219 - DNA, 969 bp, Homo Sapiens
caaggtagcgaggcctgggtggcgaatccggcacgaggctggaatgctgagcagctgtcgtccgggagccgcgaccgcatgatcctgcagagggacatccgcaccccgccactgcagtcggagcggcggctgcagggccaccggcaggaggtgtgcgggctcaagtggtccacagaccaccagctcctcgcctcggggggcaacgacaacaagctgctggtctggaatcactcgagcctgagccccgtgcagcagtacacggagcacctggcggccgtgaaggccatcgcctggtccccacatcagcacgggctgctggcctcggggggcggcacagctgaccgctgtatccgcttctggaacacgctgacaggacaaccactgcagtgtatcgacacgggctcccaagtgtgcaatctggcctggtccaagcacgccaacgagctggtgagcacgcacggctactcacagaaccagatccttgtctggaagtacccctccctgacccaggtggccaagctgaccgggcactcctaccgcgtgctgtacctggcaatgtcccctgatggggaggccatcgtcactggtgctggagacgagaccctgaggttctggaacgtctttagcaaaacccgttcgacaaaggagtctgtgtctgtgctcaacctcttcaccaggatccggtaaacctgccgggcaggaccgtgccacaccagctgtccagagtcggaggaccccagctcctcagcttgcatggactctgccttcccagcgcttgtcccccgaagaaaggcggctgggcgggcggggaagctgggccgggaggatcctggagtctcattaaatgcctggattgggaacatgtccaccagtaatctggggggggcacgtggtcggggacctccacagcaggggctctgtcccccttccaagggcgagaacccattggacgggcccgggttaaaacga

SEQ ID NO: 90220 - DNA, 510 bp, Homo Sapiens
tggtggctgccctgtggaaacagtttagaatatttgttttgtgtgtaggaacctagttgtgttagtttacctgggtgttccacagctgatagtgattgccttgaataaattcaagggcaatttattcatttttactagggagatagacctttacagcaatcaagatatttttgtccatatccaggttagctggtaagaggatttttttggagaaaaaaaatgatatttagaaagttaatttctaattccggaatggaataaaaacaatatgagtagtgtaatcttgtagaaaaagagttgtataatcttgtagaatttctcattctgtggtacaacccaggggtaaactattattccagtagtcagtacacttttctagataaatcttgagtgaaaaccagcaatttctttttccttgtggtctgattcctttttctaatccatgaaggccatcttgtagattacatttatcattaatgcaagaataaagacaattcctcctgtcaaaaa

SEQ ID NO: 90221 - DNA, 353 bp, Homo Sapiens
aagcccaactaaccttgggaaggaattcagtccatggtttgactctgaaacaaaattgataagagcctgtgaatcctgaaaatggaggcatgagacaacaatccttgaatcagctcagtggatcagctgacaccacccacaccgataatctgcctcaaccagttctgccaaaccaaccaggaagagtaaatagcaagaaaaactccaacaacctctgattccatcttcaacctggccaatcagcactccccacttcccaagctcctacccgcccaattgtctttaaaaactctgttcctcaaatgctcggagagactgatttgagtaataataaaactccagtctcccacaaa

SEQ ID NO: 90222 - DNA, 1443 bp, Homo Sapiens
  misc_feature (13)..(13): n is a, c, g, or t
  misc_feature (1078)..(1078): n is a, c, g, or t
  misc_feature (1155)..(1155): n is a, c, g, or t
ggagcgagcctgngtggcgattccgacgagggcggagagtcacagagggcaaatagcgccaggcggccgcttggccggatccaggggcggtgcagggcggccggccctgcctgcgggagagggcgagcatgaactggcccggaggacccagctcgagccgccaggacacagacgtacaggcctcctcgggagggagcgcctccccaccactgagccatcctcagcagcgtccgctgcgtctgcactgatgaccgtctgagcccagctcagcgttcctggacaaacagcctcactcctcagcgttaccgccacacttgaatttctccgaatgtcaaggttccctcccactctatttttttaggttaaagttaattggcatatggaatgttttaatctcctctgaaatgtgtagcgtaggcttttcccaagggtcgctagaaactcgtcttcgcgttgccccctttctggctctcagcgccgtcgccactcgggagaggctgggtgaggcccgtgtgaggactgaccctggattcctcgaaactgccattgtgatcattactctgctctttggaaatggctgtatcatttttttgtactaatgtgaattgttcctcagaaacgcttcttttccatcctagtgagaagctggccctgcaggtggtggcagcaatggtgttgtaagatttcctcccgtagttttttctcctcatggatttgaatgaaatgccaataacacgtccactttcaacgtgtagtttacgcggagcactttcgaggcctggccgggttgggcctacttctcacctgggcctatcttctgaactcgctaggttcttatcaacatttgggggataactttgtatatttttttcatttggcttttctttaccagtttctgatttttattctcaatatatttttgctaaacctatttcacaaatcaccaccgactgaagtgtgtgtttactgatgcggccctgagctccatggcgaaaggagtgactttgcagggcgtgagaccgcagtctgcttagagcacaggaagtgacaacttagggagccccgtagggcgctgcangccccggggaccccagcacgtgggtctaaagagagacggagtctagctctcctgccacccagagtggcttccatctncagcactctgtgggtctggtgatgggagatgcagtctctgctgatcacatgtgccctctgccaggcacctactggagagtgcgggccttgggggtgggaggcctgccttggcaagtgtgcgtgccctcgtaacgtgtggttatgggcaactggtctagggcagggtatgacacccactcttcctgtgaaaatttccctttaattttttaaaaaagggccagctcctaccgaggggggaccctatctaatctgaggaactaaccattggttgttaaaaaatttgggtcc

SEQ ID NO: 90223 - DNA, 445 bp, Homo Sapiens
  misc_feature (20)..(20): n is a, c, g, or t
gcagagccattttccagacntgtgattgcccagaacacatagtccccacgtttctaatttggagcaaatctaaaaggtgctgagggattggacagctctgactttcctcgagactatggatatagtccttctcagattagctggaaatggggacagagttctcatttatcccagatatatacattggcttttttggaatctatagattgagattttgatgaatttatattggttttaatgagacccaaatgactctctcttaacaattcaagcagtagacaaagttgctcacaaatacagaaaacatctttttgtctacttcgcaagtctcaaaacgtgataatatttaagcccatttgtagaagaaatcttgtatatactattattacaccttgatatctatacaaaacatcacttgtattaaaatatatagataactttaaaa

SEQ ID NO: 90224 - DNA, 556 bp, Homo Sapiens
agtgtcttgatcttgtcccatagtgccacctcgggagagaaccgtggctgtaggttctcatccagggctgcaggaaatgagtgccagagctccaagcctcctgtccatgggaaaatcgagccctcccaagccaagtatttcttcaaagaccaagtgctcgtcagctgtgacacaggctacaaagtgctgaaggataatgtggagatggacacattccagattgagtgtctgaaggatgggacgtggagtaacaagattcccacctgtaaaaaaaatgaaatcgatctggagagcgaactcaagtcagagcaagtgacagagtgaatgacgggaccccacacaatgcagacatccagaaatggatcactcccaagacccctggggcccagagctgcaccacccctccccacccacaacacccccgtgcccctttccatgtggattagaatgggtgctgaacaacatgatctcagcagttgaagctgctacgtgtgtgaaagcaaattctccacttgagggtttgcccatcattcaaacactattccagaaaataatg

SEQ ID NO: 90225 - DNA, 474 bp, Homo Sapiens
tgacttcctagaaccaaaatgaaaagaaaaccctaactttccatgtctaagtaacaaaagaaccagaggctactacctctgaccttttctgtgaggcagatgggaaattggctgtctgcaacaagtaagactgattgctggtcaagtcttcatttgcaaagaagtataactttgtaacttcatcctagcctctgattggttgctttttgcaactcatcagattgtttgcacaggagtgtgacttttgtaacttcacttcagcctctggttggctgctttctgcaaccaatcagactgattgcggctaccatttcagttacatgaggtgagcatgaagtggccgatgggaaaattctggtgggtatttggaccaggaagattctgtatccaggcccctgagctgctgctcaggcccactcccacactgtggagtgtacttttgttttcaataaattcctgctttggttatttaaa

SEQ ID NO: 90226 - DNA, 858 bp, Homo Sapiens
  misc_feature (646)..(680): n is a, c, g, or t
tattacccacttgcaggataagcactgttcaaaggatgccctacttgcaggattaaaacaagatgaaccaggacaagcaggaagtcagaagtcttctaccaagcagccaactgtagggggcacaagctcaactcctagagcacaaaaggccattgtgaatcatcccagtgctgcacttatggctctgaggagaggatcaagaaaccttgtctttcgagattttacagatgaaaaagagggaccaataactaaacacatccgactaacagctgccttaatattaaaaaatattggtaaatattcagaatgtggtcgcagattgttaaagagacatgaaaataacttatcagtgctagccattagtaacatggaagcttcctccacccttgccaaatgcctttatgaacttaattttacagttcagagtaaggaacaagaaaaagactcagaaatgctgcagtgaaaaataattccacttacacagtgggggactcaaagtcagccacatttcacatactgttactgaagaaagcaccaagtcttaatggaacaaagaccatagaatgaattattttatctcctcccatgatgctgagaggaagcttcgtattctgatctctgagtgaatccctttgttctctgtttnnnnnnnnnnnnnnnnnnnnnnnnnnnnnnnnnnngaactgctgtgggattgtcaaccagcttatctgcaggatgtttcagatctgataaatcctgatggaaactggtatgatcagaattcagtaccatccacattggaatatacatggaatattgtaaaacctacatgagcagatgaaatagaagcattaaatatttttatctatatccaaa

SEQ ID NO: 90227 - DNA, 442 bp, Homo Sapiens
gccatgaaaaaccatggaggaatcttaaatgcagattaccaagtgaaagaagacaatctgaaaaggctatatactgtatgacttcaactatatgaaattccagaaacagcaaaactatagagacagtaaaaagatcagtggttgccaggatttgtcgggagagagatgactagacagagcacagaggattttagggcagggaaaccaccctgtatgatactgtgagggtggatactcattatacatttgtccaaacccacagaatgtacaacaccaagtgtaccctagtggcaactctggagtctgggtgataatgatgtgtcatgctcagtacaccctggtgggaatgttgataatggggaggctgtgcatgtgtgagggaaaagggtatatggaaacctgtaccttcagctcaattttactgtgagcctaaaactgcttt

SEQ ID NO: 90228 - DNA, 549 bp, Homo Sapiens
cctgtctcagggccttgttcatggaagggagatgagtcaggttgaaagctcatcgtgtagggttctgtgcagggcccttacaggactggaccgcagccaagatgcctgcctgttaaccatgcccagcccccgtcatttccgcgtgaagccgcaggcctcggagccttggtctgaaatgcctgtggagtaacctcggtccataaacatgggtgcacagtctgttctccccaagtacagggcaggaggaaacaccgccctctgtagctgctcgaatggaaagggctcttttctctgaggtctttatacattagaaagctcttctgggaagaatgtttgaatccatagtgtctttctgtattcacttttaattgctttctaaattagctgagaaattctgacttgaaatattgtcaggtaagcatttcttcagttttcatgtgtgtatgtaacagtagctttgcatggaaattgtaatcagagtcaaatacagtattgaatggaatgtactgccttctcctcctaaatcaataaacatctttcatggaaaaa

SEQ ID NO: 90229 - DNA, 431 bp, Homo Sapiens
tatctttctctgggaactatatttaaccctgatttgaatgtaatttacacatcgcagctcccttaagcagctctggaagccaaaacatggatcaaatattttttaaatgtcaaatgctgcttaattgtggatcgcactgaatttatttgtacagataagcgtttgatcttctacctccttctctgcccaaagtaatttttccgtaatctatatgataccccaatttctctaatagctggaggattgaaatgatacatgagaggccctcaaatttgcagagtattttaaaagatgcatattcaagattggagcaggaaacttctaaccggagacttgaggggaattcattaaggcaaaaagaatcctggtgcctggagtggccagtgcagggactcctggggagggggctgccacattacccaagccaccag

SEQ ID NO: 90230 - DNA, 445 bp, Homo Sapiens
cacactcacaaaaatatacaaatgaatgaaaatggttatgacccacccatgactgcagtgggttcactgtcatctgatgtgatctataccacctgttcctatgtgactgagaggaccactggccatccatagcctgggaggttacatcatcactttgcacctcacactctagaaccagataaggaagaacagtgtcacatgagggaaaacttcctagcagttggagatgcccaacaatgagtgatcacattgttttaaaagtgagactcccattgctgatcaccctggagatttctgcatgggggcaccctgaacttgaaaatctctgaagtgcctcgcaagattcagggcactaaggtccaaaggagtgaagattggcaaactgataataactccccaaatctattacactgacatgtatcatcaaattaataaattccataaa

SEQ ID NO: 90231 - DNA, 548 bp, Homo Sapiens
actcaaatcaaagttaagtacagagtttatttttaacaaatgtcatagctatgtcaccttactacagaatccagcagtcagaaaataacacaaaaaatgccgaggtttggcgtagctggtagctggggacagtgtcttcgtttgattactgccagttatttccagcatgctaaatccctacccacgtcccagcctctaggtgagtcagtgcgtcactctgtctcccgtccaattaattatttctcatcactccctcaatccaagtaacaaaccttgaaacacgaacatagacaccaggcttattggggcgtgcacagccaagaccccaagaagtgactccttgtaaaatgtatttgtccttctcgaagcaaaccagaggccctccaatgtcaacctggcaactgtcagtgcctccggccaaatgcccagcacagagttcggtggattggactcttccattcagagactcatagcgattgcacactttattttcaatcacaaggggctggccttccttgagagggcccactccaaaagtccttgggttt

SEQ ID NO: 90232 - DNA, 472 bp, Homo Sapiens
agctaacagatgggtaccctgctttcaaaagaccccacatgactgccaaagacctgggactccccggcttcttcccatcacaggaacatgaggccacgagggaggacgagcgcaagttcaccagcacctgccatttcacatatccagcttcccacgatctgcacctggcccagggtgaccccaaccaggtcctccagagtgctgactttccgtgcctcgtggatcccaaacaccagcctgctgcagagatggccaaaggctacctgctactgccagggtgtccctgtcttcattgccatatagtcaaggtccccatcttgaaccggtggggacccttgatgccattttaccagtaggaaggatgaaaataccttccaaaggctcttccaagggcatgtggaaatcctatgaccttggagtgcagagaggagaactgaaaataaaactggaaagatgttccaactgcaaaaaa

SEQ ID NO: 90233 - DNA, 560 bp, Homo Sapiens
gcggccgccactcgtgcttggtcatgagcaggtaaaggaggcgcagggcctgcacgaccaccatcttctctcccacctggttggtcagcagctccaccagcatcttcactagcttctctctcagcgatctgtcaggacggaccagagggtggtcccgctcagtgacctcctccacagcctgagagagggcagagagccctgaaagctgcaggtttgtgtccaagctggatatctgcacagtggccacgaccgctgccacatgctgatccagggagctgcgaggaccgggaccccgcaaggctctggccatttcactggctgcctccttcatctcagtgggcagggtcatcccctcagtcaccagaagctggttaaacagctgagaatcactctgtgccatgggggtctcggtccttgtcttggtgggctcggcctctgtcttaagggcctcggcctttgctttgagggactcagtctcttcctctgagaagctggcctccgacttggactcctcttctggatctggggtacaggagtgatttcgtgaagtagacgagctg

SEQ ID NO: 90234 - DNA, 584 bp, Homo Sapiens
ttatcaccgcaataataaaaatcgaaatgcggagaatgcatcctatatccacgttcaaagagatgctgtcaggactgtcgcgttgaatgcaccttcccgcagcaggcccacgcatgggtcctacaataaagtccatgctaacagggaacccaaacccaacctcagtccagacaaatatacgtcaacatcatataatgattcagcctggcgaaaacgaattcctttttcaaaaacatattcaaaaagtgaaaagatatatccagagccaagaagaaatgggagcaagtaaacctggaggttgagagagagaaaaatgagaaaaaattgccagacatcatctgatttacaatcaaaaatgaaaattcaaagaatgagatactcaagtactccatgttatgtagtggatagccaaagatgataaaaatgcaaattctgaaaataagatgcaggaagtacattgtgctctttcaaaactgataaaaatgcaaattaccaacagctgccagtgtatttatgtaggtctggaattcattccgtgcattactccaaacattttaataaaatttaaaagtttgacaattaaa

SEQ ID NO: 90235 - DNA, 474 bp, Homo Sapiens
gctcataaccaaatttagagactatttttatgcattgttaaagtggaatgctggttaaattttatactttattcacaagagtcactgtgaattgaattgtgaattcagttctgaattgtgttcccaccagcaccaccaaatgctggcctctaccaccaccaaatttacttgttgaagtcctaaaccccaacatgactgtatttggacataaggcctttaagaaactaaggttaagttaggccataagagtgaggccctaatcccataggactagtgtccttataagaggaagagacaccagaggtttgtctctccacatgtgcacagaggaaatgctgtgtaaggacacaacaagaatgctgccatctgcaagccaggaggagagacctcaccaggaaccagccctgccagcaccttgatcttggacttttaatctccaggactgtgagaaaataaatgttagttgtttaagcc

SEQ ID NO: 90236 - DNA, 597 bp, Homo Sapiens
ttcttctctttgaaacattttatatgaatcaactaatttaatcatcacagtaacctcacaatacctctgagaggtcagttattattaaccacactttttagataaggaaactgacacacagctgagaggttaagtaacttgcccaaggaaccaagagtcaaatccaaacagtctactccagactctcatgctgcaaatgatgagaaaatctacaagttctcaagggctgacttacagaaatggtttagaaatcctccaaattctagattctagaattgtgtgggttcaaccctgtcttcccttcctcctaggaaaacttgcaggccttgtgaggagtaactcaagatggaggatgtggattactccgatgtctgagaattgagccttggaggggctgagggactcgccatgcaggaagagggtgtctgggtagtgagtgagcctggccaggcaatctcagggctccccaggccacatctcacaataggtattgggtacacactacttccaccctgaatcctcactggcagcctccctggtccccaacaaacagatgtagtcatggcatctgcattcattgttcaagaggtaaaagat

SEQ ID NO: 90237 - DNA, 926 bp, Homo Sapiens
  misc_feature (261)..(271): n is a, c, g, or t
tttaactgattacaaaagctttttgtaaaatcacacaaatatttcaagaataaatgcattccagagatacaaatcaggccaaaagaaacaaaaatcaatgaaattggcattacacttgtaaaaggccaaatggacacaagccctcgagggtctattgtgaagtgcttgggggcaagtggcctcaaagaaacttgggagtgagaggtttgcactgagcttgggaagggagccttgggaaaacaccacacttgtgaaatcagnnnnnnnnnnngcaagtgatggtgcttacagcccaggacgacttcctgctggtttaggtcagaaaaaaacctgagagagattcctaaaacaatgagggctgtaaggggactggtggaaaaaatccagtggaaatattttctcaggaaaggaaggagcaaagtcatggtaagttaaaatgtggtaccctaatgtagtagtaaatttaaggcctgtcgaggaaattttaacacttccaacaggtgactatatcaggaaggagaaaaccaagtgcttcctgcttcaccttctgctgcttttgggacttttctagagctagtagctaaggacaagaccctgaacccattttttcactgggagaggaaaaaccaccaggcttctcagctatggcttggcaactctggagttcctatggcttcccatcagggctccccaggccctgataaatggccctcaggcaaggaggaaatccggaaacggatgggaaagcctagtcaggaaaggtggaataaggaaccattccccaaacacgtttgggggtatgatgattttgagggacttggaccgtatttcttgcttgcttgcgggttgggtgcttcttcggactggctcccgagggaatcttttcagggcttttgcaaaccgggcttcgggtaccccggcggtcc

SEQ ID NO: 90238 - DNA, 1164 bp, Homo Sapiens
agctcagggtgcacccaccctgccagcggcactgcccagagccgccgagtgcacccgaagaaaacaaagccaccagcaaagctccccaaggcagcaactcaaaaacccccatctttagcccttttcccagcgtcaagcccctgcggaaatctgctactgccaggaacttgggattatatggccctacagaaagaaccccaactgtgcactttcctcaaatgagtaggagcttcagcaaacccggcggtggaaacagtggcactaaaaaacgatgatgtctccccgaaactttgtatctggactcaccttttcacagtagtataagggttgcagctgaatggctctaaaagagttttatttgtccagtgaaaatgaataggttcagggatgagcaacagcccataaaaaatgggaactggaagttttataataggagttagaacagggctgttttcccagctacttgctaactgacgaagtggattcttgtggcaaaataaatattgtggttttatagtgtgaagtgttcccaatttctcattgtgagctgctctaaaaaagactatatctagattgttaactctcgtccatccttctgttctgggggccttcagagtccctgtgacagcacccccaaacttccagttctctgggtgttactaatactcaagcatgcacataccagcttgctaggacagaaactgtaaaagaaagtaagtttcttcgttacaaaaaacttcctgagtttaccttctcatgctttacggaggggatcgtagtcgtgtgagatttcccagagtaccagtgttcagatttacgagacatgcttgatgctaaaatccatacggcagaaaaatctcagatcagccattcttaaacgtggtgctaatgtgctaacctggccaaactgaaagaacaaccttagaatctgttcggacatttcacaatcgaataacccaagctgaagcatcttcatgacccagtgacacattgtgggacaacgtataaggacgccggtccccggaaaggttggtcacgagccacgcacatcgccacgaagacagacggcaggctccccaacggaagagtcacgaccgcacaaggcaacggacgatcgaaggcaccaacacagcggacatgcacccaccacacaaccccacacaa

SEQ ID NO: 90239 - DNA, 1236 bp, Homo Sapiens
gtgcattaaaggagttcgagcaggtgccgggacacttgactgatgagctccacctgttctcccttgaggacctggtcaggatcaagaaagggctgctggcacccttactcaaggacattctgaaagcttcccttgcacatgtggctggctgtgagctgtgtcaaggaaagggctttatttgtgaattttgccagaatacgactgtcatcttcccatttcagacagcaacatgtagaagatgttcagcgtgcagggcttgctttcacaaacagtgcttccagtcctccgagtgcccccggtgtgcgaggatcacagcgaggagaaaacttctggaaagtgtggcctctgcagcaacatgatgcccctgagtactgtgaaaaagactgttcaacatgccttatgataacaccgatttgtgtctattattggtgacattgttttagatattgggtattgtatattaaggaaaaagatggtctatattctctttattgcatatacttaatgtttcaaaagaatgcagattctgtgtttaagcacagggctgatagttgtggttttgtttacaaatgttctgttttggctgctattggttttttaaagaggttttttatacttttgtatttgaatagttatgtttcactgatgctgagccagtttgtatgtgtgtgcatatatgtgaactgtaactgacaagatgaattactcagtttctctttctctaaagcttgtttgatgaaactggttggtcctttcagtgaacaaaaatatgaccccaaatctgtttgctctggcttttatttcttcaggaagcagacttccacttaaatgccattttgtgattgtgtcaatcatacacattttatttacttcagagtttgaatagagagtacacatttcttctgcagatttatttcatgatgagtttgagttgcttagcagggcgtgtgggtcccgttgaagtgcagtttgaagcaactgcttctagatggcactctttcaggtggcacaaatttgaacctgtatttgtcatctctgttccacacactgcaatgtcaagggatgcagaagtgagtagaattccatccctgcccttgaggatcttgctttaacagatgtaaaactgaacataaagtatttgcagatttaaacgaactgggggaaataatgaacagtgtgaatctagtaataacattaaaatcatagacattgactattaagggttaatggatcccc

SEQ ID NO: 90240 - DNA, 406 bp, Homo Sapiens
  misc_feature (46)..(46): n is a, c, g, or t
acttagtcatgctgcttcattttgaaaaagaaacaaccatctttanaatactacccacaagaagtataaatggctttgatggctacagttccctgccattctactgggaccataagccccactcttaagagtgggcttcttttgcctcccatttaattgtatgcagactcctacggtgaaagaaatcagaatctgtgctaactttttggcatgaaaaacgtaggcgacgaggaagcatataaatgcattctttgctgattctacccccattttgtacaaacatgtttgccccttcccaattttcttgtgtactaaagctccaccttcaggacacaagttcacatttgaaaagtgtgggaaatacgaacaactgaaataaatatttaggcatgcgggttctgtaaaa

SEQ ID NO: 90241 - DNA, 431 bp, Homo Sapiens
cagctccatgaaatcaattgggggagaaggacactgcatcccagtcgaggcgaaaagtcttcctcaatgtcatcactcaatattgcgaagcacatgccccatcgagcctactgggcagagcagcagagcaggctgccactgcccctgatggaactcatggagaatgaagctctggaaatcctcaccaaagccctccggagctaccagttagggatcggcagggaccacttcctgactaaggagctgcagcgatacatcgaagggctcaagaagcgccggagcaagaggctgtacgtgaattaaaaacgccaccttgggctcgagcagcgacccgaaccagccccgtgccagcccggtccccagacccaagcctgaccccatccgagtggaatttgagtcctaaagaaataaaagagtcgatgcataaaaaa

SEQ ID NO: 90242 - DNA, 1103 bp, Homo Sapiens
cagtcgacggtaccggacatatgcccgggaattcggccattacggccgggctttaaatgtagtaagtgtgacagagtcttcacccagagaaactaccttgttcagcatgagcgaactcatgccagaaagaagccgttggtgtgtaacgaatgcgggaaaacgttccgtcagagctcatgcctttctaagcatcagagaattcactcaggtgagaagccctatgtatgtgattactgcgggaaggccttcggcctgagtgctgagcttgtccgccaccagagaattcacactggagaaaagccttatgtttgtcaggaatgcgggaaagccttcacccagagctcatgcctttctattcaccggagagttcacactggggagaagccctacagatgtggtgaatgtgggaaagcctttgcccagaaagcaaatctaacacagcaccagagaattcacacaggggagaagccttactcctgtaatgtgtgtggcaaagcttttgtcctcagtgcccatctcaaccagcacctgagagttcacacccaggagacactttatcagtgtcaacgttgccagaaagcctttcggtgccactcgagcctcagccgccatcagcgtgtacacaacaagcagcaatactgcctgtagccattgggtggcagcagagtcccagaatatgagaccgttactcggatgttgaaagttggaaactatcccattgcaagtttctctccaaataaatgcatctaaagattgattagaaagtttgtgcgcatgtttttcattataacaatgaaaacacaaaagtggagaagctgtacaacgtcaggattcagaggtaggctctggagccagtctaccttgagttaaatcccacctctgccatctactacctaagtgaccttgggaaggtcagaaaaatctctcagggcctcggtgtccttatctgtaaaattggcatcacctacctcagagggcttttctgaggattaaataaataaatgtgaagcacttagaactgatggccagcacatgagggctcaccaagtgtaagccacaaatacacatcagctatagcacaaatatacttgtgttaacagaaa

SEQ ID NO: 90243 - DNA, 363 bp, Homo Sapiens
tctttgaagaatgttactagaaagaagcaggtacaacccttgtgattattatgctttgaacttgatgctgtgctgaacacattaaaaagagccctcatgatgagagattggaaggagaatgaaagaaaggaagcaagatcatccagagaaccatgaagtagtgaccttcagtgaccttcagtgatgaggtgaaaagtgtccggacaggatgagacctgtatacttgtaattttttctagaaatatctggaaaacaaagcaagagaagtagaagtatttgtagcttttactggagaagatttttgtatttttctaagtagatatgttagttgcccatgttagtaaaattttaaaatgttttaaa

SEQ ID NO: 90244 - DNA, 636 bp, Homo Sapiens
  misc_feature (452)..(462): n is a, c, g, or t
attcgaccttctcttaactccgcagaatgcagttgagatgcatagaaaaagtctgggactacttacacctatttgctagcatgtctttgaagaatgttactagagagaagcaggtacaaccttgtgattattatgctttgaacttgatgctgtgctgaacacataaaaagagccctcatgatgagagattggaaggagaatgaaagaaaggaagcaagatcatccagagaaccatgaagtagtgaccttcagtgaccttcagtgatgaggtctggcattcatcagcattcacacatctgcagaaggggtatgagggagaaatgacttcattaattattgtgtcaccaagtttttcttctcttgattcctaagaagaagaaacagagattacatgtgtttacttaagggtaagcactaactgaatgcttactgagtggctagatgaatatctnnnnnnnnnnntggtttctgtaggcgttggattctgctcaatgcttatgcccacccagaatgctctataaaaccttcactgttgttctcaggatcagccttcctgaattcatcctataaacttttaatgagtgacctgtttgtaaaactcccttccagattggcaaatacaagttgatagagaac

SEQ ID NO: 90245 - DNA, 498 bp, Homo Sapiens
cagacatgaaatggcagttgtattgctgtcttatcatgaggtgagggcctgaagctatggtagccaccctgtgaaccttggaaggagggttctacaggaactggcagagctgagactgggacgcaacccatgtcctggtgacgtatttgagtcctgaggctggccctcctgttagtcttttctcttactggcttcagccagatggggtctggttttctgttacttgcaacaggaaaaattggaatgatatctatgcatgctattaccgccttatggctgtggtgagattaaaacatgatactgtgggtgaactgcttagtacagtgcctgctattctttatgttggttttaaggtatttttcttgaactttaaagttctaagaaaaattaccgttttaaaattcctaccctctgttcacatgtttaaattttcatgatagtttttctgtctgcatgttttctattcaaaataaattggtcattcttcagttagccacg

SEQ ID NO: 90246 - DNA, 511 bp, Homo Sapiens
  misc_feature (75)..(75): n is a, c, g, or t
catcaggctctcgcagaagcgggtgcccacactcgggtctgcttcgggctgcacagcaccaaggtggcactctcnacactggtacttgtcctccacgggtcttcacaaacttttccttgtaacctccttgttcagggacaaaaactggcgtcccagcactgcggtcagtgtgcagctttagcggcgggttagtctgcagcgcgccaggagagtccatctttttactcgactccattttaggaaagaggagttctcttctgtcaggacagcgatccttagaagagtagggagccaggagccaggagccaggtttctgatcctaggtctgattctgacctgctctgggaccttaaccaagtggcatcacttctttgggcctcattttcctcatctcgcggtccgtcgccgctcggccggctcaggggcgccgggcgcgtcctccgccgcggtccgcagcattctgctccccgggctgacccatggcggggggcggggaagagccggcggccgc

SEQ ID NO: 90247 - DNA, 985 bp, Homo Sapiens
  misc_feature (853)..(854): n is a, c, g, or t
  misc_feature (863)..(863): n is a, c, g, or t
  misc_feature (865)..(865): n is a, c, g, or t
ctgaggatgatgccgtcactgctgcccagcagttgctcagtcacccaatgtcacccccatcttcacatgtccagtgtgtctggagaaagtcgggacctcctcaaagtctttctgaatattctgccgccactcaccaacagcaaagagcaggaggaactcatgcagcagctgacggagttccaggtggatgaaatctacacagtaccagaggtggggactgttgttggaggaacactttccagtgggatttgccgtgagggggaccagctggtggtgggccccacggatgatggctgcttcctggagctgagagtatgcagcatccagcgcaaccgctctgcctgtcgtgtgctgcgagctggtcaggctgctacactggcgcttggggactttgaccgtgcactgcttcgcaagggcatggtgatggtgagcccggagatgaatcctaccatctgctcggtgtttgaggcagagatagtcttactgttccatgccaccaccttccgacgaggattccaggtgacagtacacgtgggcaacgtacgtcagacggcagtggtggaaaagatccatgccaaggacaaactgcggacaggcgagaaggcagtggtacgtttccgcttcctgaaacacccagagtacctgaaggtgggcgccaaactgctgttccgggagggtgtcaccaagggcatcggccatgtcactgatgtacaagccattacagcaggagaagcccaggccaacatgggcttctgaacccttcaggcagggacagttctattgctgtccctacaatatataaggtgacttctggccatgctgccctgccattggcggctctgtgtgttaatanngctagggananaaagggtgctggtctgcccacttgctccctgccaactttttctggaaaggtgccccaaactttggtgtgggccaggaaaaaggccaatcccttggagggagaaaaaacagggattcccgg

SEQ ID NO: 90248 - DNA, 377 bp, Homo Sapiens
tatgtacagtgacttaagaaaaattagcagattcaataggatttgaggaaccgattctactctcaaagtacttgttagatgtaattaaagttttctgcattcatcaaacatataatcaaattagaattctggtttctgggtttcatatactaaaagtatcatcaaggcacattataaatcagtaaacaattattttaataaaaatgtaaacaaaataattaatttataaattgttcctcattgctgaggatgggataataggtctttaacctgtagagtatataagttctgtttatctctatatattctctgagattgtgaacattcaacttacaagaaaaccctaataataacactaaattttactatgaaatgga

SEQ ID NO: 90249 - DNA, 599 bp, Homo Sapiens
  misc_feature (25)..(25): n is a, c, g, or t
ggcgtcatggagaccagatgcaacngtgccctatccacaccacagttccctgacgtgaacctctgggacctgccaggagccggctctccaggctgcccggctgacaagtacctaaagcaggtagacttcagccgctatgacttcttcctgctggtctccccccgccgctgcggggccgtcgagacccgcctggccgctgagatcctgtgccagggcaagaagttctactttgtgcgcaccaaggtggacgaggacctggcggccacgcgcacccagcggccgtcgggcttcagagaggccgctgtcctgcaggagatccgagaccactgtgccgagcggctgcgggaggccggcgtggctgaccctcgcatcttcctggtgtccaacctctcgccggcccgctacgactttcccacgctggtgtccacctgggagcacgacctgccctcccaccggcgccacgctggcctgctgtcgctccccgacatctcgctggaggccttgcagaagaagaaggccatgcttcaagagcaagtcctcaagaccgccctggtgttgggcgtcatccaggccctgccggtcccagggctggcggccgc

SEQ ID NO: 90250 - DNA, 537 bp, Homo Sapiens
ataaggtaactttttcagaattgaaagcctaaacccagtgaatttcaaaataaagaatttgaaaatataataaggaaagagtttcaaattattttctggtgtatgcagtagtttcaaagaggtttttttaaaaataaaattgtgatgagtttctttaaaatggtatagcaacacgaatcatatgtagatgatcttaaccaatgagagcatgtgtatgtatgtgtaaaatgaattaaatcaaataaatggttgtaaatcaagtaagttgtaaataaatgaagtacatggttgcttttttatgttctccatatgtattttcaagctctcaaagatccagttgttcttacttctcagggtatgttgctgaacttccaggaatcattcccgtctttagtccagtgttgctgctctagtctcattggaagtgacctgtccactgactctcatccccaagttcctaatttgccagcagaatggtactggccctgtgtctagtgatcccagggataaaatgctgttgtctagtatcattgcctt

SEQ ID NO: 90251 - DNA, 1317 bp, Homo Sapiens
ttttacttccttcactagttacgacaaaatttaagaggaataacaaatacaaattttctgttaagaacggaaaggtgcaaactagcagagtcaatactggtaaccagaaggcactaatccaaacacataaatttcaaaagctggttatattatggaataccatatatactggcctttgccagtttgggatttctgcaatagcaataagcctcgtttctgtttccaattataacaacaaaaagatgagttactaatgaacattccacttacagaagtctaggctatgttgataaattgaaaacttatctagactactctgtctaagagcaataaaaagtaaacactcttttatccagcagcactaggaaacagggtgaatttaccaagataaattaggttggggatacctactgccaacttgtgcggttgtcgaattcactgtaatatgtattcctcttattgatagagctctgaatgtaaacaacctagaagtgaggggaaaagcttcagtatcatggacaacaattatgttatagtgcttttcagtggtatagagcaaaaccactgttcccacactacgaaaaatctgagaccactgtgttttgtcttgatttgctcgctcttcagctgcttactttattctagcatcctttctcttcaagcaagctgtgaacccaggtaaccaaatttaagagtcattacataaagtacagttattggtttaagtcaatagcctcagactatgtatggtactgcccaaaaagtaaagtgcacaagattagcaatgatacagatataccaaacagtttttgtttatttctgagtgaaagactatatatgccaatggttagggttgttggttactggataaattaggtgcttaccccaaaacaaaaaaactaatccctctttttataaagaagtttagatggaaacagaaacagaaattacatcaattctcacaacattcctttaaaggtgaatcagtaatttaaagccttattctcagcattgaagagagagaagtttaaataaaaacatttatatgactactaagtgaataatggtgtgggactcaccactggcaaagccagttaattactttgaaccttaactaaattctctcctaggagtcaaagtagctgaacagctaaagtattccaacaaaggacagtctgacaaaaacattccatattaagtgaccttgacagaagaaaaagatttgcagccctaagttaaccaagtctagcaatcgaaagattaccttttccggacgcgtgggtcgacgatatcccgggaattccggaccggtccagc

SEQ ID NO: 90252 - DNA, 258 bp, Homo Sapiens
catttatgatgcttactttctctcagcacttttccttgggagtggattgtgaagttaagtcttggaaacagaattcacaaccctaaagcgtagtgctttaactttgggagatcaagtcacagacaagaagaacttcaattccctgtgcagagtataaacttgttcaaataaacagaggatgttagcttccaggattgtcaactgtcacctttgaccagggttgaattttctttgaatgttgacagaagttacaatgtc

SEQ ID NO: 90253 - DNA, 1478 bp, Homo Sapiens
cgtcttgtgtcctgtttcgtgttccgtctctttgtcctctctctgtaccatctcgggacgcctgcccccctgttttagcacctcacgtctatggttgatcgttcactccgctgctgcctgtgtgcttgcggctcgtcgctacttccctggtcctcatgctcttgttggggacacttcctgtgttcacttgctggtgctctgcttcctgtcgcccaggtattctgtcgctgcttattttgcctctttgccgcgcccactgagcgtacgttcgtgcccctgcctgtttcgttgggtccttccccctgttcagagtttgcttcttagttgacctttcgcttcccgtgtccatcacgtgtcgttcggttcctttttctgattggtggttggctttggctctctgttatattttgtgttctcgtagccccttggttgggcaccgtgcctctcgggctcattggtcttgtgccgctttcttcggggccatatatgctgtgcctgacttttgtcgcgttcttgtctgtttccagctgttgctcttttatgtatcatggtctctcgggtgttgtcttaagggcgataccgggcgctgttcatcgtggtgttactccttcctttggctctcaaactatcttgggtcttctctggctcactgttgccctttccccatgctctcttttgctctactggtactgtgttctgcgcttgtcctgtcattgtctggctggcgtcccccggtccggattgtcgactctccacgtctctctcacgaggcctgctagtcacgccctagcctctgtcagtcttgtgtatcatggtccagtcttcgggtttcacctcttagtactccactaagctgctcctctctctgtggccccggcccctgcccaggtgtggatggttctggccagggaaggcacaatggtagtctgtgggccaagacaccaggccctgtcgctagccccgtctagtaatgacctttgcccaggagaggagaaggatgcctgggtgtccatggcaagacatagcccctcagcaggagaagaggcccagaggctccagctggccaccgtgccccacaagatggcccctgtgtggttccctttaccttggcttcctggcccagtccctgcctctccacctgcaccctgcttcctggcccagtcccaggttggagtccctctgcatagctgactactcatgcattgctcaaagctggcttttcacattaagtcaacaccaaacgtggttgccacatttcatcagacagacacctccctctggagatgcagttgagtgacaaccttgttacattgtagcctagaccaattctgtgtggatatttaagtgaacatgtttacaatttttgtatatatcactctctccctctcctgaaagaccagagattgtgtattttcagtgtcccatgttccgactgcaccttctttacaataaagactgtaactgagctgactgtgaaa

SEQ ID NO: 90254 - DNA, 306 bp, Homo Sapiens
tgtattagtcagggtttctccagagggacagaggcaataagatatatatgaaaggggatttattagagggaactgggtcacgcaattacagaggcaaagtcctacaaggggctgtctgcaagctggagaaccagagaagccagtactgaggctcagtccaaatttaacagactcagaaccagccaagcaaacagtgcagcctccagtctgagaccaaaggcctcagagcccccacgaggctgctggtgcaagttccagatttccaagagctgaagaacctggagtcttgttttccaagggcaggag

SEQ ID NO: 90255 - DNA, 534 bp, Homo Sapiens
aaaatacaattttacttaaagtgatccaaggggacactgagtcagccattcatgaagctgaacatcatttcaagggacgctggctccggtatcatggtgaacgccaaggtgaagagcagccgcatgagatcccaaaggaaagcccgggagtcacacaagtggagtacagcagcaaaccccctccaccgcctgcccttggctttggtcttgccagggaacagctgatgccgactagatgacgcaaccaggaagtgaatatcctgtctgctccttgttctgtgctgtctgtgtgtcctagcttgccatcccaaatcaaggcatcccttgaaatcccctgggtccaagcatccagatgctcagtgaacgcagtgctctaactccatcttccactttccattaagaagtcaatgactcttattcaatacaactccatcttctgctaacccctaaaaggaatttacattctgctcatttcacttcccattatattgtattaattttcccatcattaaaccttttaaacccaataaaaaa

SEQ ID NO: 90256 - DNA, 161 bp, Homo Sapiens
aacttctctaatagaagtgctacttccaaaagtagagtgttcttgtcaccagaggaatcgaacatgcggctgaacagcctctctgagctgcgatggccttatctggaccgcatcccgcattccaaaggctggcaatgcaatatatacctatgtctctcaaa

SEQ ID NO: 90257 - DNA, 402 bp, Homo Sapiens
  misc_feature (74)..(74): n is a, c, g, or t
gctatgtctctttttagcttcgtaatctttggcaaggccattggattcttcagctgtacaattaggagactcgnatcaggtgattgcctttctcagctgtcagttctctaatttcaggcttggtagcttgtaggaactgaaattgcaattaaaacctttataaactcaaactaaatcatgaattacagaaaaagtccattcttccaaaacttgatgttaccacacttacaagtttaaaatatgaagtcgactgtttaaaggattctgcatatattctagtgtgcacattcagaaacatttttcttggaaaaagtacccaacattttttataactgcacatattaatttattgccagaataaattgcattgcatgctaaataaagtcagataattcaaatcca

SEQ ID NO: 90258 - DNA, 669 bp, Homo Sapiens
gcggccgctggctcccggccgccgccaccttccccgtgcaagacccggccagcggcgccgctctgggcatggtagccgactgcggggtgcgagaggcccgcgccgccgtgcgcgctgcctacgaggctttctgccgctggagggaggtctccgccaaggagaggagttcattacttcggaagtggtacaatttaatgatacaaaataaggatgaccttgccagaataatcacagctgaaagtggaaagccactgaaggaggcacatggagaaattctctattccgcctttttcctagagtggttctctgaggaagcccgccgtgtttacggagacattatccacaccccggcaaaggacaggcgggccctggtcctcaagcagcccataggcgtggctgcagtcatcaccccgtggaatttccccagtgccatgatcacccggaaggtgggggccgccctggcagccggctgtactgtcgtggtgaagcctgccgaagacacgcccttctcctccctggccctggctgagcttgcaagccaggctgggattccttcaggtgtatacaatgttattccctggtctcgaaagaatgcccaaggaagtaggggaggcaatttgtactgatcctctggtgtccaaaaattcctttactggttcaacaactacc

SEQ ID NO: 90259 - DNA, 426 bp, Homo Sapiens
atcacgcatctatttcatatatgtatatatacatgtgtgggttcaatgcaggctgacagagtggagatttggacacaggctgcatgaacgagcagactgccactaaggtggcctaaatttatgtccacttttgtcccatagcccaagtttgggcatcttgcccctgctttgccctctagtatctgaccttggtttgctcctcttttttactgtacagagctcaaaatgttgaaaatatagatctgaatctcaagcgagagataagagctaaagttgtggatctggtaatcattggtgctgcctcctccttcccttcctaatccccattgtaatctgtaaaatttacagttccatttagctgtggctattcctttcttgtagtttacaatctagaggaaataaaactatttacaggtacaaaaaaaa

SEQ ID NO: 90260 - DNA, 495 bp, Homo Sapiens
gcatggattgcggagaaatgggctcctttcgggaggctccaaaattcccgtgccacagaatctctcacaacctttggggatcaaggactgctgtggcgtttacctcgccagctgggggaccctggaacaaaagccagtgccgttcccagtgccgggtctctggacacggcaagatgagtagagtttgcgaccagaaactttcggtgtttgggttgtgttctctggtttccgccctggtggagggagggctcgggtgcgcgcgcctggtttgtgatacactcgcaggtggaagcaagcccagcctcctgaccttactgggaagaagacagcaagcccaagccacagcttacttttgaaaatagaaagataatgcttgcttcaatagacagagacatcagctgtagatttcatagtgaatcccagtttagcaaattagcaacaaatagacttgaaagatgactgcctgaaaataaaattttctatcattttatgaca

SEQ ID NO: 90261 - DNA, 415 bp, Homo Sapiens
  misc_feature (54)..(54): n is a, c, g, or t
  misc_feature (65)..(65): n is a, c, g, or t
  misc_feature (74)..(74): n is a, c, g, or t
accccttcccacaaggcagctgaagattttacagcccaggaaaaccccactccntggctctccantgcacccantgagcccagccctccagaaagcccccaaattttggcccccacaaagcccaactttgatatagcctggacgtcccagccccttgatccttcctcagaccccagttctttggaggaccccagagcccggcctcccaaagccctgctggcagagcgcgctcacctccagccacgggaggaaccaggagccctgaattcccctgctacacccaccagcaactgtcaaaagtcccagcccagcagccggcccagagtcgctgatcttaagaagtgctttgagggttaagaatcaggggtccaagagagaccccagtccctcaataaagccacaagagcccaaaaaa

SEQ ID NO: 90262 - DNA, 531 bp, Homo Sapiens
ctgatttatctctagatagtaggataagagaaattttctgttttcactttctatatgtaatgtttcttataattaggaaaatgctgaatgtaatcatggctctcttattccagcctgactcaaagcccagtgttgtttatgtggtttgttagcttgcagttctagagacaccagaggtggaactggtgaattcattcattcgtgagggccccctttatgcctcaatttcccatctgtaaaactggatgatgatatacctcatcgggtcagtgtgagaattgcgtgagttaaaatctgttaagtgcatacaactagcactggctcgcaggaagcactaaggaagtctatgctgctgttattgtccattgagtgtcttctacatgcagaatgctgggtcaagccctgtaaggctgtaggggacgaagggaaagtgacttaaggagggacgagggaatgaagggcatgagaaaataagtggtttgctgccaaattctcttgtagaattccaacagaaatcaccccagacacccc

SEQ ID NO: 90263 - DNA, 519 bp, Homo Sapiens
gtcttctcccactgatgaggtaaacctcgagaccaatccagaaataaattgccaagcttctatcaaataattcaaaaggagacccaggactcttgatgatacacttgaagtcactaaatatgaaagatgatagcatcttgaagggccaagaccagaaggaaaggagaattttcacagggaagaagaaagagttggtgaaagtgaaattgctttaacaaaataatgatctccatacctccctctcgaactgtggtttgaaggacagtatcatcagcattacttggagcttgtgagaaatttagaatttcaaggccccctcgaccccaacttactggtgcaaactctgtattgtaacccgatccccaaggtgattctagtgtacattaaagtgtgagaagtcttgttatgaatggattctttatagtgctgcaatttagaacatcttttaagaattataaagacaattttgtgtctcttgtatctgaaataagtattaaaggcaaaatatatattgaaaaa

SEQ ID NO: 90264 - DNA, 603 bp, Homo Sapiens
  misc_feature (371)..(379): n is a, c, g, or t
aacccggaaacggtgccaaagcctgctgtgcgcccaagcagctccatccattttccgtctttctttggatgccagctccaacgtcatcctgaagaaatacagaaacatggtggtcggggcttgtggctgccactagctcctccgagaattcagacctttgggggccaagtttttctggatcctccattgctcgccttggccaggaaccagcagaccaactgctttttgggagaccttcccctccctatccccaactttaaaggtgtgagagtattaggaaacatgagcagcatatggcttttgatcagtttttcagtggcagcatccaatgaacaagatcctacaagctgtgcaggcaaaacctagcaggnnnnnnnnncaacgcataaagaaaaatggccgggccaggtcattggctgggaagtctcagccatgcacggactcgtttccagaggtaattatgagcgcctaccagccaggccacccagccgtgggaggaagggggcgtggcaaggggtgggcacattggtgtctgtgcgaaaggaaaattgacccggaagttcctgtaataaatgtcacaataaaacgaatgaaagaaaatgg

SEQ ID NO: 90265 - DNA, 917 bp, Homo Sapiens
  misc_feature (477)..(549): n is a, c, g, or t
  misc_feature (635)..(693): n is a, c, g, or t
  misc_feature (790)..(853): n is a, c, g, or t
ggcacgaggctcagtttacccaaagaaggagcttcccttctttattctctttactgctggattatgttccttcacacgcatgctggccctcctgacacatcagttcccggaacttatgggggtcttcgcaaaagctttcctcagcactttgtttgcccccttaaactttgtcatggagaaagtggagagcatcctcccatccagtctgtggcaccagctaacacggatctgagagaagccctgtcctccactcacctcacccgccgctgccaccatctcctctgtgccaactccttgtggaccgcaagaaagcatgactttgaaaaagggaagccattccgagattttaaaatgttcatggactattccatattaaaagctgtttttgttgtacaaaattcactgatgttcagttctattttattttgccttcagaaaagaagaaagtcaaaaataaaacttttgtgtattacagcnnnnnnnnnnnnnnnnnnnnnnnnnnnnnnnnnnnnnnnnnnnnnnnnnnnnnnnnnnnnnnnnnnnnnnnnngggggggcgcccccacaaacataaaacccaagagaggagcacaccaaaagaaaagacaacacagtaacaacaacaacagggagcgnnnnnnnnnnnnnnnnnnnnnnnnnnnnnnnnnnnnnnnnnnnnnnnnnnnnnnnnnnngaggaggaggaaaacaagcacgcacgaacgacacaaaaaggagagaagaacaagcacaaagacaagggaagacgcaacaaacaacgagaggacacannnnnnnnnnnnnnnnnnnnnnnnnnnnnnnnnnnnnnnnnnnnnnnnnnnnnnnnnnnnnnnngaagcatacaaaaggccgcacacacacgacgaagaaacgacaaagaagcgaacaaaagacagaa

SEQ ID NO: 90266 - DNA, 442 bp, Homo Sapiens
tttcgaaaagtgccttcccacgtacaatgcaaaagattcaaagccccttccactctcttccagtgtgcaagatgaaagaatgcatatgctattgcttcactgtctcctctcttcaggatatgttctgggggtaggattaagcttttcatttctagtaggtaacttctctgcttgtcctggtggtaggcagtggagatgactccaacagcccagctccaattggtagaagtaccccaagcagctacaagctgcagaatccctgaagacaatagctgcagccagaacatgctagagcctcccctcaaatctggaggcctgaagggacactgagggtcctcaaggccaaggcattgaggtgccactgttatactctctggttgtccttcttcaggctagggtggcccaagaagcacctgttaatgcatgtttctaggcagcctct

SEQ ID NO: 90267 - DNA, 1108 bp, Homo Sapiens
gctatttggtgaactatagaacagtgtgttcaaaaaagcaggctggtacccggtcccggaattcccgggatatcgtcgacccacgcgtcgcaacatcatggatcccagtatgaagcccaacatagacgagacaccaatgtcttggtgtacatcaaaagaaggctagcaatgtgtgccagaagactcgggaggaccaggaagcagtgaaaatgatgagagatttaatgaaggagttcccccttctgagtatgttcaatatccatgaaaaccttttagaagcccttctggaactacaagcatatgctgatgttcaggcagtcttagcaaagtatgatgatataagcttaccaaagtcagcaacaatatgctacacagctgctttgctcaaagcaagagctgtctctgacaaattctctcctgaggctgcatctcggcgggggctgagcacagcagagatgaatgcagtagaggccattcatagagctgtggaattcaatcctcatgtgccaaaatacctactagaaatgaaaagcttaatcctacccccagaacatatcctgaagagaggagacagtgaagcaatagcatatgcattctttcatcttgcacactggaagagagtggaaggggctttgaatcttttgcattgtacgtgggaaggcacttttcggatgatcccttatcccttggaaaaggggcacctattttatccttacccaatctgtacagaaacagcagaccgagagctgcttccatctttccatgaagtctcagtttacccaaagaaggagcttcccttctttattctctttactgctggattatgttccttcacagccatgctggccctcctgacacatcagttcccggaacttatgggggtcttcgcaaaagctatgattgacatcttctgctcggcagagttcagggactggaattgcaagagtattttcatgcttgttgaagatgaactggaaatccctccggcacctcaatctcaacatttccaaaactgaactcatcacccctttagccctcccagctccctgcataccccttcctgtgtgctgttctattgatccatttctagggtgtcctctgaccctca

SEQ ID NO: 90268 - DNA, 476 bp, Homo Sapiens
tttcctaaagcacctgggtgtactttatagagcggaataaaaccagcccaacaggtcagaggtgaatgattcccaatgttcagatcttaacagttaagatacaaggtttctgaaggccaaaagacaatgcagcttccaggcttttggtgtaaacaattaacactgagtacatactatgcccgcaccagggacaaggccaccattagatttcattcataaaagcagtacttgaggtttgccctaaggaaaagttctaggcaaatcattctatagcagcttcgccttagagctctgggacgcttgaaggaatggttcttcacctcttgtgtagcaagagataaccactgatgcagaattcattggctagcacattggctaaaacactactgtgtacgcagcgcatcttttatagatgtatgcatgcaccactgtgtgcaacagtgtgctctgacaagtgagcccagtactgccttggg

SEQ ID NO: 90269 - DNA, 452 bp, Homo Sapiens
  misc_feature (203)..(203): n is a, c, g, or t
  misc_feature (213)..(213): n is a, c, g, or t
ccataattggggtgtctttaggctgaaatggagacaacagaaggtgaggtggcttggactcaggtggcattggtaaaggaaatgaaacgcatgcaaatttcacagacaaaagagtagctttgccacctctcattttggctgggctgctctgagatgctgcatcttttatagtgtctaggctctcatcccttaatgacattttncatattctcncatccccccatcccccaccgcctctccagtaaggactttttgacaagctgcacttccctgctttagtaattggtgataagatttgtcctgtagaacatatacatagaggattgttcactctcctccttttatgaaataatttttagaaattgagctgttaaaggttgtgtttgcacatgttttttggaacaagaactttaattaaaggatcaaaaagcccaagctattgcttttgaaaa

SEQ ID NO: 90270 - DNA, 400 bp, Homo Sapiens
ctgagattcctgcaggtagacaccaaggatctcctcagagccagcgctgatctcatccacagagggatcacatgacctcatctgggaaaatataaaccccctacccacctgcctgcccatttggaaatgcagactggaggacgctaagttcattcttacctatgtactaacaagtacacaagaagatgctcaatatcattagtccttggggaaatgcaaattagattataatgagattccagtgtacacccactagaaggctattaaaaaggacaataccaactgttggcaacaatgtggagaaatggaacccctcctacgtttctgatgagaatgtaaaatggtgcagatactttggaaaacagtttggcaatttattaaaagattaaaaaagcataaa

SEQ ID NO: 90271 - DNA, 567 bp, Homo Sapiens
gcttcgcaaaaacattcaatgaaacgccggtaaaactttccacggtactttgggattgttctggaccaggctgagatggaggcagacaaagagaggataaaggagaggcatcacttcgtggctatgcggggaatcagaatcgatgagaaaattccccagtcgtccaaactgtacttcatattgctggggctctgcctggcaagggactgcagacactatgtcggcacaatgagattctctgtgtaccgtgagattggccgccaactcttcagcagtctgtggcagccgcagtccttgcttcaggggaccgtctgagtccacgtactgccagcgtttgaggtagcaggacactgccatctggatctcctcggtacgcactcatttcatgactgaacatcccaggcggccccggctccccaggcggccccggctccccacgccgccgcctcccggatcgagatgcttccgcctccgtcgtctctgctgcaggtctcgctctgaccgccggctcagctgtgtcctggagccccgcgccccgccgcccacgccaccgctctgggcggccgc

SEQ ID NO: 90272 - DNA, 579 bp, Homo Sapiens
ctgctcaatgacgcccttctggctagctttctgcagaaacattccatgaaagcggctgtaaaaactttccactgtactttttggactgttctggaccaggctgagatggaggcagacaaagagaggataaaggagaggcatcacttcgtggctatgcggggaatcagaatcgatgagaaaattccgcagtcgtccaaactgtacttcatattgctggggctctgcctggcaagggactgcagacactatgtcggcacaatgagattctctgtgtaccgtgagattggccgccaactcttcagcagtctgtggcagccgcagtccttgcttcaggggaccgtctgagtccacgtactgccagcgtttgaggtagcaggacactgccatctggatctcctcggtacgcactcatttcatgactgaacatcccaggcggccccggctccccacgccgccgcctcccggatcgagatgcttccgcctccgtcgtctctgctgcaggtctcgctctgaccgccggctcagctgtgtcctggagccccgcgccccgccgccctcgccgccgctctgggcggccgc

SEQ ID NO: 90273 - DNA, 413 bp, Homo Sapiens
gcggccgcacagattccccgcctgataccgtcccaggatcccaggggaaacctgacggccaggttccctcgtgccagctgctgggaggcgggagggagtgccctgaaactctaatctcattgcctggccagaaaaggaagtaatccctagtgtcagcagattcagcggtactggtgtataataggatcaccaatatacaacaggaaaaaacaaaagtgaaagattatcaatatagattattgagtaggagtaaagaaggtaaatcaaaaaggggaaaagagattacagacacagaaaatgtcagacaacaaagaaaggaagagtcaaggatttcctaaagaagaatgaacttcatgagcttgaaaaagaaatagcagctatctctgcagaaactaaagaaacagaaagacaaa

SEQ ID NO: 90274 - DNA, 1327 bp, Homo Sapiens
  misc_feature (86)..(127): n is a, c, g, or t
  misc_feature (131)..(412): n is a, c, g, or t
  misc_feature (417)..(435): n is a, c, g, or t
  misc_feature (951)..(1003): n is a, c, g, or t
ctggaccggtccggattctcgggatatcgtcgaccacgcgtccggtgaagcttttggcttctacaactccagaagaagatcttggnnnnnnnnnnnnnnnnnnnnnnnnnnnnnnnnnnnnnnnnnntgannnnnnnnnnnnnnnnnnnnnnnnnnnnnnnnnnnnnnnnnnnnnnnnnnnnnnnnnnnnnnnnnnnnnnnnnnnnnnnnnnnnnnnnnnnnnnnnnnnnnnnnnnnnnnnnnnnnnnnnnnnnnnnnnnnnnnnnnnnnnnnnnnnnnnnnnnnnnnnnnnnnnnnnnnnnnnnnnnnnnnnnnnnnnnnnnnnnnnnnnnnnnnnnnnnnnnnnnnnnnnnnnnnnnnnnnnnnnnnnnnnnnnnnnnnnnnnnnnnnnnnnnnnnnnnnnnnnnnnnnncccgnnnnnnnnnnnnnnnnnnntacatccttgagaaacttttttattgctaatggtgaagaggctgttaaatagaaaaatatactacatgcacagaagaacatgggggacatatatatatgtatatattcgaataagactccaaaaagtagaaatttaaaaagtgctatacattgcatcaggttctaaaatcccaaaccccaaacagcctggaacatgttactctgatttcatggcgttgtaaaataacagagctgggaagaatattcaagatgacctgatttaacacctttcattctgttggggggcctttgatttcctatatccagaagttgagagacttactcaagattgtaccatgcaagctggcaactaaaacccaaatccttggaccactttgttgaatgcagtttttctagattgtaaattaaaaatcatatctccacaacggggtctggaattctgggggattgcccttctaatccagtttacaagtgaacagaaaacctgttatgctgctttgtagtcttaccttagannnnnnnnnnnnnnnnnnnnnnnnnnnnnnnnnnnnnnnnnnnnnnnnnnnnnactatatttaccattttgttgaaaaagtaaagaaaaatcatgacttgtaattaaatgtgaattataatttttgagaagtcactgaattttcatcttcctctaataacttaaataatcagcaaattcagtagtttttatgaatctccaaagatccttaaaagaagaaagaggacttggaagctattttcagtatttgtaaaagcttgtcagaaattacatctatattaaagtttcaaaagctaataatatatttttacatcttcaggtcaagttatagtaatttattaaagaaaataaaattaatttcctttgctgatcaggaaa

SEQ ID NO: 90275 - DNA, 428 bp, Homo Sapiens
caggtggaactgattgctctcttccaatgatctgggctcagaagacaaacacacctgctgatgtcttcattgtattcactgataatgagacctttgctggaggtgtccatcctgctattgctctgagggagtatcgaaagaaaatggatattccagctaaattgattgtttgtggaatgacatcaaatggtttcaccattgcagacccagatgatagaggcatgttggatatgtgcggctttgatactggagctctggatgtaattcgaaatttcacattagatatgatttaaccataagcagcagcacgatccagagatccattgccatcagtgatctcactaaaaatatacagctacttcccagctaatctccacccaatgaatgatgatggtatagtatgtgcataatggaaagttaccttactg

SEQ ID NO: 90276 - DNA, 1025 bp, Homo Sapiens
  misc_feature (41)..(83): n is a, c, g, or t
  misc_feature (87)..(121): n is a, c, g, or t
  misc_feature (368)..(379): n is a, c, g, or t
aaagaaacttataatcactatagggcgctagctcctttgtnnnnnnnnnnnnnnnnnnnnnnnnnnnnnnnnnnnnnnnnnnnccgnnnnnnnnnnnnnnnnnnnnnnnnnnnnnnnnnnncagtcgacggtaccggacatatgcccgggaattcggccattacggccggggtgcggctttgatactggagctctggatgtaattcgaaatttcacattagatatgatttaaccataagcagcagcacgatccagagatccattgccatcagtgatctcactaaaaatatacagctacttcccagctaatctccacccaatgaatgatgatggtatagtatgtgcataatggaaagttaccttactgnnnnnnnnnnnngaaggaacaattaagatgggcccaaaggtctatctactaaactagctctgggggaaatagcttcaggatactgtagttcctctatctaatagacgaacttttggttaaccagacactgtaaacatagtttggcttggtggaatacttccttgtgttccctaaaagaggtacgagcaaacaagtgtacattccaccatcagtgtcaccttgagcaagtgcttaagcgtttacttacagtgttcttcattggggcaaaggcacagcttgcgatcaatgtccaaatactctgaaatgcacttagaccatatacctgtgcatgacactatgaacatcatctgtaaaccttttataccaagggggtaaacaacgacagacacgcataggggactttggacctcaaattatgcaatgtagattttaacacaattccccttttcccaggaagtgttagactttaaagaaatacagcaccaaaatttaaaaccgggggttcgcatataaatcccggttggcaacaccacgaattcttgtacaataaaccggcaagtggatccatatatgtggcactcggggcgcacaattttcggtgtccgccaatatatagcaggaggacaccactattgggcaacgcccccgttaagagaat

SEQ ID NO: 90277 - DNA, 401 bp, Homo Sapiens
tcgtttttagaactattcatgatataggaaaatacattcataactgaaagctttttttgggttattctttgtaacattacatgccgcttttcaccaatgaaaagaatcctcaagaacctggaaaaagcaattcctttttgcagttaaaatgaagataaagagccttgaaaaatggcgtgatgctaatagttcatggagattaataagtgatatgtgaaaggcgagactgtcctgtagttgcaaaatgttacatagtttgtacaccttgtcagcgttgtgataacatgaagtcatagtttaattggtaaacaagaaaagcttccaataaagtgtcccatggatgatcttttcctttgagactccagcctgggtgacagaacaagactccgtctcaaaaaaaa

SEQ ID NO: 90278 - DNA, 775 bp, Homo Sapiens
caagaactacaacaaaaaataattgaagttattcatcctgaaagagaaagcaatcaagaagatgttctagtaagagaaaagtttaaaagaagcatgcagagaaatggtgtggatgacacacttggcaaaggcactgctccctacacgaaaggccccctcagacaaagaagacattactcattcacagaagcaactgaaaacctgcatcatgggcttcctgcttcaggggggccagccaatgccggcaacatgaggtacagtcatagtacaggcaagcatctcagtaacagagaggaaatggagctagagcattctgacagtgggtatgagccctcatttggtaagtcttccagaataaaagtgaaggatacaactttcagagataagaaaagcagtctcatggaagaactctttggatcaggctatgtcttgaaaactgaccaatcaagtcctggtgttgcaaaaggctcagaggagcctttgcaaagtaaggagtcgcatcccctgcctcccagtcaggcctccaccagccatgctttcggagactctaaagtaactgtggtaaattctattaagccatcgtcacctacagaaggaaaaagaaaaataattatttaaatataatcaatatcctaatgcattctggtttgatataatgctgcttatgtgccttgcatcttatttttgaaatgtgtgagagagggagtgtatgtatgtgtgtgttttagtacttaattgactttcgataattaaatttttgtttgattgctaaaaa

SEQ ID NO: 90279 - DNA, 639 bp, Homo Sapiens
gaaggttaatccttcagttatggaggtgggatgaatagagcttgtttgatgttaaagtgggtaaggagggagtggccttgagacacttgtattccaaactctcctggaggtttccagtagcactactgttcctaaaagggtttcatttttaacttcatctgttttgttaacatccagtccaattgaggtgatctcagaggtgcatcaggacatctagcactggggaggccaccttgcccagatagttgaaaagaaaattggtctgggcagcctgttgtcttttgtcttcatgtaatgttttttctttgttttaaaggactaatgtttattacagtgttaaataaaagtgtaagatactaagtgtgtagaataaaagtgcaataacaaaagacaatgactttggcacacacttcagtctttatcctctctcctttcttgtgctacctggctctttccataatattgttacagcaggaccgtcttaattgtgtgcattttgaagagatgcgactctgggttaatcttcattagtgtaatattgaagggttgggtttggttttatagagtattctgtatacttgttgggatacacaaataccagatgtgctgtataataaagatcacattaacgtttaaaaa

SEQ ID NO: 90280 - DNA, 391 bp, Homo Sapiens
aagaaaatgttaaaagctacacctcctatttcttagttagtctatccccgtgggggggctctgcatatccaagccggctttgatttctcctctgccatgttattagtaacatctgatcaattacttgtgtctctcccatccttgcccttcactctatttccccttatcggtctcacctggtttaatcacagcactctccaaacttgcctcttctcctgcccatcatccaaaaggaccttcctaaaacagacctggtcccattatcccctgaatgaaattttttcatgtaaagtttattatatcataatgcaaataccctttaatcaagcaattccacttctatgaatttatagatacatgcacaaaatgatgtacatacaaaggtattcac

SEQ ID NO: 90281 - DNA, 384 bp, Homo Sapiens
gcaatagaaaaagagtttaattcatgcagagccagaacgagagaccagagttaactactcaaatcattctcccggaaaatttagggatgggagtttttttaaggataatttggcaggtagggggccagggagtggggcgtgttgacaggtcgtatcaaaaatgaaggcatagggagttgaagctgtcttcttgctctgagttggttcctggatgggggccacaaaatcaaatgagccagtttattgatctgggtggcaccagcggatccatcagtgcagggtcttataggttgtatatatctgaactggtcgactaaagatgcaaagcgaagtgctccagtgagtgtggtacaggttgttgagatgaaggagagatggcaatca

SEQ ID NO: 90282 - DNA, 500 bp, Homo Sapiens
acaaggctgagttcctggacctgggctatgtgagtctcctctgctcatgcagatgccccctccccaccaggagcccaccctgcagaccaaagccaccaactcaggggtgggcagcctgtcacctggagcctggaccagggatctcggggctgacccatccccaactccatcatctgcaaacctgttagggtcactgttacaaggacagtgaagccaggaagggggcatgagcctacagtcccccgtggggcggagtgaccactggagtccagccgccccctctcctgtggatttggggatgggatgggggtttgtccgggtgagtcccagaagagggctggcgatgctaagggacaccaagtcaagtgccaaagacagacgtgctccgcctccatctcccctcttcctgccccctggctgccacacctccaccggcctgaggccctcctcactgccacaggagctgatggagaggctgcagggcatcgtcacgcggccgc

SEQ ID NO: 90283 - DNA, 909 bp, Homo Sapiens
ctcttagtatattaggacctgcagagcaaggcataatagtagtagtaaagataggcaacttcatcttgttcctcagtctaatagaaaggtgtctagtattttcctactaactactacaatgatttagtttgtcatcagatacaaccttatggcattaagggcaatccattctaaggtggcgatgagtcccccacttttataaggaatgaggactggcttttatcaaatactttttgttcatctatagagatcaaatggttttctccttaaaatggtgcctggcaattaggcaactgcttgtttttacaattattacaatatcttaataacgatcttttcaaaaagttttcctatgctgacctttctttgtattctagggataaatcctttttgaacacagtgcattattctttcaatacactactgaatatgacttgctaatattgagatttatgctttcagtgtattagaatctaaggagcaaggcagaatgatgaataaccttaagctttctttctcttttgtattttccttgctcagttttagcaaaaaaattatgctagcctcagatatttcctgagagcagtatgtctattttgccttctgagttcaaagttcgctaaacagccttcaattttaacttgctaattgtgttattcaaatttcctatatcccccttttcaactcaggttagtcaataaatttgtaaggaatttccatgattctcgagttgtctactttcccttgtactttcattttcctttctatattgtgaagttatgtccctaatgattgctataaattattgatgaatatcaaatactactgttaagttttctatttaaattctgacattaatagtgctattgtctgtagtttttaaatttcagactcattctcataaaatta

SEQ ID NO: 90284 - DNA, 734 bp, Homo Sapiens
ggaaattgaagtctaagatgtcaaactattgatgcacaaacttaatcaaggtataccaagacctctggcttcttcccagaaagctgctaaatatcagcaaggacatggctagagatcttgattctcgctttttttgatgtttctatgaaagaaccaagagagatttcttcagcagacagtgtttccaatgagtgaattttctttaataactccaaattcttcagggaaaacttccacccacacagcagtgatgactgctggtgctctgagggaattacggcacatagtaataaaagatgtatagaatttctacatcagcaacgtgaagtccagcccagcaccctagtatggagaacagatggagttccagaaggtagaagcccataccggaactgggggcagtggaggggatgccatgtggaaaattggttgccaaactgaggcctcagaaatgaatgtgaaataaaccttctccttcacaaatattgtagagagagtagagcctatgaagttggaggaggttgccacacggattatactcagtagacacaaagcatctcaacttactacaggaaaaccacctttaatgaaagcaaccacagttcccacattcatctctccccttcttttcttgggtgctttcattaattgcaagtaaactttcaaagtcagagaactatcagccgtatagccacctaacgaaataagacaacaaataaatgtgaattcatttt

SEQ ID NO: 90285 - DNA, 696 bp, Homo Sapiens
ggccgcgcacgaaacgggtccactggcggtcagcgtgcacccagctgggcgaggcgtaccagtgccgtggccgccgtcagcgccaccagcagccaccgcgcccaggctccgagccgcagcacgcgccagcgcccttccctgtgccaagtacgggcctcggccacggcgaagtgcacggcgaacagcagcaggcacaccgaggtgagcagaggcagcgagaggcccgcgctgaggcggcgcagcgcaaaggggcggacgctgagggcggccagggcgcggccggccgccgggaactcgaggcgcagcgtgacggcggcgtgcagccccacggccgggctgtagcgcgtgagctccaggaacacagcgcggctcctgttgtccagccagttgtgcagctgcaggaagcgcagccggtcgcggctctcctccaggctcaggcccagctcctgcacgtagcccccgctgtcatacacggcacaggagccccaggaccatgcccccagcagatccggcgctgaataggcccacgtccccgagccattgtgaggactctcccagccaacgtcgtaatcgctggtgctgaagcctcctgcggccgagcacgtgtggaccctggggccgggagggtctgggtagagtgcttccggcagccgcacctgccgccctcgtgccgagatcgccacccaggcctcgcta

SEQ ID NO: 90286 - DNA, 541 bp, Homo Sapiens
  misc_feature (179)..(195): n is a, c, g, or t
  misc_feature (480)..(490): n is a, c, g, or t
aaagaaatatgttttgatgtgctagcataactgctctagcttcttgtgtaccatagtactgtggcttcagatttagtacctatgaacagatgtacaagacatttattacactttttaccaaagggagttaccattgtagtacttttgtgtaaaacttgtcttcccctttgcccccaacnnnnnnnnnnnnnnnnngtaaataaataaagcttggttcttacttaaggaataaactctcaacccacgtcccttgtcctcaccagaaaatactgtgaagcagggattttgacttcagttccttatccagggtagaaacaggattttgcttaaaatacttgttacttgtcccaaatcaaaatattccaaaatcttagaatacttaagtcttttagtacgtgtttttttcccttgttcaaataatctgaaaatattttatatttgggtaagttgtcaagctatgtagtttgtatttctatatannnnnnnnnnncacattggtgatggatgggggtgagcaacttaaataccaaaccagtgtttg

SEQ ID NO: 90287 - DNA, 365 bp, Homo Sapiens
tgagtatactctgcagagctctgcttcccacaaatgtcaggagaacaaaggccatgaaggtgttaaagggaagcaagcgattgacagcattggttggtgacaaacctgtggctggtctgtgtatgatgggatggattcctcctgctcccagaaggcactgtactttcagtgttcagggcagccttgccttagtgcctcaaacctatccctacatcctgcagtaaacttggaaaggtaacacctctaaccatcaggccttcctctgaagcacagtcaagttgctcttggcaaccatctcaattttaatagtgcagatgccatgtgctgtaaagtcctaaaatttaaattctttatttcttgacaaa

SEQ ID NO: 90288 - DNA, 497 bp, Homo Sapiens
acttcagttcagatggcctacttgagttgctgaagtatcattgcggaggtgactggactaaaatagctagtccgtacatatagttctaaaaagtcttcttggattagaaagtagtgtttctaatttttgttgttccaaaagacagagctttgggaaagtccatctggttatgcaattcccaagtaaaatttgacacatatatttggacaatgtgaaaaaagttcttcaggaaacactaatgtttaatgagctataactggccctggtaaacaaacatactattcttttttcatcttatagggaataattatgaaggcatatgaggatggtagcatctactactcacatctgccttacttgccactgttttctattgcctgaatttacccaaccctcatagttgctgatatatttttacactttctacgtatttgcagccaagaaagtcactaaaagggacaccccaaaaatagttccacactacagcatgaaaaaat

SEQ ID NO: 90289 - DNA, 378 bp, Homo Sapiens
cagtgaactatttccacctggtaagaagggtgcacttgagaatggggttcaagtactctaggaacatagatgtaagttctggatgcacagtagttgttgcttagctgtaagctggaaatttcaaggcagaaacagcagataccacaactataactgggtctccttgttttttgttttatgtgtatacgtgagattatggggaaagacaaaagtaatgcatagagatttattttttaacattcaattcataagcagtgtttatacctctttgtacttacttgaaaagtgtatattatgtaaatttagtataaaaacacttggactaattcataccatgtggtaaaatttcacattcaaaagaaatacccttctgttatt

SEQ ID NO: 90290 - DNA, 584 bp, Homo Sapiens
tgcagcttcagcacccaccgtggtacctggctcgctgtggtgttccgcacatgttgttaaatttaaattgttaaatgattggatgagcctgacgtgagatgaggacctgcccagagtcatccagctgctcatccacagagcctgggctgtcctgccacgaagcccttgccagtcactatgccttcttgacttcccatggcaccatgactgtcacactgcactgtggcacagtgtacctccaccttcctccttctgcttctgtttttgggagttcagtcaaagctgacatgttgcccaagactagaggggagagtgtcgaggccggagaggatggcaaggtcctgggtgtggaggttgcttcctgcccctcctccccccccaccacaggggcctggagaagactgacagcagcaatcacagtcacattccacagcctctccagcacccagccagctctccgcgggggcagcagggactggtccacccaacaacagcagccatgtcctcacctcttgtacagcagcaactttatttgatttgatgtatatgaagaaataaaactcagaagtcaattgacttaaaaa

SEQ ID NO: 90291 - DNA, 383 bp, Homo Sapiens
ttcacctcatgagacatataaatcaagtaacattcgttattgtgattagaaaagctgcatttacacacgttagccactagatggggacgtgcgattgttacaatgctgaaggtttcccgtatttctttattttttatttggccgctagagggcacgcctgcactgcacttaaagttgactactttcaaggaaagacaaaggaattcttggatttctccattttcctcatcacctgtgcttatcagagaattccaggggcaagctaccctttccaattcatcactaacttataaacaaaattctaaggagtaaggaatgcttcttaattacttcctataacatacgtaagaatgaacgctcaaaataaaagtaatttatttaaa

SEQ ID NO: 90292 - DNA, 350 bp, Homo Sapiens
cccaaaaggttccggcaaccaatttttttcccctagatttaacatcagaactcattctgtggcaaacctgacctgaaatgacacgaggctacttaacagtctttatctcatttatagtaatgttgattagtctgctgttccagactcaactggggggcatatggtgcatacatttgagttattttttagaaatccaaaatattctgatttatgaaccccagctaaccccaaaggtgtgtatgatcaaagattttggacttgtattaaatgtacacacatatatacacactatatggtatgtgtatcgtctattctgtgccactgattaaatcattataactttaaaaaaa

SEQ ID NO: 90293 - DNA, 564 bp, Homo Sapiens
  misc_feature (16)..(16): n is a, c, g, or t
  misc_feature (353)..(507): n is a, c, g, or t
acagatgcccatttanacatcatccttgtcttgtgaagaaaacaggaagaatgtcatgtaccatgtggatcaccttcagttcaaagttgcagcaaagtgaagaaagaaactactggaagccacccagcaatgcactgtttagtcatcaattaggagcccatgggaggataatagggagactgggtggaggctcagtgtgtaataatctcttgtctaatgtatgtgtgtcactgccatgttgtatgaacaatagtgagggctcacatttacttaacacttgtgtgcgcaaatctgggtttttcttcctttccagaactatgactcgatcataaaatctgttttgtttgcatgcnnnnnnnnnnnnnnnnnnnnnnnnnnnnnnnnnnnnnnnnnnnnnnnnnnnnnnnnnnnnnnnnnnnnnnnnnnnnnnnnnnnnnnnnnnnnnnnnnnnnnnnnnnnnnnnnnnnnnnnnnnnnnnnnnnnnnnnnnnnnnnnnnnnnnnnnnnntgtaaccatgatgttatattttttttcctctttaaaaacaaaatttaaaaccttaaa

SEQ ID NO: 90294 - DNA, 551 bp, Homo Sapiens
ataaagaaagtcaccagaacttggaaaatagtaggtggagtcacacatgctaatagctattacaaaaatggctggatagtcatgatagctattggatgggccccaggtgcaggtggtaccattataacgaattttgagaggttggtaaaaggagattggaaaccagaaggtgatgaatggctgaagatgtcataccctgccaaggtaaccctgctggggtcagttatcttcacattccagcacacccagcatctggcaatatcaaagcataatcttatgttcctttataccatctttattgtggccacaaagataaccatgatgactacacagacttctactatgacatttgctccttttgaggatacattgagttggatgctatttggctggcagcagccgttttcatcatgtgagaagaaaagtgaagcaaagtcaccttccaatggcgttgggtcattggcctcaaagccggtagatgttgcctcagataatgttaaaaagaaacatactaagaagaatgaataaatttacgtgatgagctctaaaaa

SEQ ID NO: 90295 - DNA, 562 bp, Homo Sapiens
tttctcctcatccttccattggctccccacggcccccaaggaaactcctgacctctaccgtgcaattcacgggagctgcccgggcacggaaagcaaaatcagcttggagaaacacttctcaagcctgcaagacccggtggcacgttcattcttgcattgattggttcgtaccctgtgtactgagcgcttagccctgtactccggctccttttgaggccctgtacttaagctcaatagtaccaacaacagctgagagtttgcggtctagtggggaaggaaaatgcagaaccaaccaactaggtgtgatactatgtggttaagtgacatgcagaagacgtccccagaacagcataaaaggaacatttggttaggcctggggtcagcttcacagaggtaacaacggacggtgaacagctcaagcaaaggtccaacagcatgatccaagcctttgtcaatgttttgtaatctcgtttacttgcctgtaattcaagagggaaccatgtcttcttaaaccctgaagccacaattggcaggcctcaaggatatttgcagaatgaaaaaa

SEQ ID NO: 90296 - DNA, 592 bp, Homo Sapiens
ttgtctgttgtcaaggaacagcccagacacaaaatgcctggaggtaggctcaacttcaacttgatcagaagtgctgcgtgccacagggaaccctggcaatctcacaggtcaggcgagctcagtggagccagggagcagaacttggccttaacaagcgctacgacaggagagtccttcaactttgccctcgggctttacagaacccacccactctcctctgggaactgaccctcaatgggggtcccctcgtcaggagcaagcccagcgagcctccccctggagacaggacctctcaattgcagagctgatgtcagtaaatcgtggccatagctgagtgaactggtgaaatcaagccaacctggacacatacgttcctcgttcttcttagaggccatttgcatgtagcagaaagggcacctaggtcaagtgcaactagagcaggagcatcctatgcctttgacaaagattgcagtggcccctcgagtgcaaaggtcatcccaggtgttgctgagtttattgagcacacctagcctgcttgcttactgcttatatttgctcagggaagagtaggaaaataaaatatatgcaaatc

SEQ ID NO: 90297 - DNA, 330 bp, Homo Sapiens
aaccagtctgactccaataattctcaattgtaaaactttggaacagttcagagtcaagttcataaaaattatgtcataaaactggggcattaagaaggctgactgttgaaaggaaagtaggtatgcacaaagcctttattatgtatttgactcaaatttgtgatgtgttgggtattgggtaaggcatgattcgtcttctggctataccacagttcagtaaaaatttgcacataatacatttgtattttttatcatgtgattcaccattaaaaatattacaatgtaccccacactggatttttcaaaatgtgaataaatttagacaactta

SEQ ID NO: 90298 - DNA, 524 bp, Homo Sapiens
tgggagtctggaatcttctctttcacacttgatgaaattccccatcatgaatcttcaattaagtgacttctatacagaagacaccaaagagcaatcagatgtcaccacatctgagagaaccagaagtcctccaggttcttccaaaaccactgatagacaccttgaaaaaactgcaggatgtactaaaaactgaggattccaaaaatcccacaaagtcagcagcagatttgttggaacaaattgtcaaggctatgggaccaatcttagagatcctccaaaaagcgataaagactatggaaatgaatatttctgtgtttaagaaagccagtgacaagtagggatgcaacagaaatgttcatttctgtcagaaaactacttaaaatcttatggtttttcatagtagtttctaagatcttttggtgccaaacatgtgctatgttagaacataagtacacaaaagtcatctggcaaaacatttacctgtagttttgctttattaaaataaaaagaaataattaagaaaa

SEQ ID NO: 90299 - DNA, 506 bp, Homo Sapiens
tcatttgtgtggagtcatttctgatttcaggggagatccttgtgtttatcagaaagggcagaagtaggggaagaataatttggtatccttatctagtgtttgattgtcaatgctggagaaaaatatctgtaagagtgtttatacagtacacttcagttatcttgatgatctccctttcctatatgatgatttgcttaaatatccatattaagtaagtctcaaggtagggtaggcagcctgagagtctagaggcctttagttataaaggaatctagccagtgaacataattcttattactagactgccacaaggaagaaattaacttaccctgtatatcagggtacaaaaaattcagtgatgtgcctaaataagttataaagatttaggccaatcagaagctaacagcagtttcaggtagaggtgcatgcctaatgttagttagtgtagattccatttactgcattcttctgatcactgaaataaaagctatataagattcaaaaaa

SEQ ID NO: 90300 - DNA, 495 bp, Homo Sapiens
ccaccagctctggggtttagagggaaagatggaggtctcagtgctgaaggctaggctgacagctgagcagggctccagctcaccttaatctcactcctgtggatgcctgcactaggggcctgagcattctcccagatctctgcataggaggctgcccttaggcattattaaggtgtgaaagcagcaagaaagagcagaattaaactgcttttctctaatgtatccttttacagcccagtgtattttgccctaggctagccttttcttctcctttcaccctccacatgccagtccgagacagcctttcttctcacaggaattattgtattatttcttaaattctttttttcttctccatggcttttctagaggaaacctaacagtgtgggtttatcaaccattttgacaagactctgaattccactgaacagatttttgaataaaaattatgaacaaagaaagtgtagtaaatctgctaatagaaaaactgaaaaa

SEQ ID NO: 90301 - DNA, 375 bp, Homo Sapiens
catatataatcttaatatactagagatgtggcgataagacttggcttcatcttcctacttcataacatcttagtgccaaaataataaacgctgcatattgcaaaatagccacctgatttcaatcatgggaatgtcttggcacactgctggcaatggaaacatttcatggtgagaaaattaagctgaggcaagtgcattagttttctaatgctaaaataaaatcgacaagtagaagcaaaataaggggaaaaaaagcagcaacaccttctgcagcctttaaatatttttctctctgctttacagagagatgctacctcattcaccttgatttcgacccacgagatctcgaacgttctctggaactggaacgagatc

SEQ ID NO: 90302 - DNA, 1467 bp, Homo Sapiens
aaggcagtaactcataacggtttaaggtagcgaggctgggtggcgaattcggcacgagggactcttgcacagagaccagctcgagccccaggacaaggccatcaccccgccactgccagaaagtactgtgcccttcagcaatggggtgctgaagggggagttgtcagacttgggggctgaggatggatggaccatggatgcggaagcagatcattcaggaggttctgacaggaacagcatggattccgtggatagctgttgcagtctcaagaagactgagagcttccaaaatgcccaggcaggctccaaccctaagaaggtcgacctcatcatctgggagatcgaggtgccaaagcacttagtcggtcggctaattggcaagcaggggcgctatgtgagttttctgaagcaaacatctggtgccaagatctacatttcaaccctgccttacacccagagcgtccagatctgccacatagaaggctctcaacatcatgtagacaaagcgctgaacttgattgggaagaagttcaaagagctgaacctcaccaatatctacgctcccccattgccttcactggcactgacttctctgccgatgacatcctggctcatgctgcctgatggcatcaccgtggaggtcattgtggtcaaccaggtcaatgccgggcacctgttcgtgcagcagcacacacaccctaccttccacgcgctgcgcagactcgaccagcagatgtacctcttgtaactctcagcctggaatccccaccttgcccaccccagtggaaataacggtcatctgtgccgcccctggtgcggacggggcctggtggcgagccaaagtggttgcctcctacgaggagaccaacgaagtggagattcgatacgtggactacggcggatataagagggtgaaagtagacgtgctccggcaaatcaggtctgactttgtcaccctgccgtttcagggagcagaagtccttctggacagtgtgatgcccctgtcagacgatgaccagttttcaccggaagcagatgccgccatgagcgagatgacggggaatacagcactgcttgctcaggtgacaagttacagtccaactggtcttcctctgattcagctgtggagtgtggttggagatgaagtggtgttgataaaccggtccctggtggagcgaggccttgcccagtgggtagacagctactacacaagcctttgacccccatgctgcttcctgagagtctttttttgcactgttgaaattgggcttggcactcaagtcaaagatgaacatcggaataacaaacattgtcctctccagaaagtcctttctttctccatactgtagtcctattgagaagacatttcgtctctgagaaaaaaggatggaactatgggttctcttcgcaaagccaaaggatagtgtttaacaagccagctggcttatcctggttctcagctgttta

SEQ ID NO: 90303 - DNA, 499 bp, Homo Sapiens
tctgttggctttcaagctgaagggcagagaaacagtccccgaggggccctcaatcaggaggtgattctgctccgcgtgacacttggggctgtcagggcggctctcggggttgcctccgtttttctggacagcgtatcccccttcctccacggacactatctcagggctctcaggggtgaagcagcccttactctttgccacatctggggaactcctctggtcagtgtctttgtcactgaagacctctgtattgtctgccgacttgccgtctccaagtcgttcttcagtcaaatctggaaaacagaacagctgagttaatcttttcctggtgtgcataaagaggagcagatgtgctcagaagagacctgtacacgtgctttttggaagagcaaatgcatctcaatgggtcataatatactacaagcctttttaaaaaaattcgaactatatcactggcaaatgaaacaaaaaccctgtaaataaagatctagaaatcaaa

SEQ ID NO: 90304 - DNA, 374 bp, Homo Sapiens
ctgctgggccttaacattgcagaaattgtttagaatgacataattgagaggagattttcagaaacatacttattaattttcatgagaaaatcagattgaatatcaccaactagtcagtaacaatttcaaatgaataatttcataggtgaacacacaggtcatgataaaaacaattagaataaaaggagtctgtatgattccatggaaccaaagtttaaaaacacagttttctattgcttgagataaatccagtaaatccgaatgtgaccttgacttgtcaggtcaagacaccaattaatgtttgctccccttcactccgacccatgcctccaggcaagaaagcaattaagcttttgttaaaaatcaattatctc

SEQ ID NO: 90305 - DNA, 623 bp, Homo Sapiens
  misc_feature (13)..(13): n is a, c, g, or t
  misc_feature (280)..(508): n is a, c, g, or t
aaaagccttttcntggggtttacctaaagatacttgaggtctggggcttaccctcacaacccccatctaaacttttatcactgtgcctataccagttgtgaaacaataaagatgtttctggatttttgtgcttagtccctagcaacagctttcaaaaatcttgggttttcctgataggagtgtctttgtattcataacaggcccttttcacccatccctgggtttatgctaacaaggttacccatggtgggcccttagtttcaaggaaggagttgccaannnnnnnnnnnnnnnnnnnnnnnnnnnnnnnnnnnnnnnnnnnnnnnnnnnnnnnnnnnnnnnnnnnnnnnnnnnnnnnnnnnnnnnnnnnnnnnnnnnnnnnnnnnnnnnnnnnnnnnnnnnnnnnnnnnnnnnnnnnnnnnnnnnnnnnnnnnnnnnnnnnnnnnnnnnnnnnnnnnnnnnnnnnnnnnnnnnnnnnnnnnnnnnnnnnnnnnnnnnnnnnnnnnnnttccacagggacaaaggctcctgagctctgggcccttccagtgcttgccaccctacatactctttgtctggctcttcatttgtattctttataataaaatggtgattgtaagtag

SEQ ID NO: 90306 - DNA, 729 bp, Homo Sapiens
accactcagtacagccgcggcccccaaggtcctgactcttcttgtgggagggcgaggtcagcctgagtccctcctcttcctggagggatgcccaccgtgcccttctgattcccgcctctggtcctttacatgtgcataaccacatgcacacacactcacgcatgagcaaacgtgtacagactggcacatgcctccacatgcgaacacccacttacacacacgccactcacactggcacacatgctgtctacccgtgcacaggcacacgtgctggtctgcacacacctgcacacacctgcacactcgctatgccaggcctcctgggtctgcagtgagtctgggggcccatggggacagggacaggtgaggggcttcctgaggacctggggctgttgggagccgctgtgggccacatcttctgccccttctcagcctccctcaccccagccccttcccctagacccactgctggtcccctttctccctcctgcttctcacctgaagccacctgcccctcctttgtgccctcccttgcttcctcctgggctctgtcccctgctccccctttgtcctccatcccgactccatctcccccaccaggctggtcaccccaggccagcgtctgttgaaggatgaagcagctcctgtccggcccagccctgcctcacagctgtgcgagctctgccctcctcagctctcaaacctgaataaatgcaccaagcccagaaa

SEQ ID NO: 90307 - DNA, 412 bp, Homo Sapiens
acttatgagctaagtgatgatggccgctttgaggtgtggaatgcgatgactcgaggccagcactgtgacacatggtcttatgtgctgataccggcagcccagcctgggcagttcactgtggaccaccgggtgtggacacacgagcaggctggccgtcctcaggatcagcctgctgggcaggagctggttgctgcctcccgggacgctggaccagttcatctgcctgggcagagctcagggcctctcggatgacaacatagtcttcccagatgtgactggctggtcaccccaggccagcgtctgttgaaggatgaagcagatcctgtccggcccagccctgcctcacagctgtgcgagctctgccctcctcagctctcaaacctgaataaatgcaccaagcccagaaaaaata

SEQ ID NO: 90308 - DNA, 457 bp, Homo Sapiens
attcctctcaggtgggacaattgttgagttttttcttaagatagaaaagcaattcagacaatctgaaatctccacaagaaggataagaagcacagcagaagctattctaggcaggaagtcaatccattcaactgtctgtgctccaaacaattgtctgcactgggagtcgtacgaggtacagacaacagccagacctctgatcctctcattagtgatttcagaagaaattaccagtcagctgagtaattcactgagtaaacatttggcactgacagaggttagacggataactatttgtatcaccatattcatgaagctggaatattttccattacttgtatcatatatgaatggaagatgttaaaaggcctctcatcttgtaagatggatatgaaagaacactttctgagaaatgaaattattcacacaccagcgaggtggatggaaaagaaaaaaa

SEQ ID NO: 90309 - DNA, 771 bp, Homo Sapiens
agttcgacggagactctccacttctgtgttatggacattttcagacatgcacagaagtggagaggatggtccttggaccccatgtgtccatcacctagctgcatcacttatcagctatggtcaacctggtttcatctgtatctctctcttttcacctgtattgtttattgaaaatccaagacactatgccaatgcaaccgtgactactttgggagattggtagtctcttttgatggtgatagtgatggggtgcactatcataatcacatcaggtctgctttttgcttttaatgttaactaatgaagttccagagatgggccttagaaatgtgttttaagaattaacaaggagtctcaaaaagaaatgagagggatgcttcctttcccttgcatctacaaaacaagagagagactgttctgttgtaaaactctttcaaaaattctgatatggtaaggtacttgagacccttcaccagaatgtcaatctttttttctgtgtaacatggaaacttgtgtgaccattagcattgttatcagcttgtactggtctcataactctggttttggaagaataatttggaaattgttgctgtgttctgtgaaaataacctccccaaaataattagtaactggttgttctacttggtaatttgacaccctgttaataacgcaattatttctgtgttcttaaacagtataaatagttgtaagtttgcatgcatgatggaaaaataaaaacctgtatctctgttatatttctgattttcaaaa

SEQ ID NO: 90310 - DNA, 1474 bp, Homo Sapiens
ttggtgactatgaacagtggtacaaaaagcaggctggtccggtccggaatcccgggatatcgtcgacccacgcgtgcggcaaggccgcatgctaagatgcctgttaaatggatcgccatagaaagtcttgcagaccgagtctacacaagtaaaagtgatgtgtgggcattggcgtgaccatgtgggaaatagctacgcggggaatgactccctatcctggggtccagaaccatgagatgtatgactatcttctccatggccacaggttgaagcagcccgaagactgcctggatgaactgtatgaaataatgtactcttggctggagaaccgatcccttagaccgccccaccttttcagtattgaggctgcagctagaaaaactcttagaaagtttgcctgacgttcggaaccaagcagacgttatttacgtcaatacacagttgctggagagctctgagggcctggcccaggctccacccttgctccactggacttgaacatcgaccctgactctataattgcctcctgcactccccgcgctgccatcagtgtggtcacagcagaagttcatgacagcaaacctcatgaaggacggtacatcctgtaatgggggcagtgaggaatgggaagatctgacttctgccccctctgctgcagtcacagctgaaaagaacagtgttttaccgggggagagacttgttaggaatggggtctcctggtcccattcgagcatgctgcccttgggaagctcattgcccgatgaacttttgtttgctgacgactcctcagaaggctcagaagtcctgatgtgaggagaggtgcggggagacattccaaaaatcaagccaattcttctgctgtaggagaatccaattgtacctgatgtttttggtattttgtcttccttaccaagtgaactccatggccccaaagcaccagatgaatgttgttaagtaagctgtcattaaaaatacataatatatatttatttaaagagaaaaaatatgtgtatatcatggaaaaagacaaggatattttaataaaacattacttatttcatttcacttatcttgcatatcttaaaattaagcttcagctgctccttgatattaacatttgtacagagttgaagttgttttttcaagttcttttctttttcatgactattaaatgtaaaaatatttgtaaaatgaaatgccatatttgacttggcttctggtcttgatgtatttgataagaatgattcattcaatgtttaaagttgtataactgattaattttctgatatggcttcctaataaaatatgaactaaacggacaaaccaaaccaatcacccacaaaacacacaaaaacgcaccaacagacaacgcaaaaacgacccacagcacgccaccgaccgtcagacacccacagccccacgccgcccggacacaccacaaggaacacggagacaccggcgacgccaacacacg

SEQ ID NO: 90311 - DNA, 387 bp, Homo Sapiens
agcattcctgtttggttatctagacgtaaatgctcaaatggtgtattgataagtgaaatttaaactctaataaaaacattgttcttttatataattttgtggttttaatctgagactaggcaataatgacactttgttttgctcaatttaattctaaaatatagagtatctattcacaggctgcattctgtctatataactctttccctgtgattagaagacaacgaaaatatactttgagttttgtcagcctaggcactggaaattgggagattgcctatcttctcttttcaacatgaagtcaaagcagccacatgaaaaatggaaaaccatgccaagtgcagtgacatgcacctgttgtctcagctactcaagaggctgagcaaa

SEQ ID NO: 90312 - DNA, 437 bp, Homo Sapiens
  misc_feature (366)..(388): n is a, c, g, or t
aaaaaaagaacacaagactgaatactgccaccagcaatatatgcaggaacaatccatttccttaagggacaaaatccactctaagtgttagctttcccctttgcataaggtttggtgtgtgatgtgtgtgcaagttgaggtgaatgtgcatgtatatgaagaaatggcatacctcattgtgattctgaaattgcataaaaataaaatacttaataactgggcaaaacacattcttttttacaaatgtcaataaagacaatttttcttgaaaacagagaaagttaaatgaaaacagtaagaaccaaagaaaggttacagtacattttgaaatgagtaaaaaacatcattttcaaatctaaaatcctnnnnnnnnnnnnnnnnnnnnnnnagttacctcaaaagtttgcagaccaacagcgtggatgacttacaattat

SEQ ID NO: 90313 - DNA, 446 bp, Homo Sapiens
caggtttcattttgggccttgctaaattgattgaattaaatcctccagcttttgaaccttgatatttgtgtatatgatttattttcatttgaatttctcctttcctcttctttgctgtaaggcaaggaggaggggaattttaaaaccatcttatttgaactgagagcatccagagcagttaaccttaaggaaacaatgaaaaactccctttgtatgcctgggcatcatggcagatagaggaagagtgttagaggagaaaactgctgctgagagtattggcaggcttggcctcagtttggactctgtaattttctttggacccaagtctgtaacctctgcgtacttcttctctcttaccttctataaaaatgaggattactgttggtgagggaataaggaatgtaagtaaaggaaatctgaaaaaataaaattaatttttttgtaaa

SEQ ID NO: 90314 - DNA, 353 bp, Homo Sapiens
gtgtgcaccccggtcacaacagtgatgctcaagggctctccaaaggaggcaggcttgtgtggaccccagagggactcctgatcaggttagaaggacgtggaaagaatactacctgcaagccgacgagagaggcctggagcagatccttccttcacggcactcggaagatgccaagcctgccatcttgattttagacttccagcctccagaactgagagacaacacgttgtttctgttgtttgagccacacagttggtagaactgttaaagtagctccaggaaactaattcagtgactaatgttttcgaacagtctttgtgcattttaaataaacatatttaatatattacaaa

SEQ ID NO: 90315 - DNA, 562 bp, Homo Sapiens
  misc_feature (26)..(26): n is a, c, g, or t
  misc_feature (33)..(33): n is a, c, g, or t
  misc_feature (71)..(71): n is a, c, g, or t
aagaaacctggtggtactagttcacntaaggcnttatcacctctcccttctgtggattcaaattacccacngagagagagagcatctttcaacagaatggtcatgcatagtgctgcttctccaacacaggcaccaatccttaatccctctatggttacaaatgaaggacttggtcttacaactacagcttctggaacagacatctcttctaatagtctaaaagattgtcttcctaaatcagcacaacttttgaaatctgtttttgtgaaaaatgttggttgggctacacagttaactagtggagctgtgtgggttcagtttaatgatgggtcccagttggttgtgcaggcaggagtgtcttctatcagttatacctcaccaaatggtcaaacaactaggtatggagaaaatgaaaaattaccagactacatcaaacagaaattacagtgtctgtcttccatccttttgatgttttctaatccgactcctaattttcattgattaaaactcctttcagacatataagtttaataaataacttttttgttgactttcaagtaaa

SEQ ID NO: 90316 - DNA, 273 bp, Homo Sapiens
tgcaaactcaagcccctcctatccccccagacctacagaatcagaattactgagagtagagctcaggaatttgtgtctaaccagctctccaggtggaggtcaaaggaaacggtggaaaaaggaagctaaagtttgagggaaaactgatctaaccaattttatttacagatatttggatatttatataatttaaagatctttgagcagaattattccattgctttaactcactcaacaacccttccctacatgaaacaaatctcattattggtt

SEQ ID NO: 90317 - DNA, 730 bp, Homo Sapiens
ttaagcgacccacaagcatatccttctttgtccaaggtttgttttgaaagtgggcaacgccctaactgggtaggggatagttgccatcttagcttaggtaggggctggcaaggaaaacgtgtctggggggccctgtagtcttcagatagaaaagtaggtgccttctgttagccatggctgcttggatggccaaaggccactgtgggtttttcagcagcgcttttagcagaattccttcacactgcccccaccccacttgcagatgatggaaggcttgctggcaattactgaaagaaaatgggaggtgggaaaatggagctgcatttatattttacttcctgaatgtcaaggtgatgctggcacaaatattaaagggaacattccccttctttgggatataggaaatgctgctgcaaacttagagataagggaagagatatgcagagttaatgaggaccagctttacctctcaagtgcccagaaatggctttaataatcaggtctgggttctttgaggcttcctttctttaacttagaccattccttcccaacagaaatacagatttctccttttaccttctggctggccattagatagggggctaaaacttcgaataaatctcactgtcaaaaacttttgatttatccagaatatttgggttttctcattttttttaaaaaggaaataacaggttattgaataaagaatttcattaatggttaaaaaaaa

SEQ ID NO: 90318 - DNA, 404 bp, Homo Sapiens
cacaaaggctctaagcgaaagacatgaggcctcagcctgaaatgaggttgttttgaggtcatctgatttctgactagaaggtgagcgatcgcctcgtcctgaaaccacttcagcccgcatggtaaatggcaaagccagcgagagggaggccttcatgtgtttccgtgtctgtgctgccccagttccttcctcttcaagattaaaaacattttaaagttgtaaaccaaaggtttgcaattttttttggtgatggcatgttcagaatcttggatccctaagttcaatatattggacatatttaggaactctggaaattatgttgttttcacatatctagtaacttactagatgaatcagtagatttcattaaagtatatctaataacagataattatgatgtaaaa

SEQ ID NO: 90319 - DNA, 399 bp, Homo Sapiens
tggaggggggctgctcgtgacttccgacctctgtctcgctagttggcatgagaagactggactccttctgcaggcctcagggcagaggcagatgtcagcccccagggatgtcactgccagaaccccagatgccccaagccatctggactccccctgtgcagtatctctgctacaataaaatgtacccagatctgagtcctctcacctgggcgactgccaatgtcccctgcggccctataccccgcccccaggagcccagaggatctttctttttaaagatattcagacctcacagataagtctgccctgaccagcccctccccagttcccaggccctatcctgacaacggccacaacttcagagcagctgaaacctgctgtgagtgaaaaatgagaagc

SEQ ID NO: 90320 - DNA, 485 bp, Homo Sapiens
ggatgttgcggcggccggaggcgggggcggtccgggggcggccgaggaggaggccctggagtggtgtaagtgccttctggcgggcggcggcggctacgacgagttctgcgcggcggtgcgggcctacgatcccgcggcgctctgcggcctggtctggacagccaacttcgtggcctaccgctgccggacgtgcggcatctcgccctgcatgtcgctgtgcgccgagtgcttccaccagggcgaccacaccggacacgacttcaacatgttccgcagccaggccgggggcgcctgcgactgcggggacagcaacgtgatgcgggagagcgggttttgcaaaaggcatcaaattaaatcaagttcaaatattccctgtgtccctaaagacttactgatgatgtctgaatttgttcttccaagatttatattttgtcttattcagtacttaagagaaggctataatgaaccagcagctgatggaccat

SEQ ID NO: 90321 - DNA, 234 bp, Homo Sapiens
gtgatttgccaatgcataacagggtttcaagtttcattaatgaagggactcaatcgcctagaacactaatttcccttccaaagaagagaacaacgaagtttgtgaaaggtgactcttcccctcttggaccgtggaattcacatttcatattcttgatatcaaacacagtgaaagctaaagagagggagaggatctgggagctgaaaaataaaagagcaaagatttcaaataacg

SEQ ID NO: 90322 - DNA, 591 bp, Homo Sapiens
  misc_feature (317)..(337): n is a, c, g, or t
ccggtgtgcttcgtgctgtagttatcgttagttcctcttcccgagatggggccgccgagagaccccagcgcctttgaaaagcaaggtttgtgctgcgcttccagttccgaaaagcagatgtttaagcccttggactgagggtgggatcgcagctccgaagacggagaggagggaaatggggccctttcccctctattgcatccccctgcccgactccttccccgcacccacgtgccctagattcatggcagaaaatgaccaaatcctgtgtatttgttttatatatttaataactgttttaaatgaaagttttagtnnnnnnnnnnnnnnnnnnnnngattaaattgctattgctgtagtaagagaagctctttgtatctgaacatagttgtatttgaaatttgtggttttttaatttatttaaaattggggggagggcatgggaaggatttaacaccgatatattgttaccgctgaaaatgaactttatgaaccttttccaagttgatctatccagtgacgtggcctggtgggcgtttcttcttgtacttatgtggtcctttggcttttaatacagacattttcctacaa

SEQ ID NO: 90323 - DNA, 316 bp, Homo Sapiens
aggaagggaatgtgggaggaattaagacaaatatttcagactggtgtaaaggacaaatatgacaacgacgtcaaggactcgcatccgtcgctttctgcagaaaggggcttcttcggtcccgagctcgcgtccaggtggccaggcctctgccggcggctccagtggctgcgattatcgggttcggtaaatgcccccacgtgcttgtgtctctttccccccttttctgtatatagagtggtttcagattgtaaatagcgcgtcagcgaacttgtctaaatcatatatttttgtctaataaactaaatgaaatgacaaa

SEQ ID NO: 90324 - DNA, 302 bp, Homo Sapiens
acggtaatactagatatcaaagacaagaataggttagtcaaccatagacattcatggagagtgaacaatatattcctcatatgaccactgatacaatgaggaaatcactaaggaaatttgaaaatttttcaaaacaaatgaaaatggaaacacaacaaaccaaatcctgtgtgatacagtgaaagcagtactaagagaaaagtttgtaagagtaagcacacacattaaaaaagaaaaatttcaaataaacaacataatgatacatttcaaagaactagaaaagcaagagcaaactgaactgt

SEQ ID NO: 90325 - DNA, 480 bp, Homo Sapiens
cagctgtttggtttgcatatgttttagcttttcttttggtttttagtatttcctaaaacataggggaaaaaacgaggtcatttctactaagcactaggacctgccatagtgagtttaagtgcctaccttgcagcagttaatactagattgtgttctgtctctgttcaggtaacaggactgcattcctgctcaaggatgattccttgctgctgcttatgttctgttgtttttaggatggagctggttgttattcaccaactaagggaacagttagagcagagatgaagaaattatgaactgttatccttattctgagccttctcctcctaaccctcatcagttaaggttaggaagaacaagatgccataatgcctatgaagacttctttaacaatcttgtttgggtttttttctaggtatattattagtgttttatggtctatgttctttaagcaataaataaattgttcattttaaaaaa

SEQ ID NO: 90326 - DNA, 297 bp, Homo Sapiens
catcctgggtcattacagagtgggtcaatccatctgctgcatctgaagagctgggtccagcttctacagtgaatccatatatttctgtatttcctggataaggaagagcaaaggagctgagctggtggaggaagaagaactaatattaactgactccttattttgtgctagtactgtgctagttacatattttatctcatgtaattcttaccaaactgtaagggggtttcggagtgatggagacaatattgatgttatctccattttagggtgagaaaataaaggctcagaaatgtt

SEQ ID NO: 90327 - DNA, 418 bp, Homo Sapiens
cgattggggaatacctggaacaagatgaggagcagccaaccccatcaggctttgaacccactgtcaaccccagctctggtataagcaagatggagctgctggcctgctttagtgtgagtgctctgccagagggaaagctcctagaacagtgagaaggccctccaggggaattcctcgaatactcagaggcagtagtgtggggtagtagttgaagcacacagctctagagtcagacaggcttggattcatatcttggttctgtgaccagccttgaatgagttatttaacttctctgagcaatatttttctcgtctcatttataaactagggatgataatggtatatgagataatacatgctgtgggcttagcacagtgcatgatacacaaaaatgcaataaatattaccttgttataaa

SEQ ID NO: 90328 - DNA, 494 bp, Homo Sapiens
agtactactgtgattgtcaattatgccttattatttattacattgtttctgtaggaaagtgaattctgcatttaaatttcagggaaccagtcagaagcatctggattaggcatttagtgatacaaggatccagaataacaaaaactatgtaccagccacattcacacaacaggtgatacccctataggttaattattctctagatattctaaattaagagacacagaatacttagtcttatgtgagtcaagagctctattctgtcttcactactgggtgtctactgttataaactggagaatatgtgtggttaaatgccatgtttttcatttttaattgatctttttcttattgctgtggttctttgcctttttaggatttcttgtaaaaacctcaaaatggttataaagagtatcacagatgtggtgttatggttagtgtgtactttgaaagtaatgaatgtttttatgtaattaaatatctttctgccaaaa

SEQ ID NO: 90329 - DNA, 376 bp, Homo Sapiens
accatatggggaatggatcagaagagtatgaagtaacccagcaaaaggctggcatcttgcaaaggtggatggagccaagactcttctgagatttcataagtggctttgctgcctgaaacaaagaatagccaaatgaagggatgagcagttttccagcaatgatttgtccaagtaaaatcatggtaccatccaacattgcgagacatctgcagggtgagagctacagcaacgcctctgacaaatggaatgctgaacttgagacatgatttatgcaactatttctcacctctttattccacattccaatcttaggataacatttaaaatcttaatgttgttttcaggaatagccaataaaataaatcggctctgcaaa

SEQ ID NO: 90330 - DNA, 459 bp, Homo Sapiens
  misc_feature (70)..(79): n is a, c, g, or t
  misc_feature (311)..(322): n is a, c, g, or t
ttgaagcatacaaataatttgcactatattatcctgccaaattaaaaaaatatactgtggcagcctgtcnnnnnnnnnnccactaccaaaaaaggtacattgataccttttaagagaacaagcaacagttaaaaatacaagcttcaatataaatactatagtgcctaacactagatgaacatttaattcaaataccattctagaaatacagaaaaaagaccataaatgtattttagcataggaatcaacatgagtgtgcattttcctatatttaagtactatataatcttaaacctttccccaatgtatgnnnnnnnnnnnnacaacctgaagagcggtgtgtatccaaggcatagaatttccactaccatttttaaatggataacaagtcttgtaacaccaccaagacaatggaaccctaaaatgcagttcccccctaaacataatgaagtgtttttt

SEQ ID NO: 90331 - DNA, 602 bp, Homo Sapiens
ttctctgtgtagcatattaatgcctgccacaagggtgctatcaaccagaatcttcagtgaatcttctttgtctgaattgcacatatctcagaggagaatagagaatgtgtaaggacaccgtggcccatgcattgacactgtcatagataaagcatagttactcactatcagttctacccacagccaaagtccaggttccacctcctttagcaagccttctcgaaggactccatgcctcactgatcttcctcctcactgaacgccacagaccaagaacccataatgtcctcctcaggaaccagcacagtcccaaagtccacagaactcaaaagaacgctggtagattgatttgctctaccatcatctcaacagtgctttcctcgggtgtagcatgatgcattttaacacaattaaaatgacatgttagaaatgttgctgatggggttgctggggcaatgacttctttcaaagtcttccctctatttactgcactcatggaagtgagtctcatgggaagctatgtcttagctgaaagcctgtcttcaaagtcctttggcaaggaagttttctgttatgaataaattagtatcacaagtaaaaaa

SEQ ID NO: 90332 - DNA, 484 bp, Homo Sapiens
ttaagcagtgaaatttaaaaatctattacctcaagaattttcagtcgatatgtcaatgtactgttccttctcagtaagtacagtgtcacatgctgctggcggtaaaagcaacccaagtgtcagatcacacaaattttagggacaagtctttcaaaagacggacaccttgtgatattttggagtctaatttccgacttttcgtaatgtcccaatgaccttttgttgtggttgggcttttataaaaaattattttcggttggttgttgtagaatggaagagtaatcttaattatgaaatcagattgcatggaagaatataaagacactcactcggatgaaaactataacggttttcaaactattttgatggtcattgtacgagctattgtatggattactgtggagtgctgtttaccacatgatgtgtgcaatacatcatgcaatgttatttagcaatgcgtaataaaagtttttaaaaaagaaaa

SEQ ID NO: 90333 - DNA, 769 bp, Homo Sapiens
gccagtactataacggtcctaaggtagcgaggcctgggtggcgaattcggcacgagggcgcactcagggtctgaggcagctagtagccggagggtcaccatgaagttcaatcccttcgttacctcggaccgcagtaaaaaccgcaaacgtcacttcaatgccccctcacacgtgcgcaggaagatcatgtcatccccgctctccaaggagctgcggcagaagtacaatgtccgctccatgcccatccgcaaggacgacgaggtccaggtagttcgaggacactacaaaggtcagcaaattggcaaggtagtccaggtgtacagaaagaaatatgtcatctacatcgagcgggtgcagcgtgagaaggccaacggcacaactgtccacgtgggcattcacccaagcaaggtggttatcaccaggctaaaactggacaaggatcggaaaaaaattcttgaacgcaaagccaagtctcgacaagttggaaaagagaaaggcaaatataaagaagaacttattgagaaaatgcaggaataaatagaacctgttgtgcaaccacggtttaaccggagattttgaggctagggtgtgtttctttcgaacttttcggaatgtctggaacatttcatttcctgttttgttacctgtgcctctgtaaatctacttttgcaattttaagtaataattttatgaataaaaatgggaaatgcttcctaattccacatagtatttgcattgttttataaataaattccaaaaactatcaaaa

SEQ ID NO: 90334 - DNA, 824 bp, Homo Sapiens
tctgctttcctaccaggaagagtggcttggccctctgctgaggctctcagaggttctcccagccttgggatcgctgagtaaaaccagtcagcaccatgtcaccctatggagactggtattaccttgcgcctgtgtgtggtgacagcgggcatcctttggcctgcatagcaaagggccactcccctcctttcctcctgtctcccttcttccccaacccctctctcttggaggacagagtctgctcccctaaattctactgggttctttttcaggcctccatccctgggatttgctggtagaagaaagggaatcagcgctgactgagctcctactatgtgcccttcctgggcctggcactggaatcacaggatgaatgaataaggcatatttcctgccctgaggaggcgtctataggggaagtcggaattaaggcacctccagaattctgaggtcaagggaatgtcaacagagctgtgaacaaaatgcccaaagccatgaaaatctacagagagagactcgaaggggaggaatggggccaggctgaggtcgggatggtggaggaggtggtggaggtgatgaggtaccagagcaacctcgaagaaagctgagaggcaggagaccgccaaaggcaaacttggaacacctggtgactccgactaactctccatgtggtgtccttgaggacttttatgatactgctaccactgctaatagtaataaaagccactatttaatgtgtttactatgcgctgggtgtgcaaatattgtggaaagagtgaacatatgtgcagaatgcttaataaacgtgatctccttttatcttc

SEQ ID NO: 90335 - DNA, 459 bp, Homo Sapiens
ctgggcctggcactggaatcacaggatgaatgaataaggcatatttcctgccctgaggaggcgtctataggggaagtcggaattaaggcacctccagaattctgaggtcaagggaatgtcaacagagctgtgaacaaaatgcccaaagccatgaaaatctacagagagagactcgaaggggaggaatggggtaggagctggtgccgaggatgagaggggagaattcacctggtggagaactgataggccaggctgaggtcgggatggtggaggaggtggtggaggtgatgaggtaccagagcaacctcgaagaaagctgagaggcaggagacccccaaaggcaaacttggaacacctggtgactccgactaactctccatgtggtgtccttgaggacttttatgatactgctaccactgctaatagtaataaaagccactatttaatgtgtttactaaa

SEQ ID NO: 90336 - DNA, 507 bp, Homo Sapiens
  misc_feature (96)..(154): n is a, c, g, or t
cctggtggagaactgataggtgggggctgttttcaaagtattttcacaaacgtttattctcttgactctcacaataaacgaagccagccagaaagnnnnnnnnnnnnnnnnnnnnnnnnnnnnnnnnnnnnnnnnnnnnnnnnnnnnnnnnnnncagggcaaagctggggtggaagcatcggtcttgtgcttccacactcattgcactttcttccaggccaggctgaggtcgggatggtggaggaggtggtggaggtgatgaggtaccagagcaacctcgaagaaagctgagaggcaggagactgccaaaggcaaacttggaacacctggtgactccgactaactctccatgtggtgtccttgaggacttttatgatactgctaccactgctaatagtaataaaagccactatttaatgtgtttactatgcgctgggtgtgcaaatattgtggaaagagtgaacatatgtgcagaatgcttaataaacgtgatctccttttatcttc

SEQ ID NO: 90337 - DNA, 1119 bp, Homo Sapiens
  misc_feature (81)..(81): n is a, c, g, or t
  misc_feature (153)..(153): n is a, c, g, or t
  misc_feature (180)..(180): n is a, c, g, or t
  misc_feature (301)..(301): n is a, c, g, or t
  misc_feature (426)..(426): n is a, c, g, or t
  misc_feature (435)..(435): n is a, c, g, or t
  misc_feature (441)..(441): n is a, c, g, or t
  misc_feature (448)..(448): n is a, c, g, or t
cagaagggtcccgactgcgctcgcctaagttggggccggcagcagtgggttgggaggctggggctgggcgagactcgcggncccggtttaaatcaacaagataattgccaagtcccctcctcctctgggactacctcaagatataacagatgntggaagacacgaaagaaaggtcaaggnaatccaagatcacaggattccttgatggcataactggaattagaaaacaggcatgactgtaaggaggaactacggaatgctaactacatgcccggctctatgctaggcacattacatctgngatttcactgatatcttttaagacacctaatgaggtggaatgccacatccaaagacattacaaattcttcttatgttagggaaggcaagacacccccacctccaacagttatgcagcatcagcanaaacagagnccaaancaactgngcatcacactgggagccagtgaaggagagggaacggagagcaggtgttcggctgcctggtgaatggtccatttaaaaattcaacaatagtcagaggggagtagagagtacaacagccaccaccgtaattggtgaaatcaggatttctcaattcagtgtaaactcacaccctaaaagaaggcacactataaagcagatttccataaacccagcgcatcatttactcttaacgatattattttaaaagcatgctcttcaggcaaaatcgctgaaagacctactcaagcaacaaaaaccagtgctgcttcaatgtcaaatctccctatgagatattaatcattagctggaagaaataggcaaaagcagttttttactgcagaaccaactaattatctttcataactcttttgaaaaccaaatgtaaaagctcaagtgaaaaacatgttaaatgcatttgtgtctagactttgccaagaaaataagggagtttaagtgcacaaaatcaaaagatcttactaaactagaatttcaaataaaggtaaaaaaaatcagccacatattgttatatatcttgtcttcagcacttaaatgtatacaatcagctgagggtgaatgttgctgtatattcaagatgtacatgcatcctatttggtgagtagcaccaacatagta

SEQ ID NO: 90338 - DNA, 512 bp, Homo Sapiens
  misc_feature (47)..(47): n is a, c, g, or t
tcatgagcttgttccagttacagtccctttgaagttcagggtgatanacagaatattcttctgtagaggaagagaaaggagtgaaagtttagcccactgagacctagagctttgtgatttcctaaccttgaaactctgtaatccctaaagttaaaatctccgcaagtggcacaacttcagaactaatagtatcactttgatttttctttttcctcccttagaaagtttctctagttccatagtttatttgttgaaggtactatgaccaaagaatcagctgctctacaggaatagcatggttccagtgaattagagaaaacctgctgtaaagccatggtagtgtctaagtggtatgttattatgatgtactagcatttatttacagaattatttattaacgtttacttccttcccctctgtaaatgtccatgactattgcccagagaaggcttacccctctctagggttgcagttgctttctttgtaataagtattttgccacacctgaaaaa

SEQ ID NO: 90339 - DNA, 506 bp, Homo Sapiens
gggactctccaaaaagcagagacagcaggaagaggggagtggaggcagcccattcacctggggaaatgactgggttgtcaatggacggtggcggcagccccaagggggacgtggacccgttctactatgactatgagaccgttcgcaatgggggcctgatcttcgctggactggccttcatcgtggggctcctcatcctcctcagcagaagattccgctgtgggggcaataagaagcgcaggcaaatcaatgaagatgagccgtaacagcagcctcggcggtgccacccactgcactggggccagctgggaagccaagcatggccctgcctctggcgcctcccctttttccctgggctttagacctttgtccccgtcactgccagcgcttgggctgaaggaagctccagactcaatgtgacccccaggtggcatcgccaacgcctgcctcgtgccacctcatgcttataataaagccggcgtcagagaccgctgcttccctcaaaa

SEQ ID NO: 90340 - DNA, 826 bp, Homo Sapiens
atccattataactatgtctttataaagaagagaagagacacagagacacacagggagaatgccatgtgacaacctatgcagagactggagtgacaggccaggccagtggggagaacatgaggacaatggaacctggactgccaagctccagcccccaaatccctcccttctggttccggaggccccagggttactctcccgcacactaactgctttgaaaacctcattcctcaaatctactccatcatgggtggcctgaagaagcctggacaggaggtcctgggtgacctgtgagggcatacaccacagagctgggtgcaaacctgcagagccaaaacctggggctcctggcttcaaatccacctctcaccagtatttgagttctctttccagcggaaagtctgcccggcctcagagttgcagccaggagagtggctcagaatccagcatgaaaacatttggaagacatcaaggtccatttaaccagcacaagagccccagccttctttgctgtgtcaatgtgggcttctccaagcctcagttttacttatccatgaagtgggtgtattaaggtaacgttaagtggctataacaaagagactcatgacaaatcaatgccttaaggaagatcatgtctctctcttgtaacagtccatagtgcacatcctgggctactgttccacatggaatccagggacctggttcccttcactttcttccgctccattccttaggacattgtcctcctcgtcatagacagacacatcacaggcccgtccttgttctgactcctggcctggcgatgtggacggactcggcggccgca

SEQ ID NO: 90341 - DNA, 532 bp, Homo Sapiens
gcggccgccgagtccgtccacatcgccaggccaggaccttggacagggcccagcacaggggccctggaatgtggactgtctcagtggattcttgtttataggaattagaggaaggtggaagaagctcattccagagtgcaatcaataacagtggaaagaagtccctggagcccagtgcagtggcttgaactgagaatgcactcactggctgttgcagccaagactccagttctcgcctctctttccctgactcccctgtgcccacctttcccctgcaggagtcagaacaaggacgggcctgtgatgtgtctgtctatgacgaggaggacaatgtcctaaggaatggagaggaagaaagtgaagggaaccaggtccctggattccatgtggaacagtagcccaggatgtgcactatggactgttacaagagagagacatgatcttccttaaggcattgatttgtcatgagtctctttgttatagccacttaacgttaccttaatacacccacttcatggataagtaaaactga

SEQ ID NO: 90342 - DNA, 671 bp, Homo Sapiens
  misc_feature (531)..(563): n is a, c, g, or t
tgcggccgcctcgtagtcactgccgcggcgccttgagtctccgggccgccttgccatggctgcccgtggtgtcatcgctccagttggcgagagtttgcgctacgctgagtacttgcagccctcggccaaacggccagacgccgacgtcgaccagcagagactggtaagaagtttgatagctgtaggactgggtgttgcagctcttgcatttgcaggtcgctacgcatttcggatctggaaacctctagaacaagttatcacagaaactgcaaagaagatttcaactcctagcttttcatcctactataaaggaggatttgaacagaaaatgagtaggcgagaagctggtcttattttaggtgtaagcccatctgctggcaaggctaagattagaacagctcataggagagtcatgattttgaatcacccagataaaggtggatctccttacgtagcagccaaaataaatgaagcaaaagacttgctagaaacaaccaccaaacattgatgcttaaggaccacactgaaggnnnnnnnnnnnnnnnnnnnnnnnnnnnnnnnnngccctgcaaaatattctaaaacatggtcttcttaattttctatatggattgaccacagtcttatcttccaccattaagctgtataacaataaaatgttaatagtcaaa

SEQ ID NO: 90343 - DNA, 220 bp, Homo Sapiens
tggtgagcaaccacgcctggcctgcacctccctttcatcaccagccccagctacacatccaggcaacctctctgtgtgaagccctaagtgggcactagagacatagaactaagtctactccttgccctggagaggcatgcagcctcatgggtgaaggagacaagcaggaatggctcaagagggagaaaagctgtgagggaggtattggggtatgggggta

SEQ ID NO: 90344 - DNA, 470 bp, Homo Sapiens
tatgaatccactgtgttctcaagtagcctatttccaatttagggccatagctagtctttggaaagagatttcaaaatcccagtgactaagaggctgcaaaaggatgatggattggacgtttggaacgtcctttccctcccatgctttcagtgtaatcgcttactcagttcatctccctcaagttttaagacaaccctccgacctggtaggaaagctcgaaagaactggaagtgccagagtttggatgatttgttgctgcccgcagtaatgaggatttgaattggtctcatctttgtttttaaggaaacagaatcaacaaataagtgagatggcactgtgctaggcaacaagaacactgccaaaaacaaaaacacggcctgagaaaggtttgagatagaagcaaaaatatagttgatcaatgatgtcgtgccataaaacagtgccaaatgaattatataaagacagtaaaa

SEQ ID NO: 90345 - DNA, 621 bp, Homo Sapiens
agtttgtcattctatacagctttcctgcctgcaaaagaggaggagcagactcatccagcaaatcacctaaaaagtttgaagatcaaaaagcctagctccagtttcagatccttcccctacctttctgaacactagtttcttcctctgaaaaacgaaagagggaacgggaccgtagagtggagtgggcacaagaatcgcaagtcccttctggctatgacgctgcaagactctaggtacagtttaggactccgggcattcagatccccgggacttgtcaagttctcctcattgacatttttgatatttcgtgacaacacaaattcatcacatttttgtgctgtgtgttatatgtgggaaggagattttaaaaagattgccttttgaagttattggatagctgtgttacagaagaaaacattgccttcaagaagttattggatagatatgttacagaagaaaagacgtttgtttcatttttgactttgcaggaaaagaatatgtaacacatcagaattcttctctcctccctggccttagtcgagcacctgaggggcattaaagcacttcctccttgcaatcacttacccagcatagtccttaatacagatatcttcattgttg

SEQ ID NO: 90346 - DNA, 574 bp, Homo Sapiens
  misc_feature (448)..(464): n is a, c, g, or t
taattatcttcaggacctcggcaaaacctgagtcctgtcctctcgctttcctccccgtacacagcgagcttcaccactggctccgcaccttctccatcaactactacctgtccctgggatctgtccagtcgcccagctaaagtgctcagcaggtcagcagcgcggcgagcttctatgaggcgtggggtctggggctcctggatctctgtgtcccatttcacagagattgccacctactgccgcctgctagaagatggggaggacttcaatcttggtggtattctggacagcagcaaatacctgtaaagcatccaaaagaccaacacccacaggatagtggacggcaaagtggtgtctgagaccaacatcacagacgtcttgaggtgctaagccagcagaagcaaggtccctttgcggagcaggagggcaataaaaacttctgtggtcnnnnnnnnnnnnnnnnnttaccctcgcatcacagaggtgttttcctcacgcaaacgtaatatagattcattaatacatagatgtggaaattagggcaatttccacaactactcacccagagaggatt

SEQ ID NO: 90347 - DNA, 524 bp, Homo Sapiens
ggatgaaatataaagcaagctttaatgttctgacttgttcatttgaaatacaaaaaagtaagtgaattttaatgttttgcattaactaaagaaatctgaagattaatgttgaggaaattgtatggacatgcctttgtgaaaccaggaagtattttaagttaaaaatgaaaaaggttttaattgctttgtgtgtgttttaatggagccccattttagaattattttttccatctccctttaccaacaaaaggaacaatgccaccgtgaatggaatagtttggggaaagctttgccaaacacaaccctgatttcagagcaggaacatggtttggatagatcttcagttccgcttgaattattctgttactgcgctgtcattttcagaagatttccattcctttgcagatgctgttgggagttcgggattatgttcatttcttctgttttaatggcattcagtactaattttataagtgcatcttgtgtgaatctcaataaattcagttttgtaatcttttttaaaa

SEQ ID NO: 90348 - DNA, 652 bp, Homo Sapiens
  misc_feature (78)..(78): n is a, c, g, or t
  misc_feature (142)..(142): n is a, c, g, or t
gccctgctgcccgcgggctacaagacaagaatggagtctccgcagctccactgcattctcaccagcaacagcgtggcntgcagctatgccgtggagccggcttcctggccttcctcagctgcctggccttcctcgtctggancacacaggagacccgcattgccggcacccgcttcaagacagccttccagatcctggacttcatcctggctgttctctgggcagttgtctggttcatgggtttctgcttcctggccaaccaaaggcagcattcgccgcccaaagagttcctcctggggagcagcagtgcccaggcagccatcgccttcaccttcttctccatccttgtctggatattccaggcctacctggcattccaggacctccgaaatgatgctccagtcccttacaagcgcttcctggatgagggtggcatggtgctgaccaccctccccttgccctctgccaacagccctgtgaacatgcccaccactggccccaacagcctgagttatgctagctctgccctgtccccctgtctgaccgctccaaagtccccccggcttgctatgatgcctgacaactaaatatccttatccaaatcaataaagagagaatcctccctccagaagggtttctaaaaacagccaaa

SEQ ID NO: 90349 - DNA, 494 bp, Homo Sapiens
taattgactaaataaatcatggtgtatttatataatagaatactgtacaaagatgagaattaatgaaccacagatatattccaaaatacaggttcattttagaagcataatgtttgccaaaaagtgagtcacaaaaagcgatgtataatataccccttctctagaactcaaagcagacacattgccaccctagggtcttggcgttggtcattccctgtacctggaacatttgtctcccacacttctgcaaagcttattcctttacctctctcagatctttgctaaaatggcaccactgacccttctgtgtaaagtcacaatcctagtgtacgcaatccctctcacttccctctactttctctattttccacagcacaccatagcaccatcatcttctaacagcatctgctgtatttattttgtggatggtttactgacagtctccccaggtagaaacacaagttctaggagagtaaggctctttgttttattca

SEQ ID NO: 90350 - DNA, 464 bp, Homo Sapiens
tgagggaagaaagatgcatagggaatgttgcatgtggttatttctatttctctcaagtgcacattatccatcaagaagatttaaatcattttgaaatattaatataatgatcaaaaattaacttttatacatgttattaggcagaacccacagaaaacaataaagcacgagagaaaagaggatggcagtttacccaggaaacataggttgtgcaaagctttgcaatgatactctcaattcagagcaatgaagaacagaatgctgtcttcccataatgagggcattcaattatcactagacttacaagactacaaaaaatttctcaagaaccagtaaggatcagacaaaggccaatgacaatactgaaaaagcttgccaggggaaaataaaagctcagttacacaaattacgttgttgaaccagggccagaaataaaatctgatggacaaactcattaaaaaaaa

SEQ ID NO: 90351 - DNA, 949 bp, Homo Sapiens
ggggctgcggcaggaacatggcggatcggctcacgcagcttcaggacgctgtgaattcgcttgcagatcagttttgtaatgccattggagtattgcagcaatgtggtcctcctgcctctttcaataatattcagacagcaattaacaaagaccagccagctaaccctacagaagagtatgcccagctttttgcagcactgattgcacgaacagcaaaagacattgatgttttgatagattccttacccagtgaagaatctacagctgctttacaggctgctagcttgtataagctagaagaagaaaaccatgaagctgctacatgtctggaggatgttgtttatcgaggagacatgcttctggagaagatacaaagcgcacttgctgatattgcacagtcacagctgaagacaagaagtggtacccatagccagtctcttccagactcatagcatcagtggataccatgtggctgagaaaagaactgtttgagtgccattaagaattctgcatcagacttagatacaagccttaccaacaattacagaaacattaaacactatgacacattacctttttagctatttttaatagtcttctattttcactcttgataagcttataaaatcatgattgaatcagctttaaagcatcataccatcattttttaactgagtgaaattattaaggcatgtaatacattaatgaacataatataaggaaacatatgtaaaattctgttatgacataatttatgtctccattgtggtgtattggccagtacttttacaaaatcaataacatctctcaagccaaaggaggaagacagtaagaaacagacataagggacattttagttgaggctaagtggtcctggctcttagaaggggggcattgggtaaatctggagttgagcagaagttgggaaatggggtgggtttaagaaata

SEQ ID NO: 90352 - DNA, 722 bp, Homo Sapiens
cagagctccaggcatgtcccatccccatgcacatgtggtaacacacacctgtatcacacatgtgcttacatttccactcacatgcacctctgagcctcccttgctgtcttggacctgtctgttgggtttagtccgtggacatttcagagggagatccccctcccagtttaactgtcctcacaggcccttgcctaggatggatgaccaacactgcactcaatgagccagcctctcttttgggggaatcaagcatttgcttcctctagactacagcagggaaagggaggagaaatctgatgtctcaactggcacatgaagcccattcttggaactatgcaaagggcagaggctgggagtttggacgcttagctcctacccctgtcctacctcaccggggcactttcaggggccaggggcctctgaagtctctaggcctatatgggacaatcaattctgactgagctcccccattcccctcgggtgaggatgactgttatttttgtagctgagaacgtggaatcccacgggtttttactgcccttcacccaacctctcccacctccaccccacaatgaatgtatttattgtgagaatggctacacttctttaggaatgcccccacttacaaccaggtgggtggaacaggcatgtgacagagtggggagcctgggctcagctcctccccctgccgttggttaataaacaccctttttccccacaaa

SEQ ID NO: 90353 - DNA, 492 bp, Homo Sapiens
  misc_feature (479)..(479): n is a, c, g, or t
agctatccatgcagtccgggaggggagccagacagaagcaagcatgtgcgaccagcattaaaggggcagctgcagtcagtcctctctggagccctgtccttgttcttcccaacacagccttgtgcgtatgctgatgctgcatgaaatccctgcttcttcatcgttcgtcacaagagcccatgatgccttgtcagatgacacctccgatcccaggaggatccatgccgtggagacaaacaactcattatttgccttgatgacctgtcatctcatagacacctccctggatggatggagcactggaatttgggctaccagagagttccgcctcggttagcagaagtaatttgcccgtgtccttatgcaacatgctgacctggtcagtcatttaaatgaaagggcacggcagccatgcaaaactctatctccctaatgcttttcttcccattgctttcttcttcttcaaatataaaaacaancaaatgttgtaaa

SEQ ID NO: 90354 - DNA, 478 bp, Homo Sapiens
gcggccgctccccgggtgtggagcacggggagtcgggcgtggggcgggcagggagtggagtcggggtcttactccggtggctgcagggcgcagggtagccgtgtcaggcctgcccaggtgcagagcgctcctccgcgaccccaacagcctctggtccggtctggcgcgccctcgctttcccagagggcgacctgggctatggcggccgtggcgctggcgagcgggacacgcctcggccttgtcctcgagctgctcacgggacagcccgcgcagcccagggcgcgccgggattgtcagtgaccttcgaggatgtggccgtctacttctctgagaacgaatggatcggcctgggccctgctcagagagccctgtaccaggatgtgatgctggagaattatggggctgtggcttccctggcagcatttccatttcccaaaccggctctgatttcccagctggagcgaggggaaacaccctg

SEQ ID NO: 90355 - DNA, 425 bp, Homo Sapiens
agggcgggaaatggagccggagaagcttgagcctctctcttggacaggacaagctgaactctgaaatgggagccggtccaggtggccttcagccccacctttccgatagtctgttagaattttattagcgcagattcctgggccatgccgggtaccgtgaccttgtgtaaatttatttatatttattgtggcccatccaccccacttctgcaaacccatcccgaggcctctggaatgggactccttctccctccctacctcccagccatcctaactcctacaggccagagaatgacatctctaactggctcataatcccttggcagcctggggctactttttagaaccagcaagcactgttgatactgtgaaacatcccattttttccgtattagagaccagatatttttctacctgaaaaaaaa

SEQ ID NO: 90356 - DNA, 394 bp, Homo Sapiens
cgagctgcgcggctacggcttcattgtcagttgaaagacgcggtttcgcgcgcctgtgcggtcggcgagaaagggtactaggcggctccgctaggttcatggagctgagctgggccgaggggcgggaactgcggagcggcctcggtcaaactcgtcttaaaggacgcggaaagcgccgcaccgaccagcaggacgctcgcgggctctccgcggtcgtgacttttaacccgctttgcgcggagccctcaccacgtgacggccgcgcaggcgcattatcctagccctcggcgcgtgggtcgggccgaggggttcagcagcccgtggcgctcctcggctggcgctgcgagtgagcccgcggcggcagtgacacagcctaccttgctcattgcccttc

SEQ ID NO: 90357 - DNA, 837 bp, Homo Sapiens
  misc_feature (536)..(557): n is a, c, g, or t
  misc_feature (559)..(562): n is a, c, g, or t
  misc_feature (565)..(565): n is a, c, g, or t
  misc_feature (567)..(571): n is a, c, g, or t
  misc_feature (574)..(575): n is a, c, g, or t
  misc_feature (578)..(578): n is a, c, g, or t
  misc_feature (580)..(580): n is a, c, g, or t
  misc_feature (626)..(629): n is a, c, g, or t
ggggtccacaggcttcgcagaccaagagcaagtcggcacaccaggacaggcactcgcatgggtgcccagaagtttcaagatctgaccttggagagaccaggtccgggaggctgccgggaagtctccatcacaccggcctcagccgagtcacaggaacgcaggctctgccatgcccagaagcctgagatgcaacttcaaggacaacgggagccagaacgcttgacctcacacggaaggtgactcctaaccaccaccacacttgacgtagcaccagcacacggagattaggcctacaccaatggctaattgagaccatgcatcactattaaggcatcttcagcaaaaggaactatggaagttctgcatgaaacatagacacctgttagaaaaggaactaaatttcaaaccgggaatgtggtgttgaatcacagcaaagtgtccagaaggaactcccaaagtactgttttccaaaatatagaatgatatagaagattgttttaggtggaattcctggaaataaatttttaaatgtttcnnnnnnnnnnnnnnnnnnnnnnannnnacntnnnnnctnngananagaaacctgcaacaccacgtttgggagtgtaaaattccaagataannnntctgggggggcccgcctgggcccctcaaaaaatttttttaaaccctttcctttggggcgcgcggggccccagaagggaaagggaaaaaggggccaataccgggtttcccaaggaaaaccccggggacaagaaaaaaggggtttggaatctcccacccaaataaaaaaagccgcccggggggggaaaccacgagagggtgtttggaaaa

SEQ ID NO: 90358 - DNA, 517 bp, Homo Sapiens
atggaatattattcagctttaaaaaagaaggaaatcttgtcatttgaaaaaatgtggatgaaccaggaggaccattatgctaactgaaataagccacatacagaaagacaaatactgtaagatctcacagatgtgtggaatttcaaaaagccaaactcacagaagcagagtaggatggtggttgccagggcctgggacgtgggggaaatagggagatgtttggtgtctgttaggaagaatgaataagctctggagagctaatgtacagcatagtgactatagttaatagaaccgtattatatacttgaaatttgtgaagagagtagatgttaaatgttttcactaacaacaacaacaaagataattgtgaggtggtggatatattaacttgattgtggtactcatttcacagtgtatacatatgtcaaaacatcatgttgcatactgtagatatataccatttttgtcaatcattcctcaataaagcaggaaaaattattgcattttccacatcaaa

SEQ ID NO: 90359 - DNA, 552 bp, Homo Sapiens
  misc_feature (107)..(107): n is a, c, g, or t
  misc_feature (155)..(177): n is a, c, g, or t
tatcacctgtgaatcccccatattgagaacatgcctggcacatagtgagtgttcagtaatcatttactcaatgaagtaaacaagtcttcatttcttttttctttgtntgagacaatctcactccagcctgggtgacagaatgagtccctcatttnnnnnnnnnnnnnnnnnnnnnnngagaattcagattacttttaaaaacataaatattctagtctttgatactgtgaggtggttcatttctagctttcttgaaagtgaaatttccccacatttgaaaatgttttagttcctaagtttaagttcttaaatgactcccgcgggcatccctaccccttagttttactctactttgtgaccctgggcaagtgatttacctctgtgtgcctcgattttccctcccgaaattggcaaaaataatacctaatttctccctacctcacagggatgttgtgaggataaatgtgttcgtgtaagaaagaaattatataaaacctcaaggtattatttttgtggtgttgttactaaacaaatataaaaattcaacaaaaa

SEQ ID NO: 90360 - DNA, 498 bp, Homo Sapiens
atgaagaatcaatttgaaattaagatgagtaaaggcatccagcacttacagcaaaaaacattgtcatcaggccctggggagatgaggacacctcccttcccttctcaggctccctttccctgtcagactctagctctcaaaggctgtcatcctccaagggtattccctacgtactgcatagcatctctgttaccctttgaattcaacagtattcatctcctccaacattcattcattcctttagtcaaaagtcagttgtcaaacacaaggcacaagtgcacatttaaggaattcatggccaatatttgtcatgtcatttcatgaattgtctgagaaacataaaacatacaatgaggatactgatccaagatacatggcacacaattaaattgcgaaaaacatgactctgagtccaaaagttcttattttttcacagtcttcagagtattgtatagaccccttgaaaaacaaatttgcagagtgtgaatgttaaaaaaa

SEQ ID NO: 90361 - DNA, 481 bp, Homo Sapiens
tcctttggcaactgcaccccctcttccttctccttttttttcaatctaatatgtgggacataccaagtgatgagatcctttctggcatcctaagaaaatgccaactatagaacaacagatgtagtctccttattaagtctgaagaccaaacttcttagtgcaaagcagtcaagtcttttctcaacatgaccccaatcaagcttttgaacttaacatcaaaatataacttcagaagaacgtttggaatagagctcagttcaaactcttcctattgcaaacgaggaaatggctacagaagcagagtgcccaaagaatgcgaatgcaactggcttcatcttgaaagcgacactctgaagaaattacccataatttctccctcttggacatgcagaattatcctgttcttgtatttttctggccagcttctccaactttccctttcttgtttgcaactaattaaactttatggataagaaaaaaa

SEQ ID NO: 90362 - DNA, 518 bp, Homo Sapiens
  misc_feature (227)..(269): n is a, c, g, or t
caggagagaatccagcagaatcttcagggatccttccagaccaggaagactctcacactctgcagagaagttgctgcttgtttagcatttgacctacattcagaaacgaccagcctcccaactttcagctctaaggattacttaaaaaaacaaatggtgttcattctcagatatcttgcctttctcaggagagaaaaatgaagcttgcaattagccagcaaactagnnnnnnnnnnnnnnnnnnnnnnnnnnnnnnnnnnnnnnnnnnnggagcaatgtggtatgttgttgaccagctggaagttaggatctcaaaggaaagaacaggataacttaagaggcacttctgggactgcagagctgagctggtggttctgaagagccatcggagtgtgggttcaggcagcttccctaattcagaagcagccccaagtgaatagatgacaaagaagtggatgtgaacatgacagaaaaagccagtcatggcttagaataaattttattattgttaattaaaa

SEQ ID NO: 90363 - DNA, 881 bp, Homo Sapiens
  misc_feature (309)..(377): n is a, c, g, or t
tcttgctctttttatttcacgtttcacaacacacgccgtggtggcacagtctaccaaagtgcccgcagcgccacgcttgggccggaaggtctcattctgttcgtctctatggactgattgaatttgggatggccagctccagaatgttccacgtgggggcactctgtgggcagagaggctgagcccttgcccacactggcaccaaagaggttgcacgatgcagcttgcagtgggtccaagccgggtgtgctgtgttcttcccgtttgggaaaagaaaactccattgtacctaaatatctgcaaggcaannnnnnnnnnnnnnnnnnnnnnnnnnnnnnnnnnnnnnnnnnnnnnnnnnnnnnnnnnnnnnnnnnnnncccatgaggctgtgtttcttctaatttcatttgtatatatctgattggttgctgtcggtgttgccattgctgttgtgttggtggtggtggtggcggcagcctttcccgggtggggaagtggcactcacatcaaaatttgagaagcaggtgcaagaccagaagaggcagcagccagacgcagcctgccctcctcgacgtgccgttgctcacctcgctgacggcgcctggaccatgtaagggaatgctgaaaccttgtttccaggctggggactctgcagctcgggagacgactgagagcgggcaaacaccccctgtggcagatctcaatggccctgtggctatgccaggcgctctccctgggtgcctgtgtttggtctccttgctacgcccctcagagttcttttgtggatctgctccatgctgggaagcaccacagagagcttgtaaagacgagtcgtgtcctcacctgtttgttgtgttagaaaattcttcctatggaagaca

SEQ ID NO: 90364 - DNA, 464 bp, Homo Sapiens
ttgaaatataattcctagttaattggtttaccattcattattacttctctttgaattcagtaacttatcaatgattaaagatgtgcttcaacaagttaattctttaagttcaaataactggaaaccattttctcaatggtgcagcatttcttaatgtcagttcaagatgtttggagacatattgctgattttagaagctgatgtgtgctgatttatgaaggaattgtttagcttgtactctgggctctgatcaagggagatacactctcagatacagcctggcatttaagggtacctctttcctagctgattatctgcttcctgagttcagttgtaatagcttgcgagcttctcccatcccatatgactggattctgatttcttattttctgatagcagggtaaactttgttctcccttattactaaacgttgacttgacaaataaatagacctcctgcatttt

SEQ ID NO: 90365 - DNA, 1167 bp, Homo Sapiens
tgccccgtcctgtcttcggggtgccgtgcgcgtgcctgtggccgtgtgttctcctgtccgcccttttttgctcgactttggcctttgctgcgcctgtgcggatgtcgggctctttgcgtggggatccggctttgccgggagttgtgttcttgtcagtggtttcgctccccggtattcttcactgcggactgtttggttgaccggcttccatgctctggcaactttgtcagctcgtaatgctgtaaaactgcatagagtctcgtccatagccaagttttatgagtattagttcacaatctctggcgaaggggtaaataactttctgaggtgtccttcgttggtaacaccagtttcgtttaccaactgctgaatgccctgaattatttgttggctatatttcactcccactttgatagcatggcaaaagtcctgctgtaaaatgttctctgcagaggcttccaacatgacaatctgacttttaggtgctccagcaaccactaaatttaaagtactagaagacatttcttttcttgttgggttaacaacatattctccatcaattattcctattcgtactgccccaacaggtccattccaaggaatatctgataatgagagggctacggaagcgccattaattgctaggacatcaggctcatttacaccatctactgctaacagattacacagaacctgtgtatcatagaagtagccagctggaaagagcggtctaattgaacgatctattattcgacttgttagaatttctttatcagaagtaccaatctctcttctcagatagtttgtgggaattctacctgctgcagcagctttttgtctgtagtcaaccaccaaaggcataaactgggaaggggaaggttttgttttactgaccgctgtgaccattactgcagtgtcacctgactgtactacagcagagccatctgcaaatctggccagctttccagaagatatttctaatttcctgttgcctaagtccacggccacagctcgagaccctgcgctactccatagtgctcgcacttgcaactgggtgagtgcccgatcccgccgtggcagaaggaaaggaccatcgctcaggggccggagccggaggcacgagcagcagtacctgcaggccgccatgacacccggcacgcggtcccc

SEQ ID NO: 90366 - DNA, 855 bp, Homo Sapiens
  misc_feature (75)..(138): n is a, c, g, or t
  misc_feature (207)..(219): n is a, c, g, or t
ctcaagataagtatgggcaacgtagcaaggcccatccctacaaaataaaaaaataagccaggcccttggcatgtnnnnnnnnnnnnnnnnnnnnnnnnnnnnnnnnnnnnnnnnnnnnnnnnnnnnnnnnnnnnnnnngtttgagcagtgagctctgatcttgccatttgtactccagcttgggtgacagagcgagaccctgtctcnnnnnnnnnnnnnggctagtttttatgacttcaacctgaactttgaaatttcttcatgtgccttccctacaggcctttcactgtggtctgggaaagaatcagtaagatgacagggctgacttcattagatgaggagcgtttctatccagtttcctggaggaataaggacactgccttttcagattaaagattgtctgatttagagaccatggaggtggacagagaataacaaaaccgtgatggcagtcatcatgcttattgcagttagcacacacttttcctgacaggcacagtgctgctgtgctctacaaatgaccatgaaatagagcacgccatgactttaggacacagggatttttatgggaagagagttcatcagggactgattacgtaggagagacgatgcaggggaaatggtggccaccgtctccattgaatagcaatagctgctgtttagcaaagactgattaaaaagtactctgatttttcaaatggaagagagaacagttaaatcagagtagagagtttaatcaaaactaccagtggaacatgttcttgagtaggattcacatttaactgctggcataatttgcaactgttggattttctcatgtttggaacaataaagttgaaattttccaaagtgaaa

SEQ ID NO: 90367 - DNA, 457 bp, Homo Sapiens
actaggaaagtgaaaataattttgaaaacgaacaacaaagttgcaagacccacctacttgatttcaagattttaaaagttacacaatcaagactattctgtattggtgaaagaatagatgtataggtcaataaacagaacagagattccagaaatagacccttacatatacatacatatagtgaactgatatttgacaaatatacaaagacagttaagtagataaaggagaatccttaaaatgaacctccatccatacctcaaattctatataaaaattaactcaaaatggatcataggcctaaatgtaaaacctaaaactataaaacttttagtaaaaaacaggagaaaatatttgtaaccttggattaagcaaagatttcttagatatgacatcaaaagcacagtcaattaaaaaaatgaactttttttcttcaaaaggccctatgaaaaggatg

SEQ ID NO: 90368 - DNA, 594 bp, Homo Sapiens
tgagcctgtcaggctgggcgggtccatatccgggtggaccgggtgggtgaggctgcccctccctccaggtcccgaggtggataaggggtggggagtgacgtgcagagattccctttcgccccttcggatccaagagagggtggcagaaggaatgcgtgggtgacttggcgtggatttagggcgtgcccaccctgcagatcggcctcctagagtgtcccgagggcctgagaggccgcagggacacgaaggaagagaaggcatttcccggggatttggagcaggcacgcgcggcccgggcgtccggagctgtagcagcagcagcagccgccgtgccggggccgccaccgcggcgggcacccgcgtcccgggcgcccacggaccatggagagggcagtccagggcacagacggcggcgggggtagcaacagcagcagccgcagcagcagccgtgctacctcggcgggctcctcgccctcctgctctctggcgggccggggggtctccagccggtcggcggcggccgggctcggcggcgggggaagccgcagcagcccgggctctgtggcagctagcccgtccgggggaggcggccgc

SEQ ID NO: 90369 - DNA, 478 bp, Homo Sapiens
  misc_feature (27)..(27): n is a, c, g, or t
tccgccagacaacgcggagggcctccntgagctgtgactttgctccgccggtgataatttccaggttactgtgtaggagcgtctggcgcagcatcgtgtgcggaagaccgagagagggagtgtgcgtgtgagcctgtcaggccgggcgggtccatatccgggtggaccgggtgggtggggctgcccctccctccaggtcccgaggtggataaggggtggggagtgacgtgcagagattccctttcgccccttcggatccaagagagggtggcagaaggaatgcgtgggtgacttggcgtggatttagggcgtgcccaccctgcagatcggcctcctagagtgtcccgagggcctgagaggccgcagggacacgaaggaagagaaggaggaacccgaagagggctcgcctagccggccacccgctccgaacttgcccgggaaactagtgcggagggaggggcagggccctggccgcggc

SEQ ID NO: 90370 - DNA, 936 bp, Homo Sapiens
cagtcgacggtaccggacatatgcccgggaattcggccattacggccgggggccctgcatgcgagttgggccgcgggcggggttggagcctactcggggcgactgcgatggacgccttagaaggagagagctttgcgctgtctttctcctccgcctctgatgcagaatttgatgctgtggttggatatttagaggacattatcatggatgacgagttccagttattacagagaaatttcatggacaagtactacctggagtttgaagacacagaagagaataaactcatctacacacctatttttaatgaatacatttctttggtagaaaaatacattgaagaacagctgctgcagcggattcctgagttcaacatggcagccttcaccacaacattacagcaccataaggatgaagtggctggtgacatattcgacatgctgctcaccttcacagattttctggcttttaaagaaatgtttttggactacagagcagaaaaagaaggccgaggactggacttaagcagtggcttagtggtgacttcattgtgcaaatcatcttctctgccagcttcccagaacaatctgcggcactaggtcctacctccagccaatgaatgggatcattctggatgtcaccagcccaataggctcagctcatgatgacagaacacatcttggaaagactgactctgttatgtaactcttcatttatgttaagtattaataggtcaaaaccaaaatgacctaaccctcctggacctatttatcctgaaacaccttcttgtattcattaaccatagtactcctccccacctcaagtagacacctctctcagggagcttctgagtcagaccgcctctggagcagagcctatgtcagcgcaactccaactggggggggcccttccccagcatacctgctggtgtggtaa

SEQ ID NO: 90371 - DNA, 460 bp, Homo Sapiens
ggctctgacagtgaaagtgaccgaagttactctcatcaccggagccccagtgagagcagcagatacagttgaaaacgtccggatacaaattatatcttatttgtaaatatctggcaacttagcttaagaaatgtaatgacagtctgttgttctatttcaatatcagaggtgaatttcaaaaatagacacttcttaattgttactggttcatttacatgtgggcagaagaatttaaaaatacagatatgtctcctaaaaatatttttatgccacattttacagtagccaactatggaaatgaatttcattttcttgaatcaagaaatcgtgaaatttatctatgtataatttgcaatattattttaagtctatttcactctatcttacgtatcccttagaatacagattctttttgcctgtttttccagttttagcatatatgctgccaagcatagaactg

SEQ ID NO: 90372 - DNA, 572 bp, Homo Sapiens
ataataataatccatttttgaggtatggtttatcaaaagtaaaatgtacccattttaagtgtacaatttgatgtttgacacatttatatatctgtgtaaccaccacaataatcaaggcataaaacattcccatcaccacaaaaagttctctcatgtgccttctgcatgacctttgaatagcccgttggatattcttgaaggtgaaaaacctgtttataaatatctgagcctagaaactaattacatatatataaacacaaaatatttttagcatagttttaatgtacacttgattttccagaaatgtaactgtgatgtaagttgagaacaaaatggtattttgttcagaattttgtcagaggtttgctattctggaaaaacatgtcagagacagcatcagcttcactattcatggcatttgagacaagaagtcaacattcctctatcagtctgcatttgtagctaccacatttatgtgattctacataaaggtgtaaacacctatttcattatatcttttatggtgttcatgtctgcacatttacatattaaaatatatattattataaaaa

SEQ ID NO: 90373 - DNA, 486 bp, Homo Sapiens
aggagtcctaaaaaattctggtaccttacattgagggtgtgggagaaagggtgtcatagttctgaaaataggcagtagcatgaagcaccagacctgtctcattccttattagatgtctatctcaaatgacagagtttgaaaaatattggttttatcatttgatatttccatgcctgactcgggaaaataacattttctgacttttttctattttcttgccctgcacagaccctacctggtacaattttctatttcttagctcaaagtgtctatacaatgggttgcctggtatgtcagctgccctcactcttgtgtaatagaaatatattgccaggctggggacgtggaggagacgaactggattcctccctcctcctgttgccaggcctctctgcattggcactttatcctttcagtgtttctggctgtgttgggttcatttgtgagactgatgtaacaataaagtgaaatcttcccctctgaaaa

SEQ ID NO: 90374 - DNA, 475 bp, Homo Sapiens
tgttcttgctggtttccttatccttgatgactcttacagaggtgctagaaaattattttcttttgccacttatgcaagaggcttggtgcagaagctgaaggcagtgtgtgcaaacactcccattccacacacgccccttcccctccccacatcaggtggtgcctttggagcacttttgtgtaggaaggaattcctgctgaactgtagctctcactcacccccaaatcattgaatgaccctgaggcccagttcctgtggtgcaacagtgctgctttctgctactttcaatgggaacagctgtacatgttgcagggcaggatttggttcccaagagcaaagactactgcagacacctgacttggtggttctcctgatttcttatctcctgaaaaatgctcctgctgttggtgtgtttgtttgtttgttccattttgtggaagtttttcatccaaactttaactaacttggcaaaaaa

SEQ ID NO: 90375 - DNA, 585 bp, Homo Sapiens
tcacttccgctcgccgcgccaccggtcccacctccccgccccccgctgggtcctagcgccggcccctgtttggcagggtccgggctccgtcggtgcgaggagccgacgccgacgccacggagtcagcacaagtctcatcagagaaaccccgttcaccaaggccatggaagtggaggctgcagaggcccggtccccagcccccggctacaagcgctcgggccgccgctacaagtgcctgtcctgtaccaagacatttccaaacgcgcccagggcagcgcgccacgctgccacacatgggccggcagactgctctgaagaggtggccgaggtgaagccaaagccagagacagaagctaaggcagaggaagccagtggggagaaggtgtcaggctccgcggccaagcctaggccctatgcgtgtccgctatgccccaaggcctacaagacggcacccgagctgcgcagccacgggcgcagccacacgggggagaagccctttccgtgccccgagtgcggccgccgcttcatgcagcccgtgtgcctgcgcgtgcacctgtgcctcgcacgctggcgaactgcccttcc

SEQ ID NO: 90376 - DNA, 983 bp, Homo Sapiens
ttctgtcggttgcggaaatttccgcctggacagagggtttcccgttggccctcatgtcggagtccctggttcccatggctttccccaacgttcacaacttaggccccagccagcggtgagtacccggtgccttcggacactgaaggtcaccaagctctgccccagtcgcccaggcgtaagccgctcgcctgtgtgcccacgctggtggatcttgagcttggagagcgcgccataggccttcgggcagtgcgcacagcggaagggcagttcgccagcgtgcgaggccaggtgcacgcgcaggcacacgggctgcatgaagcggcgccgcactcggggcacggaaagggcttctcccccgtgtggctgcgcccgtggctgcgcagctcgggtgccgtcttgtaggccttggggcatagcggacacgcatagggcctaggcttggccgcggagcctgacaccttctcccccggggcaccccactgctcctgcccacactcctgagatccacccccttctcctgggcaggaagcctgggagaggaggctgaattccaggctggctgggagtagggaggagcggggtgggccgcctggtgtggacggtggtcggggaagccaactaggagatgggccagggagcgtttacaaatcttcagtttcatttgcggaggcctagccgtgaccccgcgcccaccccaaacacggatctgattcccacttgacacactttcccactggtcttagtctcacccacccgaagccagcaaccctctgcggaaaactcacacctacctatatccatccaccctgagcagccctccacccccaaatcgccctccgacgaccgccacccccccagttcagtctccccctcccatccctgccggccctcgcttctcccctcccccgtcggagtcagtccctctcttcaacccccctcgtgccgaattaaacacccgggcctcgtacctagccctatcttta

SEQ ID NO: 90377 - DNA, 683 bp, Homo Sapiens
tcttactctccgtcccagttaagacattatcacacatgttgatcatgtggtagcccagcccaacagccgagtactggtccagaacgtcatgatgggccctaattcggtcatgtcaacctatggcagccaggcatctcataacaaaatgatgaatcccagctcccatacccaccctggacatgctcagcagacatctgcagttaacgggcgtcccctgccccacacggtaagcaccatgccccacacctcgggtatgaaccgcctgacccaagtgaagacacctgtacaagtgcctctgccccaccccatgcagatgagtgccctggggggctactcctccgtgagcagctgcaatggctatggcagaatgggccttctccaccaggagaagctcccaagtgacttggatggcatgttcattgagcgcttagactgtgacatggaatccatcattcggaatgacctcatggatggagatacattggattttaactttgacaatgtgttgcccaaccaaagcttcccacacagtgtcaagacaacgacacatagctgggtgtcaggctgagggttagtgagcaggttacacttaaaagtacttcagattgtctgacagcaggaactgagagaagcagtccaaagatgtctttcaccaactcccttttagttttcttggttaaaaa

SEQ ID NO: 90378 - DNA, 499 bp, Homo Sapiens
tctctttccagtacctcctatctatctagataatacggaagccagggagaagaatgggaacccaagatctatgagcccttatggcatatgaaaagtgggtgttatctgaaaagtagaactctagatgaaaccaggcctttcccaacaatggagcccaggacaatgctgtcttcaatgtccataccattagacttgttatagatgagtttctataatgatggctttctggttaattaaaccttctgaatgattctgtgtaacactgacttctgtgattcatcacagaacaagtcttccttctttcatggagtattactgttttcagtgactatatttggttgtttactctttttggcaccaatcacccagtgaatcaacaaccagagttgcaaacaaattaccctcattgtcttttccgagtcccttaatttactttatttttcatttgttgcaaatgtcattgtttctgctaatgttgttttttaacatctgccaagat

SEQ ID NO: 90379 - DNA, 432 bp, Homo Sapiens
  misc_feature (59)..(59): n is a, c, g, or t
agtagcagagtcatggcagagaagccctgctatttactgagaaggctaactctgcaggnaggggtgggttgaggggatgagaaagaagagctctattttggacatgttaaatgagaaataccaattagttgtcttggtagagattgagattaatatagttcaagttcctgacataataggtcctatctaaaatgttagtttccttagcttcccttttgtggtatttgacgtttttaacaactccctccttctaaaaattctgtttccttagctttggcaacatctttctgtctttattccgtaatctttgacacattttatagttcctcttcttggatactttccttgcacgttgcccttttccagtattttgtttttgaaactcttctcaggtttaacattttgttgcttatcctttcagtcttttacttg

SEQ ID NO: 90380 - DNA, 381 bp, Homo Sapiens
tcttcgcgctccgcgtcaaatctctccagctctgttctcgcatcccgggtttagatcccgcagagttaagtatcccgcgtgtgaagggatgaactgagactcccagagggcataactgatggaggcacgaagatgtctgctcttcagctttgccaagtatggtgtaaggggctttggggaatccagacagacctggacttcacacgcccgtcatttatttcactactagtgaaatgctggcgtagttacgcctaagttctctgagactgtccctcatctctaaaaccacccctcctctggtgaactaaggatggcgataacactttatgtaaagtgcctggccagatactcaataaatgttaattttccaagcttaaaaaa

SEQ ID NO: 90381 - DNA, 521 bp, Homo Sapiens
cgtgatcccagagctggcagccacagtggccacatttgccatcaccacactgtggcttgggccttgtgacattgtctacctgtggtcattccttaactgctttggcctcaactttgagctctggatgcaaaaactggcagagtgggggcccctagcacgaattgaggcctctctgtcagtgcagatgtcccgtagggtccgggccctgtttggagccatgaacttctgggccatcatcatgtacaaccttgtgagcctgaacagcctcaaattcacagagctggttgcccggcgcctgctactcacagggttcccccagaccacgctgtccatcctgtttgtcacctactgtggcgtccagctggtaaaggagcgtgagcgaaccttggcactggaggaggagcagaagcaggacaaagagaagccggagtaggagggagcgggtagagggatgggctctgctcagctattcttgggccagatggggcctgaccgatagaataaaagacttttctacaaca

SEQ ID NO: 90382 - DNA, 458 bp, Homo Sapiens
tgggtatttcttcaatttcttgtcttttggattactattcaggacaaccaatctctcaagaaagggtcaagtacctatcctagctgtggaacctacagaaccttacttcagaagcccaatatgagtaaacaggaaaaggggaatattctctggttgacaatggtgtggctgtcactggcatgtctgcaaaggaaaaactacaatgactgcatgttaaacacagcatcacagactgttaccactgaaaaattttgagaagctctccacttgaacctcttcatgtcatgaatcaggtgccagtggcttagcttgaattacagggtaaaagccatcactttctctatccttttaggtgctttctagaatcaaaactaaactttgtcatcaaaggcccatttataatagctgctttcctagctttttattctatgataaagaaggattgaagcatttttaaa

SEQ ID NO: 90383 - DNA, 1129 bp, Homo Sapiens
tttccagataggtgaaaacttgctcagtgtgccttccacagttgccacggcaactagcctatcacacacagctcaccttttcattcactccgtcgctattgtctttagaagcctcttcagaatgctgctttcctagagcaaccattgagcagtcattatctgttgtcttggcatcttgctttgaattctttttttgtcccatttgaagttggctaaacttgtaggccaaagccggtattgtgttcactaaaattaactgcaatggttttttgttttccttgtactgacactgaatataccgtgaaaaggctgacctataggtcttgttgaacagtgtgtagactagtgggttgactgctgaagagagataaccgatccaaacaaacacattgagcagggccccaatgacatcctcattgcaggactctttgcagatgacggccatgatgtttgtgatgaagaaagggcaccacatcaccacaaacaggaagaagacgatgcccagcaccttgcatgccttttgctcattgctgatggactgcatagtcctcctgcctgtgtaggaccctggctccctatggatcgaccgctggaagagcttttctgaagacaaagaactctgagggaggaagctgaaagaagctaatttggcccgtgtgccaagatcacttacacacaaagtagcttctttctggagtgacttgatagttagaaagtaggtgatcaccatgatggttaagggaatgaaaaatgacacaaaagagccgatcaggacaaagttatcatcggcgagtaagcaactcccctccttaaagaccttcgaatcgtcctgtagcccaaagactggtattggcatggatatacctggagttgaacagaaaatgaaacatgattattaaggaattaagtatatgaaggcaagagcatcatcacataatattggctattgaaaagattttatatcatcgtttaaaagcttaacatactttgagaatttaaaattcctttggacttacatatgtgttttgtaagtatatattatgtagttacttgtatgttatattgccctatatagctaacccttataaagaagtataataaatctagctttattttttatgccaaaaaa

SEQ ID NO: 90384 - DNA, 496 bp, Homo Sapiens
  misc_feature (13)..(13): n is a, c, g, or t
taaaggtggccantagagaatcccaaaggcaaagcattccctgcctcccactatttaggcccttgtgtatttctttctcacatgttatcagagttagtctatacgaccagtagagtacagcagattgatggtatatcaatcctgagtctagattttgacagacaaggcttctgtcctgctctttcttggatcacatgtccactactatgtcatgagaacactcaggtatccccatggagaagcccatgtggagagaaactgaagcttcctgccaacagccattaggaacccaaggcctccagtcagaaattaggcgacattgtggatgtggatccttcagcctcagtcaagatttcatatgactgtaggactggttgacagcttgactgtaacctcatgaaaaaccctgagccagaatcacccagctgtgcagctcttggattgctgaccctcaggaatagatgtatgagataataaatatttgatgttctaaaaa

SEQ ID NO: 90385 - DNA, 500 bp, Homo Sapiens
  misc_feature (29)..(29): n is a, c, g, or t
  misc_feature (37)..(37): n is a, c, g, or t
cccatcaagccctttttttcctgcttccntgaggtangagtgtatgacctgacacaatatgagcactgcccagatgatgtgctagtcctgggaacagatggcctgtgggatgtcactactgactgtgaggtagctgccactgtggacagggtgctgtcggcctatgagcctaatgaccacagcaggtatacagctctggcccaagctctggtcctgggggcccggggtaccccccgagaccgtggctggcgtctccccaacaacaagctgggttccggggatgacatctctgtcttcgtcatccccctgggagggccaggcagttactcctgaggggctgaacaccatccctcccactagcctctccatacttactcctctcacagcccaaattctgaagttgtctccctgacccttctttagtggcaacttaactgaagaagggatgtccgctatatccaaaattacagctattggcaaataaacgagatggataaaaa

SEQ ID NO: 90386 - DNA, 812 bp, Homo Sapiens
  misc_feature (310)..(332): n is a, c, g, or t
  misc_feature (429)..(429): n is a, c, g, or t
tgagtcatgacaaataaataataaatttttattagcgtcttttcaattctacaaattttaaaagtcattatacatttttaaaggttactaaaaatcactgaaatatgtctccacttaaaatggaatcaaagtaatttatacaattttcacctttaatattcataatttatttaaaagtagaataaattttaattctaaaatgattattacatctttttagaactgaaattacatttcaatgagtgtagctccactgtagttcataaggtttatacttaagaaatatttaattaacaaattaatttatacnnnnnnnnnnnnnnnnnnnnnnntgcatacgtataatgagacagtttatgtatggtaattacagatttgaaattaagtctcctttgcaagatcagtgcgccggggactggttaccccccnaaattatcactcttgggaataggaaccaaaaacaaaaatgacttggaaagaaaaatagtagtttaaaagtgaaaaggactcttccccttattttaaaatacataaaattttctaaaacgtaaaatggaaaggtttaatacacaggaaaaacactgcacaccttaactaaacaaactagaaagaaaatatatttatatacagaactaagatgagtccattcattatttttacaaatattcacatagatggtttagagataagtagttaagtgtgtctcattaattaatggatgctttctagcctctgtcttcattaattttatttcctattcaacaaaaaataatgctttcaggatatattacatatagagcaatatcattttt

SEQ ID NO: 90387 - DNA, 1909 bp, Homo Sapiens
  misc_feature (290)..(343): n is a, c, g, or t
  misc_feature (1183)..(1218): n is a, c, g, or t
tattcaaaattaattaaaagtagaataatgttaattctaaatgattatacatctttttagaactgaaatgacagttcaatgagtgtagctccactgtagttcataagtttaatacttaagaaatatttaattaacaaagttaatttataccaaactaccatactaaaaaaatgcatacgtataatgagacagtttatgtatggtaattacagatttgaaattaagtctcctttgcaaagatcagtgcgtctggactggttaatccactaaattatcatctttgaataagnnnnnnnnnnnnnnnnnnnnnnnnnnnnnnnnnnnnnnnnnnnnnnnnnnnnnngactcttccccttattttaaaatacataaaattttctaaaacgtaaaagggaaaggtttaatacacaggaaaaacagctgcacaccctaactaaaccaacttggaaagaaaatatatttatatacagaactaagatgagtccattcattatttttacaaatattcacatagatggtttagagataagtagttaagtgtgtctcattaattaatggatgctttctagcctctgtcttcattaattttatttcctattcaacaaaaaataatgctttcaggatatattacatatagagcaatatcatttttatcagtaatttgtctgaaaaagagaaaaacttaaaagcagaaccctacaaagcaaagcaaactacaaagcaaagagtaatcacagtgtttgcaaaatagaaatgtgtgactttaactttatagcaggctgcctaattaatccagacagtagagaaagcagactgaggcaggaagtaagaggtgggactaaactgttaagaagataataatttaaaataaaacttcagaatccttattctagggattcctttaattccactttgcaacttttaataggtacactaatttacacaggacacactaccatttactatgtaacattaaagctttcagtttaagaaactggtcaccaacgaagtgagaggcaccagggaaaaaagccaacctgctgaggaagacaaaagaggggaatgacagaaggaagctggatcttttataatgtagtttagtcactatgctgatactggaaccatctacctctacatttcctgctatgagaaataatgtctttgtctttaaatgtcttttttnnnnnnnnnnnnnnnnnnnnnnnnnnnnnnnnnnnnttttgcataagattcattttaaaaatcttttttccttaaaacaaaaacgattaaaaacttgggttttctaaagaaacttatattaatatgaagttacgaagatacacaaagctgaagtatctggaaccatttggctgcctgtagtcttcagcaagatcacaaagtactcaaaaactctttgaccttttcaaccagactttcatatttgtctttaaagtcttcattaacatccagtgttaagataggcacctcttgaagataatcgaagttggttttcagtgtcctatgcaggagccagctttcatgtttataatgaagcttctctaaatattcaagaggaatgccttgctcttcatttcttccccgtaaatatattctatgtaagcatgtctctggagtggcttgaagataaatgattccatccaatccaaggctttgggccaaattggttattcatccagtcatgccagtcttgataaattgtccactctgtctcattcatgcattcagattcatacaaattagatgcaaaaatatacctgtcactatacacagatcgttcaaaaaataatacaggtttctctgcatctttgagcttgccattcagagaggcaagctgagctcttattcgactgagacaggcatagttggaaggtaaaagacatcccgggaatccggaccggtccagcct

SEQ ID NO: 90388 - DNA, 468 bp, Homo Sapiens
gagaaaaggcaggtctgtgtgtctgtcagaaaatggctgagcaatcgccaccatgctcccctcagctgggaatcagcaaagtatctgccgagcagcccaggccacctgcatacctgcagacccttgaacgatcagcacagacactggcctggggaatcccatggcctcccctgcagtctgctcgttctcagaacagggcttcactggaatcttttatcagacttagttccagaatccctgatgactttttccaaactgtgaccccctcttgggattcaggatgtaagttcccagagtaaaggagatggcatgcttggccagaaaaatatgggaaagcaagggtataagaacatcttcataaagggagcaaaaggaaatatttgcaattgatgatgccctaagaaggacaagcagcacctggcccaacagtgtaaaagaacagggtgacaccagccatcatggggctca

SEQ ID NO: 90389 - DNA, 514 bp, Homo Sapiens
aagagacaaggtcttgctatgttgcccaactggcctcaaactcctgagctcaaagtgatcctcccacgtcatgctcctcccacatcacatcactataggcacacaccactgcccctggtttattttgaacagttctttaatttttaggatattgtttcaagttactgtccttattgacaattttcccaccagtgacccccgtaccttgttcccagctccctctgccatgcccaggcaactttcagttgctgagctgaggctttaaaacttacataccccttaaaaataggcaacagagaaattgatttgcatctctcttttgtagtttacccctctactcccaagtaatattcctatttgtgatacattatttaaaaataaaagtaaagaatcttaaagttcttggctccctttttcattttggttaccttaagatttttttctaaagtgattcccccttcacttacaccactgaattttttaaatgtattatataataaatatatttttttac

SEQ ID NO: 90390 - DNA, 147 bp, Homo Sapiens
aatggaaaccaggagaaattgcagagaccatgttatttaaataaatagctgattatatagggtttattctaagaatagaaggaagtttagtattctaaatctgccagtttaagaaattaataaaggaaggcccagagcagtggctca

SEQ ID NO: 90391 - DNA, 1019 bp, Homo Sapiens
  misc_feature (106)..(106): n is a, c, g, or t
ttcttggagcacagcatcagagatcagactgtacagttgtcacagttcttgatcagtcagatgtcagacaagccatctgccacgcctcctgtgtcgtgtcactgcnagaccaggcatgcacagtgcacgcgatccgctgatagactcgtcctgccgcgtggggtgaggatgctgagcaggagctcgttgacccggcggtactggaattccagctcctcggggatgctgaagttgcagagcgtcaggcagcagttccgctgcacctcctggtaggattccatgccattcagcaccacctggataacctgccggcgcagcttcacactctgctctgagcggtactcggaatttgttaggtagaagagagcggcgctgcctgtcacttgaatgttcctgtcatatttgtggcacttgagggccgtgatgaccagcttcagggcccgcagcagctggttgcaacgctcgatgcgggcgatgtcaaaaagcaagttgatggcccgcgaggtgatctcaggccggtgctccgtgtaggcctcgatggcattcagcacctgctcttcgtttttgtcaccacttactttgtaggctggaatgtgcgtgaggcggcacagagagttctcaaagagcccgaggaactgcagcggcctcttcagagcccggaaaggtatgatgctgctcttggaaggctcaatgctggtctgccccgcttcctcttccatcttggagatgctgcagttctctaggatcatgtggccagagatgtccagggacattaggttccccagcttctgcacaaagaggctcagcacctcccgagtcagcttgaacttgtagtagctggagaggcggtctcgggagatgtccaggtgtcgcagcttgtgcagctgcacgatgacccggatgtggtcgtcggacaggtccatgttgtagaggacgagggacaccaggctgtctttccactgggtgaggaaggctgcgtcgctcgtctgaatgcctgagaggtccaaggcagccaggga

SEQ ID NO: 90392 - DNA, 415 bp, Homo Sapiens
  misc_feature (109)..(282): n is a, c, g, or t
tggcacgaggtttatttccccaaagtaacttgtgagaaatgtcttaggctagaatttgcttatatattttccatcttgcacatggttaaaacgtgcagtttcctaaacnnnnnnnnnnnnnnnnnnnnnnnnnnnnnnnnnnnnnnnnnnnnnnnnnnnnnnnnnnnnnnnnnnnnnnnnnnnnnnnnnnnnnnnnnnnnnnnnnnnnnnnnnnnnnnnnnnnnnnnnnnnnnnnnnnnnnnnnnnnnnnnnnnnnnnnnnnnnnnnnnnnnnnnnnnnnnnatgtcttgaactaacagctctgaataaaaatctaattggattctgaatgccacagatggagtttggagattgtttttcaaagcagaatatccatttgtggaataaaaaagtttatcattgttattacaagaaa

SEQ ID NO: 90393 - DNA, 596 bp, Homo Sapiens
tagatgattttgcagtctttgcacaccagtgtggccataggcttgttttctcctggactgagcctgcagatcctatgagcaagcatatgtcctgtgctccactagtcctagctggatcgtggacatattaccatcattacaaatatcaatagtttgtgattacttcaaacaatctgaagttgaaggaccccagatatccttcaaaacaggaatctgcaggcagatgctgaaaccatgaatacagagggacaactatgtccacaagatataatgctgagaaaggctaataaatcaagccaatctaatgtctaaatacagaatagaaaaatgtgtcttctaatttactttaaaatgatgactggatgaatacgtaaccactgctttgaatggaagacttcgactggaagactttttcacatgacccagggaaaggcacaaagaaacaaagcttgtgatgctctaaaataatcaattcatttggccaacaccatgcacagaatggaaagcttttgcctcatttttcttccccccgccttcagattttcaaagtgttttataaaagcaagtgctaataaactgtggcattaactagaaaa

SEQ ID NO: 90394 - DNA, 294 bp, Homo Sapiens
taactcactgatttccacttgcctgagatctattaggattcctccattgcagatgttctgacacactgaagctatgccttacctgacaagctaatacccaattccttctagaactcatggatttatatttctgttctctccccgctcttgtccagacctttacatcctggattctttaccatttctgcccccaggactcttggatattgcattgtcactcatatccataaaacacgttaggaactggacattaatatgttaatgttattcaaaacacatccatggaagctcaaa

SEQ ID NO: 90395 - DNA, 241 bp, Homo Sapiens
gagcctgacgttaatcgtttacatgttgaaattctcttgccacttagtgaagcagtcattggggtaacaatgctacgttttgtgtccgattcagtgtgtaaacgttggtggttctatgtaatactgaccccaaggaaagacgatcagatacaaagaaagatggttaaatctaggaggttgggtgtttgggggttttgttgatgttgttctgattgggataattcagaaattcctaatatta

SEQ ID NO: 90396 - DNA, 504 bp, Homo Sapiens
tgttctgaagttttacagatggtcactgtattggatataataattttgcctagatttttaactgagggggtttgagaaccaagggacaaaatgtaatgtgttttcaaacttcagcttcccttctgctgtaactttcacaaagtatctcctgaaaactcctgtctttgtacaaaattcatcaaagagacagtggagactggggaatttttgaggttgtattcggattggtgtcttcaagggtccctttcagttcgcagtccaaggtgccagggactaccccgtcctccctccctcttctggctttgctctcctgagtccttttgccttctcttcccccttcttggattatcttttcattctcgatgaggttcccacacactgcggtgtgtgtctctgaaaacccactggagacctagcacaactctccgtacatcccgtggtgagaacagaatgaaagatatattgtttaaaaagcaataattaaaatctagtcttcaaaaaaaa

SEQ ID NO: 90397 - DNA, 941 bp, Homo Sapiens
gactccagcaggcttgccttcagtcggcagacgagtacagatgatgagtgctttatccccaaggagggggatgattttctgaggaggtcatctccaaggaggaaccggagcatcagtaacaccagcagcggatccatgtctcccttgtgggagggcaacttatcaagcatgtttgggaccctgccccggaagagcagaaagggaagtgtccgaaagcaactcttgaaatttatccctggccttcatcgtgctgtggaagaggaagaaagtcgcttttgacggattgtggtgtcctttcaaattagcttatttcacaaatatctctagactcacccagatcccagcttggtgggaaagtgcagaagaattgcaaaactgacatcccatttcacagcaatagtgacctttatttaaattgttgtgttatagtttatgcttcttaaatcatttttcaacctaaacagccaatttctaagcagacaggaaaactaaataataagttaattaatataacaaagatgcaggttcctgctcattccagtaatgtctttgaaagcaaaactaatatttattttctagattatccctgtgaataattgagaactttttggagtcaagtatgaataaaggtgtggcagaatataataatctggactattttctataggataattgctgggttataaaatcttaggtttgcttatgcccagtagctcctgcggaggcttaataataggcaattttgaatttgttcaaacctgtaatggcttgtaaacaaagatgaccatcagctgtttctcacatctatagtgacaataaagcgggaagtataagatttaataggaggggttaaggttcatgagaaccatggaaagatgtggtctgagatgggtgctgcaaagatcataataaagtcacctttatagacagtctaaaaaaaa

SEQ ID NO: 90398 - DNA, 416 bp, Homo Sapiens
cttcctggaatgaacaatatggtttatttatagttaactgctgcatctaggagacccgcagaactctggttgggtcctgtccccctagccagtttggtctgatatgctctgaaccctcttcttgtcctgctggatcagcactgacaacaagtcttcttctgcagctcctgccactgttaatttggacccgtcacttccttgcagtagagctgataggccaactgcagaaccgtagtctgcctccaactgttcactctagagtatacagatgtctccctgtgtttcttctactttagatatttcggccatttgctatcacacatattcatgcgaatgcaggaatttcacgaggtacaattctcttccaatgtaaacctgttctgtgaatgccttctgcaataaaatccctctacaaa

SEQ ID NO: 90399 - DNA, 542 bp, Homo Sapiens
tattcagccatgccaattgacctactaccctctccatagccaaaggaatgcccaaatttccacagaaaggcatttttatatgaagaagctcatccctgtggacctttctcttgaatgcctactatgagtcactcagcaagagaggcacccagctccctcaaggtctgcagtgcctcggaggcccacttccctccatgaaacagtctctgaacatattattcctcacggatgatcaccttcttaactccatccagatgtgtgcctctgtctcactatttagcgtcgtcctagaaaatactgagtaattgtttcatgcgtatacatcatgtttcctcaagtagaatctacctttatacaatcaaaagtgtcagattgatggatgagtagcaggtaaatttctgataaacagaattaaattaagtgttaattgtagaatctagtgatgggtttatgggtcttaactgtaaaaatctttcatcttttctgtatgtttgataactttcatataaaaataataaaaactttagtttatcttcaaaaaa

SEQ ID NO: 90400 - DNA, 432 bp, Homo Sapiens
gcattaaatcttcttttgtttctacaaaggctccccaagggttggctaaccttagagatgctatgtctcttgcacctgcagtcacttatcccgctctatcaagcttgcacttggccagcccatctgcccctcctgctgaaggtgatgcatgggatccatgctcggactgttgtaaaccaagttctgtgatacgtcaattcctggtgttgtcctatttgaatatcctaaatttcccataagagttgttatgaatgtaacatgtaaatttactatcactgatgattcctctgaagaatttcatgcaaccaccagaaggtgcaagatcctagagatctacatatcttaggcattttccaggagtactccttcaactgtcgccctgcacctgattaagctggatatactatagtaaaacaatatgtaacagaaaaa

SEQ ID NO: 90401 - DNA, 511 bp, Homo Sapiens
taaggatccaaaaggatctgcaggatgcctcaggcctgcctagtcatcgtaggggtgagaaattctacactgaataagactggttgggactcaaagaagctacaaggatgcacttttccagcacaaacatgttctaggttggatgatcaaatgcatatgcctagcaattgaaatctccaactaggaacaaaaaactaatcacaaaaagcaaaggattcactttggtgttcacagtaggagcaacagcagcatcttgtttgcagttctggtagcagcagcagctgcaatggcttcagccatatcaaatatcctgtggcacagagggcttcgaggttaagagatacaaatttgcttaccgcatgaactttgcagtttgatttttactttgatttggtcaccttgctttctttgctcttgattgttttctagccctacttctgtgactacattaaataattctttagctaataataatccttccaataaattcactcttctgcttgaatgaaaa

SEQ ID NO: 90402 - DNA, 530 bp, Homo Sapiens
tttttcacttattactaacccagcttgggcctttgcatgggaagagaaaaaggcttgctgggttagtaataagtgaaaaaagaaaaaccacgcattttcatattcttcattcaacgtatttactgaataccttgtgtgccaggccagtggagacaaagatgataatggtagttactgggataactcaatttggtgaacacatgatgtggtttggttattagtagagttacagaaaaggtagcatggaaactgagatggcctcgtgggtgttggaaggcttttcagcaaggggaggtgaatgttattaggtccaacctgaaaggtgcatatttcaggcagatagataggtgtttggcatcttataactgctcactttccttttccttagtaatctgaaagtaattcactggactgaatagttaatggttcccttaatagactcttgtccttggaaaaataaaatgaaatgactggggttctattagtaactgaaaaattgtcaacaattaaaactctaaaacctaaaaaaa

SEQ ID NO: 90403 - DNA, 455 bp, Homo Sapiens
gtacatgtttattgatttctgtatgagcctggtaataagctcactaaattaatgccacctaaattgttccttggtttactaacaaagaataaccatatttttatggtccaaatgccaggtttacataagaggctcatcaagaaggaaaggaaaaaatggttgcaacttaagggattttccccttccacttagtcctccgttcatagggcccaatagcttcctatcaagcatctcaaaatctttctgacacctggatttcaagattttccattacttaatgcatcctcttgaaagtatccccacacttttccactacccatcagcgggatgccattcagtaatggaagatacattccatgagagcaagaacctcatctgtatctctgtgcctgaaggagcctgacacatagtatttaataagtactcaataaaaatctgctttatgaaaataaaaa

SEQ ID NO: 90404 - DNA, 518 bp, Homo Sapiens
gcttccgagatttgaaaaacggtggctaatgatgacaacagcaacagcactgagcacagaaaactccacaggcctgggctcggctcatcgcacagcctccatctctggatgccctgattcaaggagattcaaaacccgtgtcactgctgccatcttcctagaatccctttaaatcctcatggatttgctgacattgggagcatcctgaaagagtccccatgctagggtggctgcagtaacaggttctccccactccagaaaaaatcaaatcagattgtgaatttattccctgacattaacacacggcattacaggagcatgtacatcacatggtcaatttattggcatgaggattatgtcatcggggaataaatgggaaattctcaaggtactttgctccagtaatcaggactttatttatctctaagctaaaagaggggattgacttctttaatgatgatcagaaaatgcttttaggaagattcctttcctattaaacaatttcttaaagttgcaaa

SEQ ID NO: 90405 - DNA, 473 bp, Homo Sapiens
cacaggcctgggctcggctcatcgcacagcctccatctctggatgccctgattcaaggagattcaaaacccgtgtcactgctgccatcttcctagaatccctttaaatcctcatggatttgctgacattgggagcatcctgaaagagtccccatgctagggtggctgcagtaacaggtacaatgagaaatgatggttctccccactccagaaaaaatcaaatcagattgtgaatttattccctgacattaacacacggcattacaggagcatgtacatcacatggtcaatttattggcatgaggattatgtcatcggggaataaatgggaaattctaaaggtactttgctccagtaatcaggactttatttatctctaagctaaaagaggggattgacttctttaatgatgatcagaaaatgcttttaggaagattcctttcctattaaacaatttcttaaagttgcaaaaaa

SEQ ID NO: 90406 - DNA, 453 bp, Homo Sapiens
  misc_feature (158)..(213): n is a, c, g, or t
  misc_feature (427)..(427): n is a, c, g, or t
tttgagaggaacagggaaaaggagaagttgagtgagaactaggaaatgcttgcttttgtaattggaggctaacattttcaaaataactacaaggtctagtcagtaccactcctggaatattgaacttgatctcgtcttggctcctaaaatacggatannnnnnnnnnnnnnnnnnnnnnnnnnnnnnnnnnnnnnnnnnnnnnnnnnnnnnnncaagggcgctagggtatccctcccagttcagacattcttagggaaaatagaacagggcggagacagcgggagaggcgggagaggaggagccagaaaacaaagcgaggactggtttcaggccaactccggtagcacgccctgtcggagagccctacaggcccgcgagcgcgggtcggggacgctaacgaaagacagtacatcgaaaggagcctgngctgggcccgggtcccggccctgagg

SEQ ID NO: 90407 - DNA, 393 bp, Homo Sapiens
aatcagaagagagtaaaaaacaggaattaaaacttcctcctgggactgaaataccctcacaaagagaagcaaatcagtgactgaaggtcaatagagaccatcaaggtatgaaaaggaaggaatcggattttccatactggaaacggtggagaaagtgcaaatagtgcctctgtagatactggatgcggcgatgccctgtgctcttcctcctctcacagtcctacagggtcttgaaatcggaaatggaatagcattctgcccagttttcacatcgtctacccttttggaaaagtatgcaggtgtcatatctttgaaggagctacatttttattactcatctaagatgttgtttaattgttcctatttataataaatatttgtgaaatattaaaa

SEQ ID NO: 90408 - DNA, 511 bp, Homo Sapiens
tgggaagctgttaataaattataacatttaggtcagcactctgcatccatgagtattgtagatatttatattttgtgagatattaacttgtttaagaaaaatccgattggattactatggaaaaagcaacttgcctgttctgtttctttgcatactttgtgacctaacagttttaacagacattctattatatgaatacagtttttttgatactattagattaacttgaagtttaataccaaatattatgctaagagtagaaaagctttctgctgacccctgatttcttagaaatatcccacataatccagcttatcccttttctgtatatgtttattcaggtttacctgatgtctcaaaatgaaaccaaattaagcctttttaaaggctgatgtgccatttgtattaagttatctttgtcattttaaagacatgaattccccaagcctaattcctacttaaggaagagagacaatttagtccttactttagaaaataaatacttaagcat

SEQ ID NO: 90409 - DNA, 133 bp, Homo Sapiens
aaaggacgttatgagaaggcactatgaaaagcctaattggaatagcattatgaaccatgtaatgcatgcccatgcacactgtgatttgcaaacatatgtccgctcttcaataaatgttacggctttcacagcg

SEQ ID NO: 90410 - DNA, 600 bp, Homo Sapiens
  misc_feature (72)..(112): n is a, c, g, or t
  misc_feature (116)..(150): n is a, c, g, or t
attcccctctttttttccccggttaccatggcgtcatatcaccattcctatagggcgctagctcgccgtccnnnnnnnnnnnnnnnnnnnnnnnnnnnnnnnnnnnnnnnnnccgnnnnnnnnnnnnnnnnnnnnnnnnnnnnnnnnnnncagtcgacggtaccggacatatgcccgggaattcggccattacggtcggggcactctgtgagcggcgcccgggcgcctgggcaggcgcctcccgagtaccggcgcccattttgcccgcccgctaaggagacccgtgcgcggcctactcgcttgggggacatttctttaagacgacatctccgcgaacgccggcctcttgagccagcgggacgctcttttgaaagcccgccccaaaacattttctggatatgccgcagaaggatccgtgccagaagcaagcctgtgagatacagaaatgtttacaagccaacagctacatggaatcaaagtgtcaggctgtcatccaagaactgcgtaagtgttgtgctcagtatcccaagggaagatctgtcgtctgttcaggatttgaaaaagaagaggaagaaaacctaacacggaagtctgcatcaa

SEQ ID NO: 90411 - DNA, 470 bp, Homo Sapiens
  misc_feature (55)..(55): n is a, c, g, or t
ggacaaataaaaaggacctataaaaggcatcaccaagcccaatggacagatgccncaggctgcacattctgtcagtgctgttctggaaaaggcccaaacacatgctgaaacatcgaaggataagaagccagccctcgggaaccggcaggagcactttgggccccgcacggccccaagtccagcctgccccgcctcctttggtgcagaggtccagggataccagcagcagccccgccacgcccctccaaggccaagaacacaggcggcaggggcttcccctccctgccagactacttcctgccgccacagccaccacccttggacgacccagagctcccgccgcccctggacttcgtgctccctccccccgcggtcgccaagaggcctcctaatgccccacccccgcaagagacacgaagcatcaatgttcagaagcagcaaataaataaaataaatgaataaaagtaaaa

SEQ ID NO: 90412 - DNA, 416 bp, Homo Sapiens
  misc_feature (191)..(218): n is a, c, g, or t
agagggaagaagaaagtgcaactgggaggcctttgaaaaataaataaataaaagaaaagccccttcaggtaacaatagtgagccagattctttcagaaccaagcttttcagatttgaatattgttcccacccgtccataaaagtccatctatagagaagatatataaatgagcgagtgagtgttgtggaannnnnnnnnnnnnnnnnnnnnnnnnnnnatggtgtgtataaagcttttcggggttggctgtagtgtaaaaagtaatgactttattacctctgaaaggttctgtggttcacatttaacagtcttctgaattacaattcattacacaattgtgtgcgctctgacgacggcaccctatcagggctgctatctgtggctatttccaataaataactggcaacattaaaaa

SEQ ID NO: 90413 - DNA, 427 bp, Homo Sapiens
atacagtgagtgctgccaacatctggcatactagaattgatctactgggcactgcagcctagtggctaaaagtcctgccacttactaaccatgggaccttggacatgttcttcaactgctgtgtgttatgaggattaaatgatttaatccataaaaaatgcttgaagaatgccaacatgcacaatgttgctccaacagccaagttatgatcttggaagagtttgctgtccagtgacttcctgatggcattcaaggttggcatagaacgctacctggcccatgggttactcgccatctaaaaccaaaaatcaggacatatttatatcttattgctatgtccaaaggttgatttttcttcacttggtgagcatcttctgtttggcatttccacatgtaataagttaagaactgatttgagaagatatcc

SEQ ID NO: 90414 - DNA, 1489 bp, Homo Sapiens
  misc_feature (1096)..(1105): n is a, c, g, or t
  misc_feature (1190)..(1199): n is a, c, g, or t
  misc_feature (1242)..(1337): n is a, c, g, or t
tagtagggcccggtgtgaatcggacgaggggcaggcgcgcggctccggctggggccccgtcttgggtgtccacgccgtcgcctgaccgttcgagggtttgatcgccagcgcagcctcgccctgcccagacagctgggccctaaggggatagccagcgcctttagacttatcttaaatcgggcatctgcatcaacacttatttctggggtcctccatggaaagcagctcccgaaacaacacccgcccggtccgccctccgctgcactggaaaaccgcccctggacgtttctgccgcagtgtccccctcacggagttccgtttgtctgcttggtcggttgttctctggagccccaggacccaggccgcttgtatgtgcctgcggccgcacggccccaacacgcggacttcgagcggtaccgggagacccgcgcggcctcctcggagtggacagtgaagcagcagctgggctaggcagtggggctgggcctgcccatggggacccgtccacgtctccaggacatcagcctgagcctcttcgcagcctcgttttctgttgaccgagttctgcaaggggacgtagaggaaccacagcgttcttgcgcttgagaccgctgtgattttctgacattttggaggcagaaatgcctggggaaaggcccacagatgcaactgtcatccctagtgccaaaagggaacggaaagcgattacccttgacctcaaattggaagtgttacgacgatttgaagcgggtgagaagctcagtcagatcgcaaaggccttagatcttgctatctctacagtggcgaccattcgagatagtaaagaaaaaatcaaagcgagttcacaaatagctactcctctgagagcctctcggttgactcgccatcgaagtgcagtgatggagagcatggagcagctgctgagcttgtggctggaagaccagagccagccaaatgcgaccttgagcgccgccatcgttcaggagaaggctgagtttgatgacttacagcgtgaacatggtgaaggctctcaaacggagaggtttcatgcaacccaagggcggcttgcgacattttcctgattccccctgccttnnnnnnnnnnagaagaaccggcctacctccccatttccgagtgacttgccccccttatacgcccgtaacggattcctccgaaagatggggcagtnnnnnnnnnngaggcgcctccccgccggcccttgacctccccccttccttttnnnnnnnnnnnnnnnnnnnnnnnnnnnnnnnnnnnnnnnnnnnnnnnnnnnnnnnnnnnnnnnnnnnnnnnnnnnnnnnnnnnnnnnnnnnnnnnnttgcgtgtccctcccctctctctattgtttctttacaccgtgccgccctaccgcccgcccctgtctcccatttattacccccccttcccttcctcttacccccgcgttacgccatccccttgattgatcgcctccgagacccctcaccaatc

SEQ ID NO: 90415 - DNA, 528 bp, Homo Sapiens
  misc_feature (157)..(165): n is a, c, g, or t
agttgttacacttcatcaaaagtacaaagttctgttcatcaaatgatgctgttaagatagggaaaagacaagaaacaggactggaagaagatgtttgctctaaggtacacctgacaaaggaactctcatagaaaatataaagaatccctcaagttgnnnnnnnnntcaatttaaaggggagaaaacttcagcacgtctcaacagaagaccaccaaatggccaataagtaagtgaaaatgtattcaatgtcattgctcctcaaggaactgtagagtaaaaccacaatgtgctgtcactctagacagtcaccaggatgattaaatttaaatcacaataacaaggctgatttcagatgtctcaccacaaagaaggaggataagggagcgaggtgatggatatgttaattagcttgatttaatccttccacattgtatacatgtatcagaacatcacattgtactccatcaatataatacaattattatttgtcaatcaaatattaataaaatcaaagatgagcaggtaaaa

SEQ ID NO: 90416 - DNA, 429 bp, Homo Sapiens
tgtcaagactgtggaatcaatggtagtttctcaacatgtgctttggagaagaagggaagacaacttatctgaggttctctatattccaggaggcctgaacctctgggattggatccccaggtgagcagctgactcagttctcacacctgctgccctgccctcattctggagtgactgtcagaaggggattaagcctcagccacctggcctagggctagtcctcctctccaacaacccagatcctggagttgtgtgcctagttttggactctcctttccatcaaatgactttccctctagaaagtcctttcgtctctcctgcaggcagcatctgttggattcaccctagtccaggattaatctagggccagagggccacatccggaccactacctgttttggtaaataaaattttatcagaacgtaaaaa

SEQ ID NO: 90417 - DNA, 498 bp, Homo Sapiens
tttctagctacactactatgcccaagacatttaatctcatagactgtgataaggtcagcttcccaaattctattcttctgttgatgacattattcccctatagttatcagggtattactccaggcttctttgtaaaaaacagatgagattttgtgatgcttgtttttagtaaaagggagctaaataaaacccttgaagactattgccaaagaaggatgggctttcaaagttaaggaaaaaggacagaattgatgactccctttccaaaggagatcaaaaaagggtcctggataatcggcaacctgcatcgtggttatctcggttatttagttagcatcgatttgtaatggtcaagtttcctgcttgatccattttatcacctactttaatattcaatgttactgatattaaaaagcaatacattggtaaataaaatgatgtaaccagagaaactcaacagaaaggggactattattcatgaaacctaacagcagaagt

SEQ ID NO: 90418 - DNA, 391 bp, Homo Sapiens
tcctcaaatgcgtccagctgcacctgacccaagcatgcttcccccatagggtgctggagatgatggggtgcctcttctcacccttctcccagtgagctccagcccctgccacaatgtttgctggtgttcacctatagcctttgcatgacacccagtgacacattagcccttccagtcctttcctgtggtcgtttttcactgaatacattatgactatctttctacataagtaaccattacatagaaaaacattgtcttttaagaaatgactgcatagacatactagaaggtaatcaaccaatccctactgactagttgtttccaacttaggtcctttcaatttttcacaattaaaaacaatacagttggcagtaaataatgtacaaaaaaa

SEQ ID NO: 90419 - DNA, 642 bp, Homo Sapiens
cttttgtactctatattttttcatgctgtgttacaaaatgttagagaagtctactgctttattcacttccaggtgatgagaagtcaagtcaaaaatcaggacttataacgtcaatctgtgcctttgggttcctgtatgatagaatgaatgaagccccccctccaggagagagccaccaggatacagcagagacgttgattcatgatggtagcatagtggaggggtcggcagatagcagtgtagaggtcaaaggccatcactgtgagcaagaacatctccgaagccccagcaaagtgtaagaagaagagctgtgcaatgcatccatcaaaagaaattatcttcctctccacaaagaagtctatgagcatttcaggggcttggtgtaatttgcagtttccatttcttcaatttactcttttataatatagcaattactgtgacagtcttggtgccttcaggaactatggggaggaggtagaagaagcctcttccaccacccgcagtggaggactttatcctgggtacatgttggtatgcatcagtttctgccctgatgtaacagtaaactaactagcagcatgagctgtaactacaaaaatcaatcctctggaggccaggagaagccaggtaggaacataagcc

SEQ ID NO: 90420 - DNA, 483 bp, Homo Sapiens
  misc_feature (339)..(352): n is a, c, g, or t
aatacaaatgatgtatattcttttctactcttcatgtatggactagaggggcttgcacataagaaaaaaatggctgagacccacaggaacaaagaaacaggacaggagttagatgcagagaagagatttcaacaaaagtttggaaaagatgctaacggtagcatatgagtcacagacagaacattggcacctttgtttaagaaactgaatgttaatgtcacatctgcctttggagattacaaatgaaatggctacctttctactggaaccctgaccagaagcctgccagttagtaagctggcttaagagatcaatctaaaatttacataaggcttttgnnnnnnnnnnnnnngaacccaaaggcacagattgacgttataagtcctgatttttgacttgacttctcatcacctggaagtgaataaagcagtagacttctctaacattttgtaacacagcatgaaaaaatatagagtacaaaag

SEQ ID NO: 90421 - DNA, 462 bp, Homo Sapiens
  misc_feature (22)..(22): n is a, c, g, or t
ctggagagtttgcccaaagccntgtaccctggggccaaggaggagaccctggccagctcctcgtgttgggactgcgctggcctgtccacccagaagacacagggctacctttctgaggacacctccatgaacagcagcctgcccttctgttcatggaagaaggccgctgctcagaggccgcgaagcagcctccgagccttcttggacccgcacagaaacctggagcaggagtccctcctgcccaaccgggtgctgcagtcggtcctgaagcaaggctgccctaaggggtaccatctcctcctggcctccgcaacactgcagccagataagaggtgaacactcgcgaacccaaggccaggggcacacatgggccaggcaatgaggagcgtccttccttgccccacaaataaaggcacatcccaggtggctgggacctgccagtaggtgtcacaccacaaaaaa

SEQ ID NO: 90422 - DNA, 918 bp, Homo Sapiens
tgggggggatccctgcttcgcggtgccaggatggccctccagatggcggcataccatcccctcccctgatgcgggtgtagatgaggtcatctcgagtggcataggtgagcagagtgtggagggtgaagctatggttcaacagccatttggatggtggcctgaatcccacattcagttcctgtagcccactgcaccaggcccctgtcccgttgaaagagcagttggaggctctggggccaggacataggtccgggcttcctcattcagccgctgtagagcccgctgcaccagggcctggtactcccgttccttccccgccaggatttcgcgcagccgatcagtctctgccctcaagaggctcagctgcaccatcagaggagcggggccctgctcgggctccaccggaagcgggctctgctggcctgggctctgctgggagtccccttcattactcagctcctctgacctcggtgagaccgcctccttctccacctccggtcctagcacacccagggctgcccgcacagcacggctgagcagtgagtccagaacgaacatccagtgtggacggatctggcgcttgcggaggatctgcttcaccgcatccgggaaggcaaacagcggtctgtgcagaagcgcaggcccaaggccctgggccctcagccgtccttgcagcgcccgcagctcctgggcgagctgccggcggttgggagtgtggatgtgtgccccgaggcagcgcagcagctcttccacatggtttctgcccagacgggccccctgctcttgcttctgctcctggtgcagattctccgccagcgctggcagctcctgctccaatactgcggccagcatggcccgacgcttgctctcctggtgcagcaggctcagccccgaactctcctccggagacgcaggctc

SEQ ID NO: 90423 - DNA, 646 bp, Homo Sapiens
  misc_feature (174)..(183): n is a, c, g, or t
  misc_feature (632)..(632): n is a, c, g, or t
ggtgctaatgggttaatgcaccagcaagcaaaatattttatgttttgggggtttgaaaaatcaaagataattaaccaaggatcttaactgtgttcgcattttttatccaagcacttagaaaacctacaatcctaattttgatgtccattgttaagaggtggtgatagatactannnnnnnnnncatattgtatagcggttattagaaaagttggggattttcttgatctttattgctgcttaccattgaaacttaacccagctgtgttccccaactctgttctgcgcacgaaacagtatctgtttgaggcataatcttaagtggccacacacaatgttttctcttatgttatctggcagtaactgtaacttgaattacattagcacattctgcttagctaaaattgttaaaataaactttaataaacccatgtagccctctcatttgattgacagtattttagttatttttggcattcttaaagctgggcaatgtaatgatcagatctttgtttgtctgaacaggtatttttatacatgctttttgtaaaccaaaaacttttaaatttcttcaggttttctaacatgcttaccactgggctactgtaaatgagaaaagaataaaattatttntagattttagaaaa

SEQ ID NO: 90424 - DNA, 537 bp, Homo Sapiens
ggactatatcgtgtgatatgagcttgaaaagtaatttacgtacaagtcttgaaagcaaatcaagttttaaaacaaagtagcatctactctgccccagccttgacatcttattacatagcaaatgctggctctttaatttccctaatcaagactggtcctatttagcccacctcctcaaggggtcccagcactagccccactccgacgcctgatgaagttccagaacagtggaatcaagcacagagatgggcacgcctctttacagaaccaaagattcagaactgtgccttaccctttgcttatgaggcggaggaggaggaagagaaagaacccccgcaaagagagatggcaacaaaggtaaaatgaaggccgggccagccgatcccactcaggctgaccacagtgagggagcagcattaaaatgagaaaggatcaggtctcgaagcccagcccttcccgctgaatctcgtcctttgcttcatccattccattaaataagtcatattgaaaataaattattattaatacaacagtaaa

SEQ ID NO: 90425 - DNA, 570 bp, Homo Sapiens
  misc_feature (22)..(22): n is a, c, g, or t
caggagctcacccagcccttcntgcagcagcccagcgcccctgaggcccctgcccagcagccccaggcagcctcctcactgccacagtcagactttcagcttctcccggcccagggctcatctttgaccaacttcttcccagatgtgggttttgaccagcagtccatgaggccaggccctgcctttcctcaacaggtgcctctggtgcaacaaggttcccgagaactgcaggactcttttcatttgagaccaagcccgtattccaactgcgggagtctcccgaacaccatcctgccagactccagcaccagcctgttcaaagacctcaacagtgcgctggcaggcctgcctgaggtcagcctgaacgtggacactccatttccactggaagaggagctgcagattgaacccctgagcctggacggactcaacatgttaagtgactccagcatgggcctgctggacccctctgttgaagagacgtttcgagctgacagactgtgaacagaaggcagtggaacagaagaatgtttttctgcaacagccaaaatagaatggaatagaatgaaa

SEQ ID NO: 90426 - DNA, 518 bp, Homo Sapiens
tgtttgccaccatccatcctggcttctatgggttccatcgggacacctttgcctatgaatgccagcctcagtcccaagcccattttcctgagggtgaaggggacttttattatataggggccttatttggtgggtcagtgctggaggtttacaggctgatcatggcctgtcaccaggtgatgatgattgaccaagccaaccacatcgaggccctgtggcatgacgaaagcctcttaaacaagtacctgcttaaccacaaacccactctcccttgagtacatgtgggattaaaaagtcgagggagtatacgtgggataaatacctggggggtttgtccaccatgataaactcaaaaaaatctggggtcttggtaaataacaatgaggaaatgtgaactgatgagggaagcttccagaaagagaccagagagggggtgattgccagtcagcccgaatcttcctcctgaaatgctaccctgatttaaaatcagctttacaataaagagtatgactccacct

SEQ ID NO: 90427 - DNA, 948 bp, Homo Sapiens
gatttgccagccggtagaggggattgataaaaagctggttgccagggagtgatcccagcagagagaggctgggcatgaagggatggggtgatgatatgtcaattaggcttcagctcctgctccagggccctttcatggaggcttatttcctaggtcctctcccaaggacaccctctccatgctctcaaccgcatcctcccctgagtctcacggtcagactacagtctatggcctacatcttccctctccccgagtcccaaccccagctttctcagttcctggctgcaatggtcctaggccctccactcaatttccaaaccttttgcctggtgccaccttctctacccagaactttggcctacctgtcagtcctgccctgcgtgtcacctcagcctggaagtccataggactgtgatgaagatgactgcttgcattttctgaatcactttgtcgatgagacatgcatcctattagatctaacaaagcttcacagaaaggttgttttgaagttgacactgaggaagatataagtgctctaggatcagtatgtgaggctgccacaaacatgctatagtctgcacattcttgcagagaggttgcagagtctgcttgggagagaagcctcaaaaacatggctggtgtcttggcagagtttgctctggcccccaggagggtgtacaaacagccttcatgagaaggtgacttgctggccactcttaaccactagaagaaactgatgccatggaactttgaaaaatcagaaagcaattccacaaaagaagaacctctgaagatagtagagcccaatgaagataaatgacatcgcccataggagggaacagtggtatcaacctaaaggggctcactgccctatgtgctggaggccaatactatgacaatgggtttttgagaaaataaaagctttgcattgagattcaacccctaaaa

SEQ ID NO: 90428 - DNA, 290 bp, Homo Sapiens
ctggtgagaggctcaggctgcttccactcatggcagaagcttgctctggctaacaaccactatcatcaaagttgtctgaggaagacctcctgttgctgtgactgacgggactcttggtggaagccctattcccatgtgcccatggctgcagctccccaaggaagcaggacattgttggattctctaagaagctcagaggaagttacttctcactgtggtgccatatgggatttgaagtcgttctactcatgctctgtttttcaataaagctgcttctgcctctgtcaaaa

SEQ ID NO: 90429 - DNA, 720 bp, Homo Sapiens
  misc_feature (164)..(200): n is a, c, g, or t
aatgatgacagtggtcccagaacttggaaaagttgtagggatttctaaactcaagcagattcgcaagtgctgtgcgcttgtcagaccatcagaccagggccaaccaatcagaaggcaacttactgtataaattatgcagagttattttcctatatctcacagtnnnnnnnnnnnnnnnnnnnnnnnnnnnnnnnnnnnnncgagttgacctcggtcacaaaagcagttttactatcgaatcaatcgctgttattttttttaatgtaatttgtacatcttttttcaatctgtacatttgggctgtctgtatgtttttatagctggtttttaaaaagcataatatgcctatagctgaaaaggaaacagggctgtttaagtcactgacttatgagaaagcaaagcactggtacagttatttaacaggcatacacaagcagggaaaagataatccatttagatctttaatgctttggaaatgcgtgtaacagtactgcaataatcacagctctgggaaaaacaacgaaactttcccttgtggagaggagggattttcctgctctatataagcaacatatttttagacattaaaatatatataattttgcaggtaattgttgacttttttaactatattaagtgttaagctgacaactgtcaaagaagaccatgttgtaaaataatttgactaaataaatggttccttctcctcaaaataataaa

SEQ ID NO: 90430 - DNA, 489 bp, Homo Sapiens
  misc_feature (70)..(180): n is a, c, g, or t
gagagaatctggctaagtgtctagcaggatgattgattaacaagatgttttgttttcatcatctcagagnnnnnnnnnnnnnnnnnnnnnnnnnnnnnnnnnnnnnnnnnnnnnnnnnnnnnnnnnnnnnnnnnnnnnnnnnnnnnnnnnnnnnnnnnnnnnnnnnnnnnnnnnnnnnnnacaactttctctgatctctgtggacatgcttaaaatggctgactcacacagcaagactatttaactgtgcctaaaatcaacccacattcagatgctaactgtaatcctattccctgatccatcaggaaaaagagtctgattgacataacttgtcaagtgttcgccccagcttctatcaactatggggaaggaagggccagaagaggtgtaaccatcatggctaccaggtttcgaaatatttacattacatactgcatttattaaaatacaaattaaatctgcaataaaaaactaattgaccattaaaaa

SEQ ID NO: 90431 - DNA, 523 bp, Homo Sapiens
tcatgatccaagcaaatgttccaggtatttaagccacatgctggagaggattataaatatccaagggaaacagagaccatctggagtcatccctacgttgtgaaggggtcccacaagagcccattagagagtttgtcacttcacggctgcctggctgccatggctccttccatcacatcctcagaagacagcagcccaagccaaagggacaaaaaagacctctccttggacctattgcttaccagaaagaaaaggtcccaaggcctccactggtctcactggcaaggactgaatcacatgtccatcaggattcacacccctgagcagggctccccgtcccttggacagaattggagttggggtaacaggaaagaaaagggtgttgcacagcgacaagtgcccaccacaggtacccacagcttcttccattgcacctcggaaggcaacaaggagaaaccccatcatttttgagagctttggtgtcattacatttcaataacaaaggtcatttcccttttaaaaa

SEQ ID NO: 90432 - DNA, 492 bp, Homo Sapiens
caatgtcaaagacagagaaatatacaagtagttaaaaaaaagtgtaccctattcctttaaaagccagggtaaatttaaaacctataattgataattgaaggtcttctctgtaaccctataacactccaataccactttgttgtcagtgtaaacaagggcatatcccgaaagcacagaggccactgataacccgtagccttcctatcaaaaatctttaacccagtaacccacgaatggcccagatgcattcagtctgtagcggcaatggctttgctaacagaagaaagtaaaaaaataacttttagaggaaacctcagtgtgagcatacctcaccagttcagaagtatcctaagtcaaaaagcaaaaagggagcttactaactcaaaaatcttaaagtatggggctattctgctagaaaaaggctgatttaaccattaaccacagcaaattacattaacctagcagatttcctaacaggggatttaaatcccc

SEQ ID NO: 90433 - DNA, 326 bp, Homo Sapiens
cagtgtatcctattcctttaaaagccagggtaaatttaaaacctataattgataattgaaggtattctccataaccctataagactccaataccactttgttgtcagtgtaaacaagggcgtattctgaaagcactgaggccactgataacccgtagccttcctatcaaaaatccttaacccagtaacccgcagatggcccagatgcattcaatctgtagcggcaactgctttgctaacagaagaaagtaaaaaaataacttttagaggaaacctcattgtgaggaaacctcattgtgagcacacctcaccagttcaaaagtatcc

SEQ ID NO: 90434 - DNA, 339 bp, Homo Sapiens
ccccacattcctgagaaatttgaggagatggacgtcagcctggaagaaagggagaagccgttccagtgtgagtttgagggctgcgaccggcgcttcgccaacagcagcgacaggaagaagcacatgcacgtccacacctccgataagccctatctctgcaagatgtgcgacaagtcctacacgcaccccagctcgctgcggaagcacatgaaggtccatgagtcctccccgcagggctctgaatcctccccggccgccagctccggctatgagtcgtccacgcccccggggctggtgtcccccagcgccgagccccagagcagctccaacctgtcccca

SEQ ID NO: 90435 - DNA, 528 bp, Homo Sapiens
aagtaatctactgtaaagtactctgccccttgaaagaagtattaaaaagagtgaggatggatttagaaaaaaacatgaatttagaaatattcaaaatggtttttgtggcagattcaatattatgaattcacagatatttaaagaatgagaaacatagtaattagtagaaatgccagaaacagttcctggttcctcttgtgtttgacactaagaaaatagcaagagtgtgaaatctcagatacttatgaaatctcacagatgtaaggactcaagtgtagaagaaaatatccccttcttacaaaaagaaatgtcaatttatggagtttgtgggaaatagggcaagaattcttatgcttatgagagccaagtagtcagtggaagagagtagagctcaaaactggattatcaccttagcaacttagaatagtttgaaatagaaaaaaagtatttaatttggatctggatctgttaagatatgcacagtctattttttgtatagtattggaaaataaaaatgctataatttgg

SEQ ID NO: 90436 - DNA, 673 bp, Homo Sapiens
aaagagtgtacaagatgttgcctcaagacctgaaaatgaatgagcatcatcccttaaagtgttaacacggaagcattaataaaccaagaacaatgagataaatcctgtttgcacatcatttccactgcgtcactcttccttgtctacattctgaagaaatcgcactgaaaacatatctaaatattcatactctttttgagcttaaatttcagtggccaatttcatactatattggaaagttctgtctaataagagcctgacctgtgtatcctgtatagattttcgccagcagagggtattgtcctgagtgccagcattttgggggatggtgaactgtatcagctgaggagctatagtctatcagttaggagcattattcctttgtcttggatatacttatgttcaaaagcaatttcttctccctcaagaactcattaaatgtattcaccaaattccctaaggttggcatacttcatgttatctggattaaaaatttaggactcagtctcccacatcaattgtctcacataggcagagtaatttttgaaggtacggtgaaattaataaataattttagtgaattggggccctaaagtaacaaagaatctggtccatgatgtttaggaatgaaaactataaactactgctggatgaatgacttcacgaatttaaa

SEQ ID NO: 90437 - DNA, 473 bp, Homo Sapiens
agaggaggatggtttggtcccaattggctgactgctgagggaagcccctgatgaaaatccttcatctgcatcattcaggtttacagactcctctcctccatttacaccctcagcacctaagaaaacaaatcagacagactcagcaatagctaaattaaataagaagcagctgtgaataacaacactgaccttatctcttgggcaatgttcgctataggttgtcaatggccctactatcaacacttcccctaaataatttaggggaaatcttaatctacacagaattctactatgctaatagatgttagtttagctttatttagtccagtttttgtacaactatccacaaacatatctagtatactgtcaatatttaggcatgtaaaacgactaggtaaaatacaacagtttgttaacataaatttttataatacactatcattcttcttctgaaatgaccatataaacctact

SEQ ID NO: 90438 - DNA, 488 bp, Homo Sapiens
agaagctgttttcagagattcagaggcaggcagatgaccacagcaagaagaacagacagaaatccgtaaggataattcgtctaagctaattatagttaaagcattactgacttataaaaactcaggattatgctctcaaaggcaatcacatttatattatttttatttaaaatatatattacatgtaatataaactatacacacaatatattgaactatatggaaattgaaactgtgaaatcccgtactgggctgcacctcttttattgactactattttcttaccacatttggtgacacagcatacgtgctcccaatcacattcaatgattcttaatcagttctcctaccactctcctccacacactgacatatgcatcaattattcatggctattatcctttattggcaaaacctgattcagacaagaagcagcacatagtttcttctatgtggaaaaaataaactatttttttaatatcaataaa

SEQ ID NO: 90439 - DNA, 728 bp, Homo Sapiens
aaacttaggtagtacgagccttggttgaattcggcacgaggctcaggctgccaggtcaggcccaggcctcaggaagaaggggaggcccctggcctctccgggatcagtcctaggacacaggctcagcctcaggttgatgggggatgatgtgctcccggggcctgcctcctgcacggggctccacggagcccagctcccagacacgctactaagtgcctagggttgcccgctgtggcctgctcccagggagcaacagagaggccaccaagcagaggcccgtggggctgaggatggagccgcccccagccgactccaagcccgcagagggcagacgccaccctggactgctctccctgcccagctgggcctctctggcctattcctaccttccaggcccactgcactcctgtctgggaggcccttatgagggcagcccagcccccgcacccacccccaaccagagaagcacagatcttggggagctgccccacaagccccgctggccaccgagggctgcagccgctgcgctgccggcttctccccaccaccctgccacctccactgtgatgtatgtccgctccctcgtctgttcccccaggatctcgaagtgactccgggctgagcagtggggcggctgggggaggggtgacgattctcctcaggctttggccctgcaagcaaacccacatatctgctctgtatgtaataaatgtcttaacgtcgtaaaa

SEQ ID NO: 90440 - DNA, 858 bp, Homo Sapiens
attctcttagcgcatgaccactacactgtggacgtggtggtggcatattacatcaccacgagactcttctggtggtatcacactatggccaatcagcaagtgctaaaggaagcttcccagatgaacctcctggccagggtgtggtggtacaggccatttcagtactttgaaaagaatgtccaaggaattgtacctcgatcttaccattggcctttcccctggccagtagtccacctcagtaggcaagttaaatacagccggctggtgaatgacacataacagctgtacaaagtggggaaaagacaaattgtccgaagtgctaagaactccatgagagaagatgccataaaataaacacctccctaatcctattatctttcaatggttaccataactaaacctatagagttacctggtcagcactgtgatctttttttctctccaaaggacctgcgttggacaacaataaagaaaaatttaacctatcatgcactgtacacatttcctgttcataagtttgggatttacataacccgcaaccaccatgttcctttgtatatgatgcagcagcataaatgtaagcttttatatcataagttctggtctttccagtcacatctggaaataaagcgtattattttcttgggaaaacatacttttcatatctcttgccccaaagattgggctgtaagccattttctagcaaaatgtctctatgaaggtttctaagtacctgaatggggtttgattctgaaatctttctacctgttgcaccgatattcaaataaaaatgatagacacagaaaggttggtaacttgggtttgtaaaatcagcaaaggcagtgtttcaaaaagtgc

SEQ ID NO: 90441 - DNA, 592 bp, Homo Sapiens
  misc_feature (89)..(91): n is a, c, g, or t
  misc_feature (149)..(198): n is a, c, g, or t
ggtggtaaaacctaagttaccggtggcattgaagtacgtaagtaagctcaagttctctaagttccatttcaatttaaacaagcactccnnnttatttttggtcttttggaaattagactgggaacacaacattgctactggcctacgannnnnnnnnnnnnnnnnnnnnnnnnnnnnnnnnnnnnnnnnnnnnnnnnncttttcttatggttactgggttagtgatgaaacccacaactcataaaccacacactatggaatatggaattattccaaaaagttcttcagagctggtaatgaaagcctaagaagtacactgttaaaattttaaaaagtcagtatgtttctcatttcagaccttgaagattactctgatattgatgttaaataatgaatttgcattaatgagtatcaatgcactttttgatttcataagaaaataaaactgtgatataaaattggaactactaaaaaaattgatgtttccctgggttaactaaatctatttttttgtgcttcttccaaatgtttaaaggtaacaaatgcatacaaatatttcaaaagtaccaataacagttatcaactttaatgt

SEQ ID NO: 90442 - DNA, 468 bp, Homo Sapiens
gcggacactgcgggagtgtcagcgttttattcactacttacacaatgcctgctggggcactggtgtggacctagacacagacctccaaagtaagctccttttgctaaaaatcaagaaaatctcacaagtatttggaacctgaaactttaggaacaagtagcctcatgagagaagttaaagactttgcactaaaaatagaaaccagaccaggagtcagcaaaaaagtgtaaaagagctttgaagaactaaaggcgtacattcaaacccagaaagatggagtagaaacccaccttcctgcaacagctgttcgtagatctctttatctatcgtcaagtcgatgtcattatatttctcaccacacttagataaatagctgtctattgagtcatatcgggatttactgatcctatagttattgttcttcaatggctaaagattaaaaatatatataaatgaatatgctataaa

SEQ ID NO: 90443 - DNA, 519 bp, Homo Sapiens
cagctgaatgtacatattttggaattccatctatgttccctttcaatttagcaaaataaatgctacattaccatttaaacagatgtctaataaatgcatattggaacctattgcacaaaagcataaaaaatgctcttcatccacataaaaacatacaaattaaaagctactcaaagtaaaaagaagcttgcaaaacatctcacaatttcattttatatgcctgtaaataaagctggaccactgaaaccaaacaattggatgggaaaatatgatagaaggcttaaaatagaataaataattttataaagttaagttttcttttttaaccccccaaatcttaaattcaatattatatattctatttgaattttctatgtccatgaaaactgcatcggtgagaccgtattccgggtaattagccccaatgaagtagaaaacgacgcataaggtgatttaacagcatttgttttaccagcataaatagttgtgaaaacttcttcacagtaactccatctgttt

SEQ ID NO: 90444 - DNA, 152 bp, Homo Sapiens
gggccgctccacatgcacagaatctactaggatttgtcacggccgggtggcaccgatttgttttgactatacaacaaacttttttttcaaaagtatttgttcagataacttaaaaataatataaaaataaacaatgaatttgacttttcctc

SEQ ID NO: 90445 - DNA, 491 bp, Homo Sapiens
caggtcatttctgaagaggacaaggtgaatcttggcttggaacaccatttttgggctcttgctactgaatgaatcagaaaggaattttttctgaagagcattagaaagtaaaggagatgttaaaataagttcttgaagtatgttttatatttatctaaaacactgattttaaaagtttacattcaaatgtgtattcaaaagaagtactgatttgtaattattatagtttgtgtgtatcatcccttttaaccgtgcctaacaactgtacttaaattttgttttctagtgtaacaaatgtttcccataagattttctagagccaaataatgggagtgaaaaattccttaagtgttatataagaaaatatattagaaaatcagctttggattatacgatttctaaaatatactaatacagaatcctcagtaatatgttttgaattggattttttctcagaactgttacataataaataatacatcaaccagaaa

SEQ ID NO: 90446 - DNA, 595 bp, Homo Sapiens
aattttggatcaacaaaaaaagaacatagcaggctctcaggtatacaaaacaggtaatattaagtaaacatacaaacttcacctttacaaaaaaacaaaccacacacacacatttctgttaatacaggtaaagcacaatatcttaccaaaaataaagaatttgggttctgtccaaacactggcagcagagggagtgaccgccaccacggcaccagggcacaccaacaacacagacagaagcggcaatgcatctcacgtgccgcgtgggaacacagcattctaggtgtgcactgcggggaacaagttgtcactcagccacaaacgggctctggggcaggtgccgcagggacggcgtacgattggttgacgcatagttctttcaaaatggcttaaattaacaaataaagcagggtaagggagaaacacaaagccagaaacatttaggaaatgatgcataggtaggtataccatgtttattttaatacatctcattagtttgcatcttgctaggaaaaataccgtcgcactgtcctgacagttacagcagcctgtgtgttatcggtgtaaatgtcatccaagagataattaaaaaaaa

SEQ ID NO: 90447 - DNA, 487 bp, Homo Sapiens
tcttgtgttctatgtgagagtttatgtggaggattatcttctggtgttgtgtccatcataagatgtaaaaagagaaatcatagttttatattttagtttctcctacaatgggtatgttaaataactatatctatacttagatatagtgcattgtctgtgtcccttaaagtgttacaaagagtttctctcaaaaggtccttaaggagagtgagagatgagagaggtgccttctctgtattagactcacacacatcagtccagttgaagaattggtttaaacttttaaatgagaacagaaattataattagtacctgaccaattgtgcctagatattaaagtatgttctctttagtactttccgttcaattaaatatcagtatattagggatttttttctacaggtgtatattttgttgaagagtcactttcctcaaccatttttttgtactgggcctttaaaaaaataaatccatccaactttaacac

SEQ ID NO: 90448 - DNA, 2101 bp, Homo Sapiens
ggaattcccgggatatcgtcgacccacgcgtccggtcagtatgtcatcccggggatgtttaaggaagtctatcagaaaatagagactgtgaatgaaagctggaatgccttagcaaccccatcagataagctgtttttctggaattccaaatctacgtatatcaaatcaccaccattctttgaaaacctgactttggatcttcagccccctaaatctatagtggatgcctatgtgctgctaaatttgggagattcggtaacaactgaccacatctccccagctggaaatattgcaagaaacagtcctgctgctcgctacttaactaacagaggcctaactccacgagaattcaactcctatggctcccgccgaggtaatgacgccgtcatggcacggggaacatttgccaacattcgcttgttaaacagatttttgaacaagcaggcaccacagactatccatctgccttctggggaaatccttgatgtgtttgatgctgctgagcggtaccagcaggcaggccttcccctgatcgttctggctggcaaagagtacggtgcaggcagctcccgagactgggcagctaagggccctttcctgctgggaatcaaagccgtcctggccgagagctacgagcgcattcaccgcagtaacctggttgggatgggtgtgatcccacttgaatatctccctggtgagaatgcagatgccctggggctcacagggcaagaacgatacactatcattattccagaaaacctcaaaccacaaatgaaagtccaggtcaagctggatactggcaagaccttccaggctgtcatgaggtttgacactgatgtggagctcacttatttcctcaacgggggcatcctcaactacatgatccgcaagatggccaagtaggagacgtgcacttggtgctgcgcccagggaggaagccgcaccaccagccagcgcaggccctggtggagaggcctccccggctgcctctgggaggggtgctgccttgtagatggagcaagtgagcactgagggtctggtgccaatcctgtaggcacaaaaccagaagtttctacattctctatttttgttaatcatcttctctttttccagaatttggaagctagaatggtgggaatgtcagtagtgccagaaagagagaaccaagcttgtctttaaagttactgatcacaggacgttgctttttcactgtttcctattaatcttcagctgaacacaagcaaaccttctcaggaggtgtctcctaccctcttattgttcctcttacgctctgctcaatgaaaccttcctcttgagggtcattttcctttctgtattaattataccagtgttaagtgacatagataagaactttgcacacttcaaatcagagcagtgattctctcttctctccccttttccttcagagtgaatcatccagactcctcatggataggtcgggtgttaaagttgttttgattatgtaccttttgatagatccacataaaaagaaatgtgaagttttcttttactatcttttcatttatcaagcagagacctttgttgggaggcggtttgggagaacacatttctaatttgaatgaaatgaaatctattttcagtgaaaacttgttgactttgagttttgctgtgtttgtggctagagtttgggatatttagtacagagtgaatctcacaccatatcattgggaagcctgaataaccttcatatgtctcccatttttaccaactctatcagaactgtacgggtattaacggaaattgttttacgggacccaattatgcttcgctctttccctgcttttgggacgcagacccacgaacggaacgagttcccgggtggccgttgccaccgatattaggtcctaacgaacaagcagattaacttcagaaaccataagagacaatatctcgccgaatttaccgctgtagccatcttggcaatcctaaatggcggcgtgttaatgtgatccacacggctagacaacaggttttaccgctgcagcgagctgtcaacgggacacccttcgggacgacctcgcagaccttcctcaagactttttgtggggaaaaagtctaa

SEQ ID NO: 90449 - DNA, 468 bp, Homo Sapiens
aattactcaaataacatgtattttacactgaaaatcatgagctccttaactcaaagcttttccttgttgtttttgtaactatttaccatacaattacttgtaaatgaaatgtataacataaatatgcgctaacataaaggaagatgtttaaatattttttagacttctgaaaaaagataaaactctcagtttttaagaacattgtatctttcattttatctttctttctcctccaaatatattaataactatccttctatttgttacgttcttttacttaaagggactaaagtataaatcaggtaattaatacacaaaactttattctgtcccttgcttgtagcactacttcattccagtttcctcagagtttattatataaatcagacagatttgtaaataagtattttacagtctacatttatttgattatgaaaatggaaacagaataaaatgtgaaaagataac

SEQ ID NO: 90450 - DNA, 515 bp, Homo Sapiens
  misc_feature (291)..(304): n is a, c, g, or t
ctctagttggcaagtctcacatattcatcagcaggagtggagggtgggggaaaactagaaagatgaaaacttttacatttttctgatgggttcatgtctctgattgggtcagctggcttcctagcctaagctgggatctgaataccccttctctgtagctgctagtgagccttcccatttagattaaagattgctttatccagcagtcaattaactctccagttatcagtactcccacaattggccagggcaacaataattggagttcatactgatgccctgaggcactgnnnnnnnnnnnnnntcccaaagtgccttctgagctgtctaaaagttacattgtgcttggtagatttagtgttaagtgtgcagtataattttctaatttattttctcaatcttttagcacatgtgtaagacactgtgcaaattttttgaaaatagagcaatactttttgtggaatactagctaactaattctgtcattaaactcatattttgaaaatattcagaaa

SEQ ID NO: 90451 - DNA, 473 bp, Homo Sapiens
cttttaaaaactactgaattgtctgagccttgaagacatttccagggagaagagataatctctcatttcacccacaggctggtctaatcataacctagttaaagatgtccttgtttaagaaccccattatttatttttagtttttaatataaattaacatgtgggtcattatatttctccttaaatgaggaaattttaaattttattgatctaacctttgaagctttaaaaaaggagaaagagggtaggggtgggaaactggcatactgtgtgtatagcactgccgattggctaggccactgtgtctctgctacaaattaaagaaatcctaaaagttttccttggtcatagagttggggaatgacagaatttttctttgttgtgaaatgtatgtacagagtagaccatctctagccctgtggtgaaagaggtacactcgaatgtttgcataaagcaagtgacaaatgaaaaaa

SEQ ID NO: 90452 - DNA, 338 bp, Homo Sapiens
cctcaagatgaatcatgagtaaacggactcgccttccttgggccaactgggattttacagtttcattttcaatcccaaacttttaaagcccaggctgagctacaacctatgttgagtaaagtgacatttatcagggtaagcaaggccccactaaaggcagtccttggaaaagccattaaatcaggatgcttacttcaaaagaaatacagcaaagctgaattagctgcccaacagcctaattcgagtatgtaccaaaaaggatcatgcatctatggaaaaagttctctgaactaagttctcccatttcaaacagaataaagcacccctaccccctgagc

SEQ ID NO: 90453 - DNA, 2303 bp, Homo Sapiens
cacagagccgcgccgcccgcaccacagaccttcgcctcgccccgccggttcctcaccctcggggagcaacatggataatctcagtgataccttgaagaagctgaagataacagctgttgacaagactgaggatagtttagaaggatgcttggattgtctgcttcaagccctggctcaacaataatacggaaacaagtgaaaaaatccaagcaagtggaatacttcagctgtttgcaagtctgttgactccacagtcttcctgcaaagccaaagtagctaacatcatagcagaagtagccaaaaatgagtttatgcgaattccatgtgtggatgctggattgatttcaccactggtgcagctgctaaatagcaaagaccaggaagtgctgcttcaaacgggcagggctctaggaaacatatgttacgatagccattcgcttcaagctcagcttatcaatatgggtgttattcctaccttagtgaaattactgggcatccactgccaaaatgcagctcttacagaaatgtgtcttgttgcatttggtaatttagcagaacttgagtcaagtaaagaacagtttgccagtacaaacattgctgaagagctagtaaaactcttcaagaaacaaatagaacatgataagagagaaatgatctttgaagttcttgctccattggcagaaaatgatgctattaaactacagctggttgaagcaggcctagtagagtgtctactagagattgttcagcaaaaagtggatagtgacaaagaagatgatattactgagctcaaaactggttcagatctcatggttttattacttcttggagatgaatccatgcagaagttatttgaaggaggaaaaggtagtgtatttcaaagggtactctcttggatcccatcaaataaccaccagctacagcttgctggagcattggcaattgcaaattttgccagaaatgatgcaaattgtattcatatggtagacaatgggattgtagaaaaacttatggatttactggacagacatgtagaagatggaaatgtaacagtacagcatgcagcactaagtgccctcagaaacctggccattccagttataaataaagcaaagatgttatcagctggggtcacagaggcagttttgaaatttcttaaatctgaaatgcctcctgttcagttcaaacttctgggaacattaagaatgttaatagatgcacaagcagaagctgctgaacaattgggaaagaatgttaagttagtggagcgtttggtggaatggtgtgaagccaaagatcatgctggtgtgatgggggagtcaaacagactgctgtctgcccttatacgacacagtaaatcaaaagatgtaattaaaaccattgtgcagagtggtggcatcaagcatctagttaccatggcaactagtgaacatgtaataatgcagaatgaagctcttgttgctttggcattaatagcagctttagaattgggcactgctgagaaagatctagaaagtgctaaacttgtacagattttacatagactgctagcagatgaaagaagtgctcctgaaatcaaatataattccatggtcctgatatgtgctcttatgggatctgaatgtctacacaaggaagtacaggatttggcttttctagatgtcgtatccaaacttcgcagtcatgagaacaaaagtgttgcccagcaggcctctctcacagagcagagacttactgtggaaagctgagaactgcccgatacacggcatcatcccatctctaatttcccctctgtcctccatccagcggcttcttccgcttcattctctaccataccacttgtgcatgcatgtgatgttctaataccaattgaagaaccactgtaggtacctccctaataagatttctaaacctatagttagtgtgatcatgactttgtcaaaggcaagtctccacccataaccgttctcttgtattcctgttgcttgagctacattaagtagaatgtgcatgttgtagtcctatgatgatgtaaacttggtactacataatgacttgctccacacatgcagtaaactacataatgatgtactggtaaactagaaacaaagaatgcagcaggatctgtctagcttattaaagatgaaactgaattggaaaaatagctccattttttggtgcttgggaagcacagtgaccaaaaaagttgtatggctgcttattcattagtctttcctactgatgtcaaatccatggtacctagagttaaataaaattccaatgctcttactctttaaaaaaaa

SEQ ID NO: 90454 - DNA, 796 bp, Homo Sapiens
gacggaggtagagggaggacacagagccgcgccgcccgcaccacagaccttcgcctcgccccgccggttcctcaccctcggggagcaacatggataatctcagtgataccttgaagaagctgaagataacagctgttgacaagactgaggatagtttagaaggatgcttggattgtctgcttcaagccctggctcaaaataatacggaaacaagtgaaaaaatccaagcaagtggaatacttcagctgtgtgcaagtctgttgactccacagtcttcctgcaaagccaaagtagctaacatcatagcagaagtagccaaaaatgagtttatgcgaattccatgtgtggatgctggattgatttcaccactggtgcagctgctaaatagcaaagaccaggaagtgctgcttcaaacgggcagggctctaggaaacatatgttacgatagccatgagggcagaagtgcagttgaccaagcaggtggtgcacagattgtaattgaccatttaaggtcactgtgcagtataacagatcccgccaatgagaagctcttgactgtcttttgtggcatgctgatgaactatagcaatgagaatgatgcgcttcaagctcagcttatcaatatgggtgttattcctaccttagtgaaattactgggcatccactgccaaaatgcagctcttacagaaatgtgtcttgttgcatttggtaatttagcagaacttggtaagtcttagtcatgaaccacaaatgtaattaacttattaatgtgcttacaataaatttttctgtagat

SEQ ID NO: 90455 - DNA, 433 bp, Homo Sapiens
cccccaccccccaccctcccatgtccacagtgggtcgtgtgttcctggacagagaaacagtccacactggggcctgcgggacacatatagcagcatattttgctcttaaccccacccacctttttaatcacactagattttaagatcaatccctttttgaaacaactcacggagaaaaccagaacataaatggcctcctgccagctccggcgtctctctgtggtctgccttagtgggccaagtccaaatgcagagaaggcctttcccttccgcgcctgccccatcgggctcgctgacgaggaagcgctgtccctgtgatgaggttctctctcagagagtcttggaaaagagaccacttgctcttgtttaaaataaatttggacgtgatttttccatgcagcatctggtgtgaataaaacagcagttgactgat

SEQ ID NO: 90456 - DNA, 588 bp, Homo Sapiens
agtgttattacttccactgccaattatgcagtgggtctcttagcaggagaagataaagaagaaagaataaagtatttaacagtaagtggtgtttaattacataagagatgacaagttattttggtattaggaaatttctctgcatttccttcgacagaattttaagtaggattggtcttctgtcagcagctttttagtgactccaaatgaaaatttcctcttaagtgacttataaacccctataaagtctcagtctggttaataaaacagttattaaaatataggaaaggaaatttgaaacatgagagctgaaaactggaaattggtaataaaggaattacttgggttcctagaaccaccaatcatagacctctttctggtcacatgtttcaattaagagaatatacaattcttggttgtttgtcatgtatcattgaaaaaggaagagccatattcattcctccagtggaacaacccatggatatgcgatctcactttgctaacaggaaagaggagagcggttattcttttgggtaggttgattttataatggtttcagaatgctgtcatctctgtctagctggagag

SEQ ID NO: 90457 - DNA, 516 bp, Homo Sapiens
tttagtcctggcagtttaatggaatggccaaactaagcctgaaaacactgatgcattttgttgcatatggaaatacaaagaaatcattaaatactgttacatttgacgacaagaattatgactgtgttaaaaattcaatcaagtttccttgtcagttcagtaacgataattttaacatgttcataccaaaacctagtgaaccatggaattgcattcaacaaaacagaatgaagccagatgctaagtctatgattaagaaaatattaaatatatttaccatttatttatattttcagctgtattgtacttaagtaaaaggatagttttttaaatggaataaaaattcatatatacagcactcttcttttctacagtcttacacattaacttacccagcagcattgcactttctgctaataaaaagagagcaggctgtacaaatcttcttaagtctcctgtggcaagaaaactattacagaaatgaatagaaggaggtctctggagattttctcttgc

SEQ ID NO: 90458 - DNA, 532 bp, Homo Sapiens
  misc_feature (42)..(42): n is a, c, g, or t
gcccctgttctcctgccttcctggcattctctgctccccttntgcatggcacccctctactcctgccaggttagaatggagcagaggcctttgaacaagatgacatttgtagacaacctgatccatcaggatgtggagagatctggacaaatggcaaataatttggggttgaattatggcccagagaagtaagcaaatgaaaaactaaacaattataaatgtatctgggaagcaaaggtattcataatatgtcccatggccagctgcgagcagtatttaactagacatgctgttgtcaatattgaacatgaatcaagccaaatactgatatagctattgagagaaggttggcaggaagaaatcatgggtgagggtatgtgggagtgataatcttagctatagattttaggtaaaactgattctgaaagctttctttgaaacaaatttataatttttcttctacatgtttctagcacaaggactcaatttttttggttataatgttcattaaaacatatgccttcaatttgtt

SEQ ID NO: 90459 - DNA, 830 bp, Homo Sapiens
  misc_feature (208)..(208): n is a, c, g, or t
ttcataatagcaatttgggctttcagggctacaatcggggcgacggtgtaatcatcagaggtaagatttggaatcacatttttctaacaggtcatctgaggtcaggctaagattgtacttcttctgttgggggtgagctggtagatatacaaaatagtgctttggtagtaggttatagtgtaggaagcttaggtgattatttttctgntgggcccaggctgcaccttgaggactcagtaactcactctcaacagaatattctgtgcaggctctccaggctctgggcgtcagggtgcaaggggcagcttgaactgtacggtccgtcctgcactcacccgatgcagaccttgactttgatgttgaaatgaacacacttgttttacccaagtctggtggaacaaatgcccaatcatgtgaccttaaagtgtactgcaaagctgtagctttaagtaattgctgttctgccactgcttactctgaaatctaccatcaaagaaagatagagaaaaggggctgagccttggaatatatggttataagcagatctttctttggtcagagaccagggtttgagccaaggctgtaaatgtgaacaatagctgtgcaaagccttttaacctgacttcttcattttgtaaattattatgcattaagtagcagcccaataatctgatttctagttttattttcaaagtaagtagcttcttttgggaaaaacctaagttaaactagtagttttgccataataactgctgatttatgtatttgctaaaggtacttttgtatctgctgtgtattatagcaataaaataatcattttgttagaaaaa

SEQ ID NO: 90460 - DNA, 514 bp, Homo Sapiens
tctttaatgtcctaaagtacatttttatagtttttatgttgtgtttttaatataatgtttggtatagtcaatcttcttaatctgccatttctatggcagagtacccagtgaaacatcttgtttggtgtgtcagtcaccccctgctgcagagttccctgtcacacaaatacatgcaaaagggtaataaataaatgggaaacaaagtatagttttagtaatcaacatgcaagattctaacaaaagctggagataactgcttatgccagataatttaagtaagagaaagtaagtagaagaggtggtaagaaagatatatcagatgagcactgaccccaaaccactaagatgatatggtccaaagaatgtcagaatgactaattcaattatccaactctgctcagctggaagaggaaagaagggaataaagatgttagatcctttaccaggacttccatgcacggggagagaagttgaaagtcaaaactgtaacaggaataaatacaaaaattctttc

SEQ ID NO: 90461 - DNA, 347 bp, Homo Sapiens
caccactgccagcctcgaagcctctttgctgacctggaggtgatctgtgtatcaaagggggctgtgtattcaacagcacttccagaagaggccaaagatctgtctctacttcagcctccaatgggcagaaaactaagcctatttgctctaggcccttcagacttgcacttggagaaagaaaactcactaagtcagcccttatgtaactccactctcctctcttccaaacctccttgctttggacaaatatttgacagaaaatgcccttttgcaacgccttaaaagttacaaaaatggtgcaccctatcctttaatctgtactgtaaataaaaaatattaacacaaaa

SEQ ID NO: 90462 - DNA, 567 bp, Homo Sapiens
aattataataataaattttgcgtgatgtgaataccctctcccatcaatatttgtattatggtgctatatattggtaatgatcctttaatattgggaagggattttaaaaatactgtgattaaactgggtttcttcctttgattttcatattttaaataaagccacagtcatttatacaaaagaaaagcatctgtccctgggcaaatcttttgaggacagaggtcaaagtaaactgcataaggtttttacatcatttctgtatgtatttgatatatagatcaatatctgtacaaatttaatcttttattttcttggtaactcgtgatcattgagaaagtgtttgaaactttctcatgaagtgtatatataatggcgtgaaaaattcctttggaaaaatttatgttcctttcatttttaccaaattgcaaattttcagcatggatgtgaaaagcattaaaattataactttgtgtacaagatgaaaataattcactaaatttgcccttttttacacaaaataaaatgttaaagcaacaaaattccgcgccacccgcgttgccgccgtgt

SEQ ID NO: 90463 - DNA, 478 bp, Homo Sapiens
aacttgagacccagttaaaaaaagaaagcaaggaaagagtaatttacaacgaaggaaaaaaacccacagcacacccttcgcggctgtcagcgctctcctgatgtcacagtggctgcgtgtccttggggtgggtgaggtgtggggagcccagcccctggccctgcctcccgcgccccgctccccttctctctcttactcggttaagccatagcgaggcctccgctcgtttcagatatgaatttgttttatagattataaatatgcatatacagtgtatgtataaagcagaatgcctgcctttcctggttattttttgtaccatattgtaaattatattatttattctttaccaattttgggaataaaaggtgttttggttatttaatataataagagctgttaaacttctgtttaaatttccagttcaacttgtaaatgtttttattgtgcataaatacatactaatgttgatctaaaa

SEQ ID NO: 90464 - DNA, 550 bp, Homo Sapiens
ataaataaccctttaaatgctgtatacaagtggtaaatataaagaaaggttgaaactaaaaaagaatggaaattcaagagaaaggatgtcaagcaaagggtaaccaaaagaattgacagttatattaatattaaaactagtagttttcaaggttaaacacattagcctatagatgaagcaggctaccacacaaagagttcagttcagaagaaaaatataaatgtaaatttacatataccttaataaagtaactgcaaagtatgtaagaaaatggaactataaagacaaatgcacaaatccactatcatagttggagatttgaacacacctctcaggtgacagacaacaaaaaattaagtatataagatataaattgaaacaaaaattgcaaacataatctaatagaaaatactacacacaatctaaaatgcattctttccaaacctatgtgaaacattaaaaaagatgacatcactctttatcagtaaaaaagataattcactcaccaaatttcaaagtttattaaacagatgatattctctgaccaaat

SEQ ID NO: 90465 - DNA, 312 bp, Homo Sapiens
ctttccaagaatatataagcgtgaaatgaaggtaggcagaaaaagtctaaaaattttagaatattagatattgcttcagcaaaaagtcacatgacattgcatcaggaacaggcagtcagctgacagtcggcctcatccactctgggaatgtgccagtggaactcctgcacctctgtcattggcagattcctgtgttgccaggggattacactggccattggaacgcttgcctgagtgtaatgtaagtatggcctggagtgacggagtgacaacacccctatccagtccatatcccaccatttccctaactat

SEQ ID NO: 90466 - DNA, 468 bp, Homo Sapiens
ggggtacagccataaattattcaaaactaaatctggagatcagttcaccgtctcttctactttctaaggaaaagcaattcttactcatgaatggaaaaatgctctgcagtctctaagtgtgtgtggtggaggaggggaagttgacttgctcctagggagggatgtttaatcacatctaatgtgtcatgaaaattacacacatttttatacagaacaatacatattgactatttcttgtctttctctcctgctagaacatgaacttcatgaggacagagacttgggcttattcaccaccaagtccccagttcctaactccagtcctttggagttagaagcaggttgcccaaagttcatgatgcagaaaaaccattttttccgagatttataggataagtcctgtaattccagattgcttggcgccaatcaggtactcaataaatgtttgttgagtgaatatgtgaaaaa

SEQ ID NO: 90467 - DNA, 1375 bp, Homo Sapiens
  misc_feature (1309)..(1321): n is a, c, g, or t
tagcgaggcctgggtggcgaattcggcacgagggctcctcgtcagactcctgtgctcttccaggggctgctcagccccacctgaagagcccagagaggctgtcttcctacccagcaggtctcatgcaggcccagggctggggatgcaggcaagaggagggagatggccgccctgtccctctccctagctggcggctctattctgagcagttcttgctgcccgtttgctctcaggggaaaggctcacgccccccatcttagccccaggggggtaagtgggtgctggtgatgggatggtgtggcgctcctgccgtgggtgttgccaggaggctctttgggaaggagtgtcgcccggtcaggtggtgcgctcccggtcactaggggtgtacacgtgaagttgggtgaacacctgctgctcatggtacccagtgattcttgcccgagtgggcagctgagcagaggcccctctgggtcttgcagtccaaagaaccgcagagtagcccaagggctgtgggtccattttgagtggcagccaagtctgggagcccgtgtgcatcatgtttgggtcaggttggcgtggccaccactgaaataagcaataagtacgggctcctggtacctgcggatctcctgcaaacaggcccagagaacagccttgaagccacctttcccctcaaggggactgaccctgtctttaatgctgcagtggcatccagggatcagtggaacattgctttgagaaccctcctgctgttacggaggcagcacaaagctggtgacccctgagccaacacggcactgggatggctttctaggacagaaccctgtcggcgactgtcacatctcaaactaatagctgattttaaaagccagcagcagcgacgccatgtacctgagtacaggtggcagttgcaaacccgtgggctgtaaaaggtcaaatggggcttcccacaggggaaatctgggcgtgctgtagctcagggtgactcccagctccgtcactagcagggcgacccccttccttctggagccttagctctgaaagcccccagtgggggtgccctttcaaatgccccctttccatttcaaaggctctgactcttgatcttgaagccggacgcggcactggcactcggcttcagtttccactgtgacagatggaggtctcctttcgccccagcccgggtggccaagcccatcctggcctcagaaaatgctgagcacattttgtagggtggcacctttttatccaagttactagcctacacatccagtgtttaaaagaagaaaaaaagttgacccttttccannnnnnnnnnnnnccttggaaaactttgaagggaaaaccaaagaataacccttaccttacctggaaa

SEQ ID NO: 90468 - DNA, 530 bp, Homo Sapiens
cttgggagaggtgccaactttatagatctattaataaaagaactggcaggcttacagttcttgccaatgaggaaacttgaatgagagaagccaggctcaaccttggccaacagactggagcccatcatcctaacttcaccccgcttctccttacccaaccgtcaaaggctaggcagcacccacccagcagcttccacctggctgaagcctgcacctgcttcagaccaagggttagatggaaatttggcatgggaagagagggctcacctgtgggcaggatagactctatccaagaaggagaactgaaaaatgaaaacctatgagacaaggggtgatcctgaaggcaggcaggagaaagggctggagggagaggcactggggaatttttcctggtgaatactgaagttactagatgttttgtcttgcaaaactcaagggaaaactctcaaactctaatgtttgtctattctgtgtccaaactgtccttttgaaacggacccacctttcagtaaagaaacttgcattggcaa

SEQ ID NO: 90469 - DNA, 486 bp, Homo Sapiens
gaccaccttactgagcttcaaactggggctgggaacgctgccatgaattgggcttggtctgtctgaagggagccaccttttcgacaatccttagacttcttttgcctgttggaattacaccttggatcgtggcgaagtctatagaggtcagattaagaagaaccaaagcagaataaacgtagaacccgatgctgagttcacgagtgaggacgacctcttcctatatgctttgctataccctgcgttttgaacattaaggacgagataggaggcccataatgtttcttcttgctttaatcctgtcgtggcaacgttgacttccacctggttgcagagtgagcccatgggacagccctctgaaattatactgcttacaaccatgctgagtctgcaaggacttcgtccaagcctttccgtccaggacctcaaacagatccaatcacaagaagagagatttcaggaaagagaaaattattcctatcatcg

SEQ ID NO: 90470 - DNA, 463 bp, Homo Sapiens
tagctaggaccccagaggtctgcagcaagagcgggttgtccctctgtcccttccctcacccgttacccaggagctgttcaggactggaaactatccctagcatttgagtaccactcacagggctcccacctttctctctcttcagccttcatgtctatgtcacttctctatagactcttggtgtttcatctgcaaagatatgctcaaagtgtgttggttttcttagtattttggtctctgtctgtgtgagcggcatttcctggctgcatctagtcagccatcttgccccctctaacttgaatgcattctagtttgtattctattctgtaataagcatgataaacagccacagccatttttctgaaatgaagatggacctctttaattactttgataatattaataccaataaagtggtatttatattaaaatagtcaataaatagcatattttagtaaaaaaa

SEQ ID NO: 90471 - DNA, 528 bp, Homo Sapiens
tttacagcctaatcattttattgcagtatctcctattatagatatcatgctctgatgcaggagagttttggtaattaacataaagcgctggtacagagacttgtatcattaagggaaacagagtcaagagcttggttagcaacagtttcttcaagtgactgagcccctggaagggagcatgaaaaaaacatcataattatgtttatgatgcaaatgctaagtcaaagtagcaatgatatgatctatgttgtagcaaataaggtataacaaagtcttcacagtataaataaaatgttctaaaaagaaacaaatattcaacctgttaataaattggtgaaatgtatacagataaaaatggcttatcactgtacaatgatatcaacatgacagtccacattctatacatggtaactcgtgatttttaacatttgctacaaaaaagtacaacaaatattgggaatcaactttaacatttctgatgtctaaaaagaatgaagtcacttctgttctatgttaaaaaatacatgt

SEQ ID NO: 90472 - DNA, 568 bp, Homo Sapiens
gagcgtttgtctctgtctatatccaagaaatgttccgatttgcatattataaactcttaaaaaaagccagtgaaggtttgaagagtataaacccaggtgagacagcaccctctatgcgactgctggcctatgctttcatgacgctggtcattatcttgctgcatgtattctggggcattgtattttttgatggctgtgagaagaaaaagtggggcatcctccttatcgttctcctgacccacctgctggtgtcagcccagaccttcataagttcttattatggaataaacctggcgtcagcatttataatcctggtgctcatgggcacctgggcattcttagctgcgggaggcagctgccgaagcctgaaactctgcctgctctgccaagacaagaactttcttctttacaaccagcgctccagataacctcagggaaccagcacttcccaaaccgcagactacatctttagaggaagcacaactgtgcctttttctgaaaatccctttttctggtggaattgagaaagaaataaaactatgcagatatgcgttccattcaaaaaaaa

SEQ ID NO: 90473 - DNA, 952 bp, Homo Sapiens
  misc_feature (43)..(77): n is a, c, g, or t
gctgaatcgagcgcagcgagtcaggtgagcgaggaagcggcgnnnnnnnnnnnnnnnnnnnnnnnnnnnnnnnnnnncagtcgacggtaccggacatatgcccgggaattcggccattacggccggggggggtcggtttccgcggtggccatgactgcggccgtgttcttcggctgcgccttcattgccttcgggcctgcgctcgccctttatgtcttcaccatcgccaccgagccgttgcgtatcatcttcctcatcgccggagctttcttctggttggtgtctctactgatttcgtcccttgtttggttcatggcaagagtcattattgacaacaaagatggaccaacacagaaatatctgctgatctttggagcgtttgtctctgtctatatccaagaaatgttccgatttgcatattataaactcttaaaaaaagccagtgaaggtttgaagagtataaacccaggtgagacagcaccctctatgcgactgctggcctatgtttctggcttgggctttggaatcatgagtggagtattttcctttgtgaataccctatctgactccttggggccaggcacagtgggcattcatggagattctcctcaattcttcctttattcagctttcatgacgctggtcattatcctgctgcatgtattctgcggcattgtattttttgatggctgtgagaagaaaaacgtggggcatcctccttatcgttctcctgacccacctgctggttgtcaccccagacctttcataagttcttattatggaattaacctggcgtcagcatttataatccctggtgctcatgggcacctggggaatttcttagctgcgggacgcagctgccgaaggcttgaaattctgcctgtctgccaaggacagaacttcttctttgacaaccaggctccagatacctcagggaaccagcattcccaaa

SEQ ID NO: 90474 - DNA, 470 bp, Homo Sapiens
  misc_feature (46)..(57): n is a, c, g, or t
tttttttatttgttaaaaaatgtttattcttttgaaccccacaggnnnnnnnnnnnngaatgcagccaaaaccagtatttaaccatccgttccaaaaggctgcaaaatgggggaaacctcaaaacaaagtcagtgacaattttccatgtttttgcacaaagaaaagaaaatctatgacaattctgagtaacactttcatggcgacaattacacaagatgattcaaaaatgcaaaatggcagcaacatgcacacctggctaaagctagaagtattttttttaatctcaaaataagatctgtgatttaaaggatgattctttttaatacttctattttactgacttgcttgtcctacttaatttgctttaaatgagatgtacatgccaattaacaggaaattttagaagaactatgtccttccagaatccatggcaaggaagcaaaaccaatttatttggtttcttaatttt

SEQ ID NO: 90475 - DNA, 522 bp, Homo Sapiens
  misc_feature (46)..(71): n is a, c, g, or t
agctatcacttgacccaaagacaagagagttgaatcctggaccttnnnnnnnnnnnnnnnnnnnnnnnnnncttgtgggaaccttatttacctcaactggggaaattttttgctcttgcgcaaaggtcaggtcccgtgaaacttgtgaaataggtgtttttatctcttttcttttccaactgatcagatagatatctttccaggaatttggtgtcagaaatcaaattcaatgagtgggaagtttgacaagattcaggatagtcttgccaaatagcacaagagaggaggtaaagttaggtcaggtcaagggggcagcaaaaatgaagtttataacagatatactgtatatttgtcatgggaaagggcttcagtcaatagcaattgatattaataaaacataaaagaaatgacaataaacaatcaggataactttgaaacaacttctttttatgtaggtaacattaaagaaaattaaagaaaaggaatcgctttattttataaaataaatgcactactatttgc

SEQ ID NO: 90476 - DNA, 368 bp, Homo Sapiens
aagcatataaatggcccagctctagaatacatgtaagttgaaaagctaacctgaagtgggaagcgcagtatatacctaagacttactctgcactgaaagtttgctttgtcactagaagtaaaacaagactgtggtaggatagtaagatcagtaacacctcagttaatcaggtatcttggaggaagtgaagaaagaccctaattcaagggacagttaattggccttttattccaagaatgggccttagtggcagtatcttaaaagcccacaagatggagatgtttcctaatgaaaggcctttaatttctttatagagctgagttagtgtcacatcccagtccccacccatgacccttccacagttaaaa

SEQ ID NO: 90477 - DNA, 540 bp, Homo Sapiens
  misc_feature (159)..(159): n is a, c, g, or t
tcatctaaaagtatagcacatataattatgtacactactgaatacttgataataactaactgtcttactggcttttgtatttactatcagagcatatcctgtcattaagtgatgcatgactgtattttcgcagaattctgtgaatcctaaacccggcanggcatggtcacgtgggaagagaaaaatgtcatggaaacaaatttgcctttggaactaagtcacctttctgtttcctcgttcccaaattttattccaggaggcatttttccctaaggcagcccagctgccccggactgctttagattggccttgttattcccatctgtgctctacacaccacattcctgagtgtagtttattattgctttgtttcccatgtctgcctcttcatccattgaagtttatttcttctacatcttgtacactcaagatcaggcattttgccttccagaataataatcatagaaaatatcaattcgtgctagaaacaatatttttatttttataatataaccaaaataaagtgttttaagttccaaa

SEQ ID NO: 90478 - DNA, 452 bp, Homo Sapiens
  misc_feature (64)..(64): n is a, c, g, or t
  misc_feature (68)..(68): n is a, c, g, or t
  misc_feature (73)..(73): n is a, c, g, or t
aaccactgacatttgattatgcagttgccatattccttagtaagaacctggtcacaattttcantcantaccncaggcaattccccctccccacaccccccttttttctgagaattgcagtgagatatacaaaagtttcatttaatcctttattaattccagactttatatatttttattaggatttaaaatacatttcaaaaagatcaagtgagaacagaagataaaagtaccaagataaaggcataatacaaacttagaaaatacatgttaagcatactgcggcgtcctggtagccccttgcttttgttcacttttttctcttatgtacctacataaaatcccaaatagtatcttccaggatgacacacttgctgtctgccccacccaattaaaaacagattttttagttattaggtattgtgctgaatctaccttattttattgccaaa

SEQ ID NO: 90479 - DNA, 607 bp, Homo Sapiens
  misc_feature (344)..(352): n is a, c, g, or t
ccatgcaaggcaattaaatcactgtgacagcacagaggtcagagttccgtcattttgcattacttgtatccactcatgtttgtttcataataattgcattttcttagaactattttggtgtcaaatgctattttttatattacattaaaatagagttgtcagtcattgcatctgcccatacatcttctgagagaacctgcttccttccatcagccatacctaagacctgcacctaagtggccatgtttgctcaaatgtcctcatcaccttggcctcaactaattaggccaaacagatgtacttcactcaaggagaacccaatcatattttctctctgtctctcnnnnnnnnnttgaactgagaccagtgagtaagttggtgtctgggtcaggttaatggtggtgaactatgtgcctgtgagctcttcagagctggttgggttcaccaccttcataagacctgcctctgtaccatttttccttgagtgtgctttgtataaaggtctgtacaataaatcacacttttttaaagcttagattgaataggtttctgctccttgacaagagatatggcctgaataaaatgaattttgaaagaaaagcctaaa

SEQ ID NO: 90480 - DNA, 780 bp, Homo Sapiens
tctcgaataggagaggcgctttcagatcagcccgagtcttctgcagcgcacaggagctagtcgtactgaaaagaatgaagttggacttgtccaggcgagtttcggacagtgctgggctgccctgctctgatctcctgggtgtcttcacctcctctggttcctaagtcggctgctgcaccagcacccatcaaactctcctggaagaggaagtgacagctcaccggtagcctagaaggcccctgtgggcagaagcatggacttactcctcctcatggagatgcggctgagccatatttccttggcacctctctggaaccttcgacaaccaccacctcagacactaaccagactttaggtccattcctttcatggctaaaatgagacagtccacaatgttgattttatttgtaggggatgtcaggattccagaaaagcagacttggaaagcaacaaaacgttaacttgcagctcactgaggcccttacacttgttctgggcacctctgtatgttaaaagaagtccaatatctttagctgctggttataggtggccatatgtttctgcacagaaatggggctccccttgctagactaattttctaatttttcctcaagcttcattgattcatattcttctacttgaccctgactgtcaggaccaacaacaccaaataacaccaaagtctcttgctcctgtcctcagaacctctcagaggcatcctctgccctgttggagccattttatttcaggttgatccttaattaaaataagcgagatgca

SEQ ID NO: 90481 - DNA, 571 bp, Homo Sapiens
ttttacaagttagaaaatgctgtttgaatctagttgaaccagggaatacagagcgagcaatatgtagcttgaattacatttaaaagcagattttttacaaacaaaatggcgaaagcactgattgtcatttttagcagtcacttaaggcctatagaacttttttcaagtcggaaggtcctgttcttactatctcaaaaatgggcatcgaacaatcaatctaggagcgtggcagtgggtaaaatggtggacaggcaccaaagctattttctcatctgtcctgtggatgagtggaactgtggaacaagtgatgtggaattaatgggtgcaacagctgaacagacaatcaataacacacacagttctggaaagaacacatcacttgtgcttgtttgatgagcttgtcacattctaatccctctccccatcctgtttcaattttgggaaacttgtatctgctggtgtcagcaattctgattctgaaataggatcaggcttttactacaacagccttctctttctataaaaagagcccactcgtggcttatgaataaaggcaggaaaagtttgcaaa

SEQ ID NO: 90482 - DNA, 888 bp, Homo Sapiens
  misc_feature (431)..(445): n is a, c, g, or t
gtggacaaaaggccagggaagggtcttcagtgtccttgtccttgtccttcttcccttgggggaaatttggcagtcagcagccttgctctgctatctaaattggaccaccaggacaagataaaattgataacagaaagtttattcaagaattgtttgacagacaacccttttaggtaaggaaaaaagtaactactgaagaacaaagaaagttccaagagggaattaactctagttctacaaattcaggactatacagtgacgattaggagctgagttcatgccttttagaactaattacaattgttcgtaagtacgagtttaacataaatctacagctcttttctagagtacaatagtaactaaaatagctggttttacatgacaggaaacacaatgtcctttgtaacaggtaaatactaaaaaagtacaannnnnnnnnnnnnnnccctcatataaatacataatgtagggggataaataatacaaaaaagaaaatattttaacaggctataaccaataaatatatatgaaaatgttcactagaacacacgcttttttgagcaatgctggacttctgcaggcccagacatctctcacagttgtttttacatccattaaaatgtaaattctaagtgcaacaaaagtgtcctgtcaggaggctgagcaaggcacacaggccctgcccagcccctgcctgggacagacagtttgttcaaatataccctgttttcacgttaagtcaagagagcaacagaagaaaagtatagaacctcgtgtcaccaactgctttctgtggagagggggatggagctggagctgagatggaggcagcagaatgggcaaaccttcagtcctaacaacctgcctgccctagcctccacacttttc

SEQ ID NO: 90483 - DNA, 499 bp, Homo Sapiens
agatgggtctcaccatattgcacaggctcctgggctcaagcaatctacccacttcagcctcccaaatagctgggactgtaggcacatgccaccatgcccagcgtaacagtaagattctgataggtgaccaaagctagaacctaggcctccagcagccaaagcctaatttgatggctcagtggacacacaaagctaatttgatagctcacgccaaacaaagagacatttttatcacaatttatctaagaggcttcccacttcttatttggaaaacaggtggcaaaataaaaagaaaacctttgaaaggtgaaagataagaaaatccttgtgtttgtgtaattttgaacctgaaaaggctaagttcactgactttacagattcaattatggatggctggtttttatttctctacccattggccttggtgacatcatgacattcccctgagtttggttaatgaaagcaaacaaacaaataaacaaaaagagcgattgaagaa

SEQ ID NO: 90484 - DNA, 459 bp, Homo Sapiens
gcgagttccaagttgcatgtgcttgaaatagatttaattcttattccccacagtttaggtatttttcattagtacatcaatttgacacactgaatgcaagactattaaggaagaacgattaaatattattttattttgtgaagagttggcagcagattacatctcaagaacttgcagagagaggaaggtagatggacaatcctaaattgtaagatgttacaaaaaacagtgaagtaagagtactcctgaagactaaaatagagaggctggggtttgagccattttactgagtagcttagctggaacctgatatcagaagtagcctttaacaaaaagcctcttggcaattgtatggtactaacaactagagtactgaagtgtaagttgaaaccaagttgcagtgggaaatcaaaggtgaggtagcttatttgaaaccagcaaatgagacaggttggacag

SEQ ID NO: 90485 - DNA, 499 bp, Homo Sapiens
ccggtgaggagggtgccctagctcccatagtaaccccagaattagtctccttaaaggctggggatcatggcttgttcaatagtttttcttcaggttcgggcatatagaaggggctcaataaatagtcacagaatcaataactattacaaaagccccattgatggaatgctcgctccgtaccaaggctgagaagggtgatctgtcacccaaagtaggacccctttgttgctccctgaaccaacaacccagaagagcctgccagttttgtagttttgtttttcccttttcttgctatttggccaggagcagcagtagcagcagctccaagaacagcactggctccttattagtcccatggaagcacagatcaacatcattgcccttgcaaacttctctcagcttaggagagtctactcgctctttgcacattgttgacatgaaatgaatattaaacaccaaacctcatagaggccagccctgctgggcgagcaatgaaaaa

SEQ ID NO: 90486 - DNA, 1031 bp, Homo Sapiens
tttgcgatggagtggtgctcctcgattcgtttaatggagagggtttggatgtgcttttgctttttatttaacacatgggtatattacttttctttttctgcaaagagcacttattaattttatagttttttaaattggctttgcccgcttcagtagtcacaggtagctacctgaccgagaagccgacttgggaattactgttactcgtgggtgatactgtcataaaggggttgaaagtacttgttagctgtatatgtcagaattgattaaagagaaccaactattcttgtgcaagggatggtattgtagttaattatgacatttggagaaactaatttctgtctgtcgacactatctctgttccatttagacttagagacttacatgggcaatgcttgactttttgcattcagcacagaaagttaagtaatccactgtggtaaaatattaactaaatttatatgacttcttgactgctgtaagtagagaatatttatcatataagcaccattttcctgaattttttgttactacatattttatcttactgtcactattgtgtaaaatctttgaaaggaaaatgaatactgtgtaatagttaaacccattcataggttgcaatagagtgtcagccaaatgtgtcatacatcaaatcttcagcagcttttgcataatccaggagaattgaataatagttgaagttaattttgccagtgaaatgtagggaaagaaaaaagtttgaaatttaaattattcagatagctaaattcttaatcctaaaatttaaaccccttaattctggtctgtagtgttatatcaagactttttgatagtcatgaaactgagtaaaactttattcagattacttaaaaacagcttttcctgtggttaataacacctttattttgaacagagtactcttaagcaacttatattgtgctgattaaagatttaatctgtgcatattttttaccctgttgtttatttagttttgatacctgtgaaataacccataattaaatcacaaaaaa

SEQ ID NO: 90487 - DNA, 607 bp, Homo Sapiens
tcttgggccctactcgttgtggttcagcagctgtgtaatggagcaaaaaggaatagtcactaaacagcgaaggaaagtggtggaattattaaaagacctagcacttacctgctgggatgagtctctaaccccacagaattgatttcaaacacaggatcttattcaagataaggataataacagctatcttcttgggttgtaaaaagtagcattagactgcattttaaacatttggtatgattttgaggacataaccgtaaacagctatttaatactattccaggtagtcaaaggccaatgtataaaagttaaaaatataggtcttgtcagctttttaagcgtctgtcccactgactaccatatctctacaagagaatagatgaggaattgaggttatgtgggaagtacgtgtaagtttacagtattaagaaatgtacaataaaatttgtttctatgtcagcgtatattcttgactcaaggagtttgaaagtgtaaactcaaaggtctttcacatgtaaagaggaacctctccattctgtacttgtatagtcattacctcatatagatttaattttattaaattaaattttacttattttgggtttaa

SEQ ID NO: 90488 - DNA, 930 bp, Homo Sapiens
  misc_feature (402)..(563): n is a, c, g, or t
  misc_feature (569)..(584): n is a, c, g, or t
  misc_feature (609)..(619): n is a, c, g, or t
  misc_feature (623)..(789): n is a, c, g, or t
  misc_feature (804)..(837): n is a, c, g, or t
  misc_feature (855)..(885): n is a, c, g, or t
tctatcaggaaacctgagaattggagtgagaatcccagtgtggaaaatcaggaaagaggctggtatgagcgacagagaagtcattcaggaaagaggttattgaattcattggagaatgaatgctgttctgaatttgtatcctaagggaaatactacaaaatgtcgcagaaaatgctggatggatatctaaagttcaaaaaggaagagaaccacaccagctggagattaaagaagcatcagtagaagatcttaagggaaatactacaaaatgtcgcagaaggtgctggatggatatctaaagttcaaaaaggaagagaaccacacgagctggagattcaggaagcatcagtagaagtcaatggccattaataaaaacattttttattaaaatattgaatctgnnnnnnnnnnnnnnnnnnnnnnnnnnnnnnnnnnnnnnnnnnnnnnnnnnnnnnnnnnnnnnnnnnnnnnnnnnnnnnnnnnnnnnnnnnnnnnnnnnnnnnnnnnnnnnnnnnnnnnnnnnnnnnnnnnnnnnnnnnnnnnnnnnnnnnnnnnnnnnnnnnttgggnnnnnnnnnnnnnnnnaaaaaattttttaaaaccttttttnnnnnnnnnnncccnnnnnnnnnnnnnnnnnnnnnnnnnnnnnnnnnnnnnnnnnnnnnnnnnnnnnnnnnnnnnnnnnnnnnnnnnnnnnnnnnnnnnnnnnnnnnnnnnnnnnnnnnnnnnnnnnnnnnnnnnnnnnnnnnnnnnnnnnnnnnnnnnnnnnnnnnnnnnnnnnnnnnnntctttattaaatttnnnnnnnnnnnnnnnnnnnnnnnnnnnnnnnnnnaaatttataaaaatttcnnnnnnnnnnnnnnnnnnnnnnnnnnnnnnnagaaacctattccccccgggggataacccccttgggccgccgggg

SEQ ID NO: 90489 - DNA, 448 bp, Homo Sapiens
cagaaggtttcaagtcaaaatcctaaccaatctgctttgatctcattgaacaagactcgcttgcaatgaatgactgaagtggatataaaacatgagttcacttatatgtgtcccatgaaacttttattactcatttatccttcttacctagaacaatgaacatcatcgcagtgacaaccatgcagaattagcagaacctgaattactccagatattctcattcttaagttctgctcaggaagtgtatattcatgccaaggccatggcactcagggacttttaaataattctcaggaagaaagaaactgcagagcccaagtggaattctggatataatgaaatgctgccccagcctggtggcttctctcagatctttcctcccggcttgccgcttcatcgtctctgaacctcctgtgtctccttcgtgataaacttgcatttttagaaa

SEQ ID NO: 90490 - DNA, 480 bp, Homo Sapiens
ggatttatttatgattttctttcttcatctgtcgagcatattaaactgcttaacagcatcaacctgaaatggatctaaatgtgcaggggatttaactctttttattgtaaagttgtggataaaatatttaatagatatggatgaggactcatatcagtaacaacccaatactttatttcaaaatgaatagatctgtattacaatcacttgtgttgtgtgcagtagattttttccctttaacttaggaagcagttaataattaatggctccattttttagaacgagcacttcgcccaaacagaatgtattggcgacaaggcatttacttaaattggtctcctgaagcttattgtctggtaggatctgaagtcttagacaatcatccagagagtttcttaaaaattacagttccttcttgtagaaaaggtaaggaaatcaatttgaatgttttcaattgtaacactaaagaaaaataaactt

SEQ ID NO: 90491 - DNA, 302 bp, Homo Sapiens
ctttcaggcctcagcttgggtgtctctctcctttctcttactttctattccttcattaggggttccatctccgggctttcatgcatcctgtatttgtccctattaaagaactactgatcacaatgtactgtagttttcctctctaaatacttgtcttcctgcgtatctaatcctattgattccataaagacagggagtgtttctcctactttctagcgtgatctggaacctaagactgtgcttaccacagagtagacacttagtgtcttttgaataaactagtttgggtggtggtggtgcgg

SEQ ID NO: 90492 - DNA, 529 bp, Homo Sapiens
atttatcttatttttctgtattttactcaaaattttatttccacttctgtagaaataggtccatgccagtgttctctacaaagtgtctttcaaactaaactctagaagaatatcgattacctgaacagaaacaaaggcctaagaaatcatacatttttgtagcttatgtgtattgcaccaatcaagcaatcccatgtgctcttgatattggcactgtagttttatcttagaggacttgccactggagaactcagtggtgagagaccttggaaatgttttatgtggctgcacataagtgtttctgactagctaaggatacttcagacttttcactttccatttgtccccttttccttccctgaattagatgctatgtcataaacttggtggtttttgaaaaactcttatttcaaaccttaaactaaaccgaaataagttatgcctgagaatgcgtttgtctgaaacgattttggcacttccctttaatatgcttccccttccctttgccttttaaattgtggttaaaaaa

SEQ ID NO: 90493 - DNA, 519 bp, Homo Sapiens
tgaacctcctacttaatgtagaaccagtggtgatggttaacagaccctggctgcagtgacaagcctgggacctgctcgaggaaatccaattgaaaagcagccaagaggaacaacaagctagaaacagatgttccagctaccaggatgtgcacgcatttaacctgaacatgtagttggggtgggatggtagcattcgtttctaaatatagtgatttcacttcttcccccatatagatattgtcaagtttaattatagccatccacattagttttgtcaaattttcagcaatttctttaaaataagaagatgtcagaatgataactgctattaagggaattcagggtgtttggtttatctacccagtcttactaaaacatttcagttaaatcatccactcttaaactccagtctcatagcaattaaaaattatcttttaaaaaattgcccaaatgaaattccaacagttcatgtaattatttgatttaatattaccatgttagtaaaatatctttaagact

SEQ ID NO: 90494 - DNA, 620 bp, Homo Sapiens
ttttttcttcaagaccagattagtattttatttttcccttcctaacactcaaattcatggcaggtgaaaagataatagaacataatcaaactaacatataaacacaattcaaaaacgtttaaccatctattatagctctttgttgtaaaacacacaaagttaaacagaaacatctttatataaattatccttaataatctgtatacactgtaaaacaattgaaaattcacaccaagatcctagtgcaagcagtggtgtacaaaagtgcaaacaaggttagtgattaacaacttaccatcaatataccacttcaacatactttacattcagccaaatactgaaggtttcaccatggaaaaacacttttatcacttttaaagtaacttgactatgttcaccctgagtgctcttgcctcagtatggcaactgattatgagttcaggttaagagcaacaccagggaatacagaaacccacgttaagttggccattctgacatgaatctatacttgaaaatgaaaacaatcccaaagaaaacctgtatgtcaaaaacagaattgttcctgcctttcaccccaaaatatttaaaactaaatctaagccacttttaaaatgcatgct

SEQ ID NO: 90495 - DNA, 410 bp, Homo Sapiens
gagaggaatttcagtggactgaggtggcggggtaggcagcagctagggtataatgatttggagtatgaattcaaggtagaaattacagtaaaaattgtagcctgcccttgcaagaaactaggctataaaagaagagagtgtaagaaggtcttcagaggctgctgctttgactgtcgggttaatgctttataaagtcctctttattaatgtgtttttctacttgcagagtagaacattctcagactctgcgattctttaattttcctgaagtggcactctttgctttttgttcatgatttaaccactataaaaatgcccagctacagcttgctgcaagaacataagtttggcttcttatcatggaattctttttgaggccattacctttgaagttgtttgatacgataaca

SEQ ID NO: 90496 - DNA, 570 bp, Homo Sapiens
  misc_feature (54)..(54): n is a, c, g, or t
ttatcagtgtatatgaatgagacaggaaaagcagatatgttgaccaggaagaanaataagagaaattagagagatcaggcatttcttctatctgcctcagaaagcaagatggtgctaacaatgggatgtgctagagggctggaatatttgaggatggggtggcaaaaactggaaaaagatttttaacagaaagtcagagatgccaaagattaccttcctttttattcaggtaaactgacaaactatcctgtaaggtcgcgtaaggatgtggcctccactcacccactcccagcccatttttgtgccagtcttgccatggtcttctgggtaatcctgaaactaggactctctttctcaatcagccaacaagaagcctagtgagagccaaaggaggacaactgcagcatcagtcaatcagcaagtgtgggggactctggggacagaatttagaagatctcctttctcttcattacttgtcttctgtgtacaatgctttattaccttcacataagcaaagggcttggtggagagcagagagcaaatagataatataagaatctcacccccaaa

SEQ ID NO: 90497 - DNA, 580 bp, Homo Sapiens
  misc_feature (28)..(28): n is a, c, g, or t
  misc_feature (60)..(60): n is a, c, g, or t
  misc_feature (98)..(98): n is a, c, g, or t
gtgaaggtatctgccagcagggtgcagngcgtgcatgctcgctgcagctggtcctcctcnacgtctgagtctacagcaagcgaagagatgatttttgnggacatgttgggatctcataaatggagaaacaattatctatttggtctcatatcagacgagtccataagtgaacaattttatgatcggtcacttgggatcatgagaagggtattgcctcctggaaacagaaggtacccaaaccaccggcacagagcaagaataaatactgactttgagtaacggccttgaggtgtccctcgcccttttggtttgttcaaggagctgctgctttgcatagctgctctagtgtctggtatcatcggatctggttttgaataattcccaggagtcctgggtccctggcctccaaagctggaatgtgaacgcatgccacggtggtctgaccctcacactccttttctcttaacagcaaaatgcaatggaaggaagaaaagttccaacaaagaatgattttgtgaattctgtgatttttcttctgatcagtttcaatctgtaataaatgccttatttttcctgtaaa

SEQ ID NO: 90498 - DNA, 581 bp, Homo Sapiens
taaaaaccaagtcaaagagccgcatattccagaggtcctttctgatcatactgattgataccgggatttcatttttggcatggtgagggtggccaataagtatttgttaagaccaattttgtataatgtctttttctttggatgattttttacctgcatcttcaatggtcatagaaatggtctttcctaggggtttaaaacgtattgcaagtagagtatcatctggaatactcaagagatccaaaaagccatcagacattctttctctccgtattatttggaatcgtccaacttttaacaggctgtacaattgtcctttattttcctttctaattggaatttcaactaggaatgcctgtaggtattgaatgccctcacttcaaatgacttgctgcactaggcaatgataaaggatgcccatacattggcccaaaattgctacactgccatcatttttggtacgataccatattaaaacctatgtcttgagagacagtgacagtgcctaaaaataatggagatgagattttcccagcttttcggaggatcctgaaaataaaatactacttgccttataaaaa

SEQ ID NO: 90499 - DNA, 524 bp, Homo Sapiens
tttagagaacactcaccaaagctcaagaagcagtgactattcaggatgattacagaggtaagagaaactaggaattgttactaggagcacctgatatatcaaaatgaaataaatggcacccagctctcctagcacaaaccctacctctcaggggagtccagcagtctcttcctcctgataacatttttccatttattctaggtcataggccctacatagctatgagagggagaccaggagactgaatgtgcctggcaatagctatcttccataggaatggctcattaagaatatcatttcatgtcagatgggtagactgtatcgaataccatgagtggcaagggttctgcttggcaaggctctgtttcaaggactttcatgaccttatgtgatccagtacatgcattccccaattgcaatcactgcccactatcctcatcatccagcttcaattgagatgaggcataaagtaagtactgtggacccttctagcagaaaaaatgcaagaggaaatcacatgtgag

SEQ ID NO: 90500 - DNA, 491 bp, Homo Sapiens
ccctctcccactccccaaagttgatgagcctgcactgtggtactgctttaaagtcttttttcatctctaaatagataataaattgccctagtaggagaaattcaatatcctacccaacctatttggttgaattaaatagctggtacttaccaacatgccttacttgttcagaaatatcatctctaatatctgagacatcccacatggcaagaaaggaatcaaagcatgagccctcttctgcttcttggacatatggtttatatgagaatgtgtaatgatgagcaatggcagcgaggaacatctcaatacagataataaaatcctatgagaacaacaataagataacagccacctttggatttaaatctaggtttgtagagtgctatctttctctacttgcttttcaaaagtgctaagataaacagctgtgttttttcttctcagattatattcatttttccattttctaaaataattattatagacccctt

SEQ ID NO: 90501 - DNA, 953 bp, Homo Sapiens
  misc_feature (54)..(92): n is a, c, g, or t
  misc_feature (95)..(129): n is a, c, g, or t
  misc_feature (177)..(188): n is a, c, g, or t
aaaagaaaaacctaatgcattgaacgcttacctatagcgctagctcgtagtagnnnnnnnnnnnnnnnnnnnnnnnnnnnnnnnnnnnnnnncgnnnnnnnnnnnnnnnnnnnnnnnnnnnnnnnnnnncagtcgacggtaccggacatatgcccgggaattcggccattacggccnnnnnnnnnnnnagggctcccggccgaatgggcacccccgggtgtccggccggtgttcccgaggaaagtgcaaaacccggggtattccctcagcggatactacacccatccatttcaaggctatgagcacagacagctcagataccagcagcctgggccaggatcttcccccagtagtttcctgcttaagcaaatagaatttctcaaggggcagctcccagaagcaccggtgattggaaagcagacaccgtcactgccaccttccctcccaggactccggccaaggtttccagtactacttgcctccagtaccagaggcaggcaagtggacatcaggggtgtccccaggggcgtgcatctcggaagtcacggggctccagagagggttccagcatccttcaccacgtggcaggagtctgccacagagaggtgttgattgcctttcctcacatttccaggaactgagtattctaccaagatcaggaacacaaggatcttaaagttcctggaaaagcttggggaagggaaggcccccaaagaccatgatctgcttgggacactttggcgattcccgaagaaaaggaacttcaatccgagtttatataactccccttggggcaaacagagcgccacgctaacagaaaaagaggcttggaaaccccccctttttggtgagacaatccgcgggtctcccactcaggggctgtggaacccagacacaggggattttgtaagacccagcggggtcttagccaagggagccccaaattcagaccg

SEQ ID NO: 90502 - DNA, 512 bp, Homo Sapiens
cttagaaggacataggagttccactatgatgtcaatgctgcctggtttgccacctcacctgccacctctctaccaccagacgtggggcactctacatcagctcctacttttatggttccaagtccagccatggtcttcctgactcgggacattcacacatactaattcttctgcttagaatgcccatctgtccccattccctctttattgctcagcaaagcccagtttccatcacacattctgcgacaccttccttgactctgcagaataagtgtccctcctgtgtgccttaaagcacagtatttgtttctgctacaacacacattaataatattctaattgtctatgttttcttctacccctctccacttccccagttagatgtaaattccttaaaggcaggaacactctagtttattttatatctcttgcatccagtgtagtggctggtacaaaactagaataaataaaataaatgttattgaattattgttgaataaagttataacatg

SEQ ID NO: 90503 - DNA, 463 bp, Homo Sapiens
  misc_feature (44)..(59): n is a, c, g, or t
aataaattgggacaagaattgtcctcatgctataaacaactagnnnnnnnnnnnnnnnntgtatgaaacaacagttccagatgttggagaaaggacagaggaggatatgctgccagagaaaagtctccacagtaaacctgctggaatgaatactattatttactcctcattttgcagagaagaaactggaattttagcgaggtcagtgatttgcacacaatacagagttctctacctgccttagcagagcacaggtgtttgaagcactaaatgaactccatggaaattttctattcccaacatttcccctaaagtcacctcaattttacatttccctttcttttcagtccttctgcccttccccactggaaagacctaatcatttaaccacaaaactgagcagagaactttcgcaattgaactggcaagaattattttaaatacatggcatttaacctccaaa

SEQ ID NO: 90504 - DNA, 379 bp, Homo Sapiens
  misc_feature (346)..(346): n is a, c, g, or t
  misc_feature (350)..(350): n is a, c, g, or t
  misc_feature (364)..(364): n is a, c, g, or t
ttatcccccaaagcaaggggccacagtgattgcaaagcggtagtgatttgtagttgtggatgctgaagttgtgtgagaagttgattctgaacccctgtttggcaaactttgaaacttcttgggtaatattgttttggcaaaaaacaggcggtaatggttagatgatggcagtgtttatgggtaacacatgtgcacacttggcattgataaccctgtttcccaaatactccccagataaacttcctgcagtaagagcagtaggtgggctgcctcaggtatgtgagaataatcttgtttccattgatctgttttattggtggggaggggttgggtttggagacatggnctcnttctgtcacttganctggagtgcagtggt

SEQ ID NO: 90505 - DNA, 850 bp, Homo Sapiens
ggggtgtttggagaaagggactcaggtttaatgagttaatctcacttggtgaatatgaaaaggcagcttgttatgcagcaaacagtcctagacgaattcttcgaaacattggtacaatgaatacatttaaggactgacattttctgaggaggctggggatgtgatttgtgattatggggagcaggatacttataacaaggccaagtgcctggctttagctcagattatctacagtgaatgtggcctgcacaagaaagctattctttgcttgtgtaaacagggtcagactcatagggtcatggagtacatacagcagttgaaggactttactaccgatgacctgttgcagctattaatgtcatgtccccaagttgaattaattcagtgtctcactaaagagttgaatgagaaacaaccatctttatcttttggtcttgctatacttcatctgttctctgcagacatgaaaaaagttggcattaagctacttcaagaaatcaataaaggtgggatagatgcagtagaaagtcttatgataaatgattccttttgctccatagaaaagtggcaagaagtggcaaatatatgttcacagaatggctttgacaaattatctaatgacatcacgtctattcttcgatctcaggctgcagttacagaaatttctgaagaggatgacgcagtcaacctaatggaacatgtgttttggtagttctatatcttaaccagctgagggagcttgtacaacaccttatgtatgctggttgggaaaaactgattttaacgtaactaacttataaataaatctagagtaagaagatctcagaaataaatcacacttttgttatga

SEQ ID NO: 90506 - DNA, 934 bp, Homo Sapiens
  misc_feature (24)..(24): n is a, c, g, or t
  misc_feature (154)..(154): n is a, c, g, or t
  misc_feature (691)..(705): n is a, c, g, or t
ctgcaagggagactgggtggtcgnacattccactggttctgggctaatgtctaccctagctgtaccccatctgaacccaggcccagtttctctggaaagctccacaacactggacttgggctctgtgcagactgcaaggcagaaggggacatcntgggctgtcccatggtgttggctccttgcagtgacagccggcagcaacagtacctgcagcacaccaggcaggaaggagattcactttggcagcccacagcacctgtgctttgctgtcaggcaggagcaggtgattcttcagaactgcacggaggaaggcctggccatccaccagcagcactgggacttccaggagaatgggatgattgtccacattctttctgggaaatgcatggaagctgtggtgcaagaaaacaataaagatttgtacctgcgtccgtgtgatggaaaagcccgccagcagtggcgttttgaccagatcaatgctgtggatgaacgatgaatgtcaatgtcagaaggaaaagagaattttggccatcaaaatccagctccaagtgaacttaaagagcttatatatttcatgaagctgatccttttgtgtgtgtgctcctggtgttaggagagaaaaaagctctatgaaagaatataggaagtttctccttttcacaccttatttcattgactgctggctgctttnnnnnnnnnnnnnnnggatccattgtaccgttgtcttcatcactgggaaatgattattacatagtacagaagattctttgtttttctccactgagcacttaacaattgctttctctctggcctggacattctctggcagcacctccaggatacataaattcaatggatcaatttatttgtcttcaaatggccttaacttggattgtctgtttggccaaccatgaaaattaaagagtgaagcaga

SEQ ID NO: 90507 - DNA, 639 bp, Homo Sapiens
  misc_feature (119)..(119): n is a, c, g, or t
  misc_feature (141)..(141): n is a, c, g, or t
  misc_feature (470)..(493): n is a, c, g, or t
ggctccatcacaagcctcccctccaactgcagcagctcgtcgggcatcttctctttctcaccagcaacatgggtctcagccgtgatacagaagagtgctttcgcaccagtcgtcagacnccagacctccgcacctcccacntgcaccagcaccaacgggaacagcctgcaagcgatatctggcatgattgttcctcctatgtgaaagaattgccttgaagaattgtattaatgaagaggttggattctgctacagagagtaatctgatacaagtcccagagtggaacttttaactcaggcctttttaagaggaatcacaatacctgcagatttttaaacaaacaaaatcaccgaccttgcaaatactgaaattggaagagggatctgcaagtgcagggtgttggttaaagttgtacctcccaagtatttgggggatatatttattctgtattgacaaaagcaaatccacnnnnnnnnnnnnnnnnnnnnnnnnaagcttaattctgcaatcatttgtcttttataaaccgtaaagctctatacaagggacactataaataagactccatgttttaatttatgatgtttttaaagctgtgtaaaggaagaatgaagtggtgatatttacaaaaaagtaaa

SEQ ID NO: 90508 - DNA, 573 bp, Homo Sapiens
actattgttttcaaataactttggaaaatcctatatacatatattcaaagccagatgatttttgacaaaggcaccaaaaacatacattggagaaacaacactctcttgagtaaatagcattaggaaaactgaatatctcgatgcagaagaatgaaagtagacccctatctctcaccatatgtaaaaatcaaataaaaatgaattaaagatttaagtgtaaggcctgaaactataaaactggtagaagaaaacataaaagaagcacttgaggacattggtctacacaaatattttagggctaagacttcaaaagcataggcaacaaaaacaaaaatagacaaatagtactatattaaactaaacggctcctgcacagcagaagaaacaacagagtaaagaggcaatctgcagaatgggagaaaatatttgcaaactattcatttgacaggggactaatacctagaatatacaaggaacttgaagatcaaaaaaataaatcccattacaaagtgagaaaagaatctgagttgacatttcccaaaatgaaacatacaaatggccaacaggtatatg

SEQ ID NO: 90509 - DNA, 561 bp, Homo Sapiens
tacatattttggtttctagaaaatgtttgtttatgaagaagtcgatggaaaactgcaaacatatgcagaaaaggtagaataataaaaaaggtctaatgaactccattcagctttgaacctatccactcataaccattgactggcctttaaaaaaaagtattggcagaattaatttccacctaggtgatgggaagaaagtgttcgcctgttccagcctgtggctcctgcctggaggttacccagtggtgcgccagcaccaagccatcactccccgagggcctcccctgccaatggtgctggtatcccatgcagctcaccactggctgcgtggaaactcccttttttccaactttattattggccttctaaggagctgttttagatgttttttctaactgcctcctcccatgccattttaatactacagatgtactacgtatctgtttatatactgtacctacatctgtgctttgtacataaaagaaccagttttctcccccttgaggacagagactcatttgaacatgcataggttaataaacaataaattcttatttaaaa

SEQ ID NO: 90510 - DNA, 480 bp, Homo Sapiens
ttagggtaaggagtttaaaggaaataaatattcaaactgggtctcattgccaattttggtggaaatgagtttgtgtcatttcaattacaaagataaaagtatgccatataatttatttatatgaagatttatttttgtagtgtacatagtagtcatcaagtcttttgacagaagtatatttttaaagaatttatatgtgatgaatccataatgtctggaactttgctgagacatgagtgggcacagttttcattgtaaattacagcaaggaaagaaaatgtttaacagtgttaagagagtcagagcagagtggatattcatgcgattatgaagtgtttattagttaccattggcgacctagcatgcttctcatttcaaaccttggaaggtgaaaatgtacaaactctctaaataattaatgttcaaacactgatagaaattctaacatgaataaaaaataatataacttgttggttaaaa

SEQ ID NO: 90511 - DNA, 458 bp, Homo Sapiens
tgcaagggaaagaattcagagtaaataaacagtctttttctgggaagtaaaatatttccctaagatggagaaattgagatgagagctcatccacaagattacccatcaatgagcaccaatagcaaccaaatccactagaagactgggagcttttaagtcaagaaacttacatcagtatcatcattccaagaagcggtatccaagctgttttatcgaaagtgcgcatggcagatggtgctgtgagtggggagtgagtcaaaaactccgctggggtgtacaaaagtctactcaaatgtccacagcatctgtgggggatggagaatagttggaggatctttctccagaatccttctgttctgtagtacaagtattactcattatagactagcacgaaaaatcaagtgaaatgcgaacttaagagtttaaaaagaataaatggtgcttttctggcctattag

SEQ ID NO: 90512 - DNA, 387 bp, Homo Sapiens
attcatcactctttccaggcttcattctacaagtttcgttagaaatcagcctctacccttgtgaacaggttcggtcaaactgccatttttctccaggatgttagaattatacagagtggaaagctcaagtgtgtgagatggaggtaagggtgggagaggcatctggggtcatggggcatctcttcacacaagtggctgatgagatgtctagtggccagactcaaatggcttcctcagaccccacatttctcagcttcctctatgccatgctccaggcatgggaatatttgttttgctgctggtggctctgtctcctggaagtatcctgaagctgttccctgtctagagggtgatgtctccttgtgagtttggcagggaagctggatg

SEQ ID NO: 90513 - DNA, 488 bp, Homo Sapiens
agagagagaaggctgtctctctgtagatggctgtgtttcaactgtactgagaaatggaaaaagtcagttggccaagcaaaagtgctaagagcagagaggagtcaagaatcctcatgggcttccagtgcctggttcaaggtgtcaggatctatacagcctggcttctctactgcctgaagggaaatgagacaagcaggactaagtggaaacccagctccaagaacagcattcaacccaggatgcagggctgacacagaagagccagggcaactcaccaaaactatgggaactcccacctgatgtgcctttaaaccaggccccctcctgcctcaacctcctcttcacccacacgtaagcaataaaaacccaggctaataagatcgcaagacagagaacatgtgggtggttatttatgtttcatacccttctccattaagttacatgttggcctaagtccttctgaaaataaatgtctgttttaaaacaaa

SEQ ID NO: 90514 - DNA, 435 bp, Homo Sapiens
cagcaggatggacctgcccagtttggaacacatgatgaaagctccaccccaggaggctctggagccttccacagagcccctcctgaccactgtggaggagcgagagccagaaaatcacgcagagaccctgccagagaaaccacgcgaagccagagcaccactgaaatcttggagtcaggaagacaagaacttcgctcaatcttactttgacttcagcaagccggggatcaagagggccaccatcaaagggcaaatccagcttctccagccaccagccacgtcccctttgctgcagggaagcaaggaagactcagtgccgccaggaaaagagaaagagaatccattattggtgaaaatccattttaagctgtcagcccccacaatcccagagaaatgactagacagaaccaataaagcctccagtgctggcaaaaa

SEQ ID NO: 90515 - DNA, 487 bp, Homo Sapiens
cacaggggcctgggttcaaaatgggaaggaccacactggcattaggcggctttccaccctgggggtcgggcctcaccaaggttgggaatgctcaggctggggtctgccctgttgaaagcctgttggccccaaccctggggtccaggacacttttcttgaggggagaatgagggtgcagggctctccagtacaccttgctttctggtagtgaatggacacagaatgtaacctcagctgcccagacgcgggcagcagcagaagaccccttacccccagcgacctcttcagaggggcctctgggctcacccctctccttcaaccaccctctggggcccaagtgacactctctcttttgtgttgcagctcagtgccgccaggaaaagagaaagagaatccattattggtgaaaatccattttaagctgtcagcccccacaatcccagagaaatgactagacagaaccaataaagcctccagtgctggcaaa

SEQ ID NO: 90516 - DNA, 499 bp, Homo Sapiens
ccagctctgcctccaaatgcgacgtgtgctccctcacctggacagatgcacagacacgcacacgcatgcgccagcagcctctgctcaaagggcactcacctcagggagcaggctggccctgggataggtgaggcctctcgggagatccctgaggcccaccagctaccaagcaaacgagaaactagtccgcggcaagagaaccccttacggaaagtggcaggctgcacccgggcactcctggggactgacatgctcttagatttacttgcaaaaacaggtaccaagggtaccttctccagggctccctgtggcgtctgaagggggcagtggggccaccttgactgtgaaggccgtggcagaagccctgttcaccagggctgggcaggtctgcacagggcccgtggctgggtctcagggtcctctgaggtagtcaatgtctctcattaaggaaaaacaggatggacaagatcccttggcttgagagagaatgcctctctta

SEQ ID NO: 90517 - DNA, 387 bp, Homo Sapiens
  misc_feature (357)..(357): n is a, c, g, or t
gatcatggcccagagctggcagaactgatcagaccaatgctgagcaaaaggcctgaagaagaccatctggaggagcatcccgagggctttccccaaagcaccagatcgccttcctttccgaggccacaaaggcgagaacctccagaaatagcatgaaacacggtgacttggtgacatccaagcctgctgccaccgtggtttccgggaaggcagaatcaaggcatgaagtaatccacgccaaccacgctcctctgagggctgagcaagacatcgatagtgggtgaaggcaagtgtttgtcccaggagaggcccaggatggttgctcccttgaagtcacccgccagtctgaaggcccangggacttgagcaataccaaaaactggccac

SEQ ID NO: 90518 - DNA, 414 bp, Homo Sapiens
tcccagccaaggataatcctaatccctgacttcagcttcttgctatctacaccatctgtaaaggttacctatccttagacatgttagaaaccatatcagtaaccatatgatatttaaaatcttgagatcaattgtgtcgagtaaaacaaattaaatcatgccagataaaaattatgaatttttccataaaagcatcatcttcaggaaggacctcaggatccttcctgaggatggtataacttcgcgggagccctcccagaaagactcctgtgttatctccaataacagtactaccattcaggatggcagaggaacctagagaagaggagatgagaaatacaccttcaccaggatactctagttttactagctcagcaaataataaaatccttcaccagcctttgggataccaaa

SEQ ID NO: 90519 - DNA, 651 bp, Homo Sapiens
gcggccgcctcacccccaaggaccggcgcctggacacctggatctgccggagcagggcccgggccacgtcgggtgccctgaaggctgtggtggggtcaaagtgcacatccacaatggcgcggacggatttgccgggccccaggtcccgcaagcggacactccgaaaatccttcttgacgtctgaattccggaagaggtcgtccagggtgctctcaatgctcctggctgtctccccgaacagttctgacttggggtcagccatctcgggcgtgtagaacagctcctggccctcgacgccctccagctccaggacgccctggaacaccttggtggcggggcagttggagccctctgcgtccagcgagggcgtcttcccatcagagcagcagcccaacgcggagttgtagcaggaagccctctcgacaggtggcccaagggtggccacgctgctgccctccaagggctcgagccccccagagccacccccactggcctcctggtccccgctcagttcctcatcgctgcttccatcagtgctgccagattcaccaaaggcggacgccaccaggctgggtgcaggggagggtgccgtgggggcaccgtcagcacgggccacacggtggtcctggggacgcttgcagtggttcgagg

SEQ ID NO: 90520 - DNA, 910 bp, Homo Sapiens
gggtgagcagggatcaaggacttggggtgggtgggcaggcgccgagaggctccaccagagcctgggctcagagcgcgtctccccagtggctcgatgcccttgtgagtggcagcagcgtggccacccctgggccacctgtcgagagggcttcctgctacaactccgcgttgggctgctgctctgatgggaagacgccctcgctggacgcagagggctccaactgccccggtgagtggacggctgggcgaggggacgtgtgaggatagcctgggctcggccgaggtgctgccccctcgcctgggcagcaggtcagtgccgggggttatggtcttggggctcggccccctcaaacacgtgcgtgccggggaccccacgcctaacccgtctctctcgttgcaagccggcgtggcacactgctctgaggagtcctcctggtaaccgacaccagccccaccctggggtccccactaacctcatgaccatctgactaacatccaccttcccttgcacccttgtggcttgctgctggggcctgtgcctgggccagcctggatgccaggcagatgccaggcagggactcactgtacctcccccacagccaccaaggtgtaccagggcgtcctggagctggagcggcgtcgagggccacggagctgtactacaccgcccgagcatggctgaccccaaagtcagaactgttcggggagacaagccaggagcattgaaagcaccctggacgacctcttccggaattcagacgtcaagaaggatttccggagtgtccgcttgcgggacctggggcccggcaaatccgtccgcgccattgtggatgtgcactttgaccccaccacagccttcagggcacccgacgtggcccgggccctgctccggcagatccaggtgtccaggc

SEQ ID NO: 90521 - DNA, 890 bp, Homo Sapiens
  misc_feature (689)..(749): n is a, c, g, or t
  misc_feature (826)..(826): n is a, c, g, or t
ggggaagccaacaagaatttgagaactgtaaataccaagccttgaaagggaccatggtgcggcctgtgagacataagaaaccagtcaattactcacagtttgaccactctgacagtgatgatgattttgtttctgcaactgtacctttaaacaagaaatccagaacagcaccaaaggagttaaaacaagataaaccaaaacctaacttgaacaatctccggaaagaagaaatcccagtacaagagaaaacccctaaaaaaaggatggctttagatgacaagctctaccagagagacttagaagttgcactagctttatcagtgaaggaacttccaacagtcaccactaatgtgcagaactctcaagataaaagcattgaaaaacatggcagtagtaaaatagaaacaatgaataagtctcctcatatctctaattgcagtgtagccagtgattatttagatttggataagattactgtggaagatgatgttggtggtgttcaagggaaaagaaaagcagcatctaaagctgcagcacagcagaggaagattcttctggaaggcagtgatggtgatagtgctaatgacactgaaccagactttgcacctggtgaagattctgaggatgattctgatttttgtgagagtgaggataatgacgaagacttctctatgagaaaaagtaaagtnnnnnnnnnnnnnnnnnnnnnnnnnnnnnnnnnnnnnnnnnnnnnnnnnnnnnnnnnnnnntctaaatccaaatgtaatgctttgggtaagcttggtccaaaacacttaattttataaaggaaatgtatgtggtttgnttgccgtattttttcttatttttgcctttggtctctttaacattttcctaacgtccatttcttg

SEQ ID NO: 90522 - DNA, 504 bp, Homo Sapiens
cgcaagccagcttcttctgcatctgaggggctcctggcgcccagaggaggcagacagatgtcttctagctgagtttctaaccgcatgatgagactcagaccttccgctgcactagaaaatctgcaacagtgtccctgagtcacttctccttagtgggcagactcgtgttagatttgtggaacccagctctctgatttactccttttggaaaacccatggaatttcatgtataaggctttcatttgtattttaaggtttttctgtttgttttgagtatatacatggtgctcaatagcaacatcttagcagatgaagcagtttatgattccactccctcctgtatgacaggtagccactatactgaatcaaggtgctgaactcaaatcacaaaattctggcttaccgatacaacaaccaatacatctttgttctgtaatgtaaaatttgactccttacttttataacttattaaagttaaaatgtctgtgtttttgcaaatcaaaa

SEQ ID NO: 90523 - DNA, 689 bp, Homo Sapiens
tgcagcatcttacatctgtagcttgttagaaatgtaaactctcaggccccacaacttacttcctgcattttaacaagatccccaagggatatgtatgctcataaaaatttgagacactggtttaaatgaaaatggatataaggtatgtataactgggggtggggtgagggtaggaggcatttacaactcagattttatttattttgaaattatcaattgtataaatctaatttattaccaaatagggtcttttaaaaaatatttttatcgttgaaaccttgacaggtacttcatattcttctaataatttaaacagtccaataatgtggtatacactttgacatccaagaactcaccaagatgtttttcagagatttattctcgatttaactatcatagcatttaatgaatctgatttgtagttcaataaattgtgggttgaactacttatccctgtgtgaacattgaattactttctgtcactgaaactgaggtatttgggtgtggtaagtacttcgaaaattgtaatactgtttgggcattgtctaaattattaaaggttaaaatagaaaataaagtcagaatttttcttttccattccaaaggtgtacttagagatctctattagtattcattcgagatgacatagcagctcatatcatggttgtttattggatttatctgttcta

SEQ ID NO: 90524 - DNA, 509 bp, Homo Sapiens
tttatgtgctatgtctctgtttaatagtagttgagtttgtgtacatgagatcaatattttgaactatagctttttatgagttaaaaattgacggaacagttactgtgcacttgctgtgcaccatggtagtctcccaagtagtggtttttctgcatttcaatagtacatgagataggctgtgggtggcaaggtttcttgagaaagtgagggatgcacagttgggttttagaatacatcttgttcctccatgcccttccccaccaaaaggctggtagtcttgcatttgtatatagttagggtatttgatgtgttgcttccttgacagagttttgcaagaatttgcagatttaacaggaacaaaaacttacttaaaacaaaatctcttagtaaaagcatagtctagcaagatttagaatgatactttggctaacagtactttctctatatggagtgctttgtttccatagcctcacacgtatgttttcagataatagttgagttgaaaatgt

SEQ ID NO: 90525 - DNA, 377 bp, Homo Sapiens
acaaatccatctaattacctacatgaccatcatcatttggtcatgtttctccattttatcattatgtataccttaaagacttgctcacattacttaaaattgagataggttaggcatctatccaatctcccatgccagtaattctacagaaacagattaggttagctagataagcatgttaacaattaaatttatgctgtatccttctaatcaccactttctcatcaaaatgctcacaaatcatctgcatcattgtccattctttaaaaatgtataaacccatctctactaaaaatacaaaattagctgggcatgatggcgcacgcctgtaatcccagctgttcaggaggctgaagcagaagaattgcttgaacccc

SEQ ID NO: 90526 - DNA, 452 bp, Homo Sapiens
  misc_feature (16)..(16): n is a, c, g, or t
ccgcccagccagtacntggtttctgtctcagcggggagctgactcctctctgtgcccccagcgcagggctggactctgaggaggaggactcagtagataggtattgagtgatgagatgagggaatcggctttctgtggccgggaacactcctgctgcagggggtccacctgatgggtgagtcagagaaagactcaggcctgttgaaagtggatcaacaggcaggcagggagatggccagtagccagccgtccgtcctgttcacagcctgcggagtggtgaggctgcctctgtgttttcatggatctgagattcagaacatagctggtttacagccatggcccagttgtgtgctctggagtttcactgcctgaattttaacttgaaaatgtaggacttgggagtctctctgaaccattctggcttgggagattgcctgattatatatttcaaa

SEQ ID NO: 90527 - DNA, 486 bp, Homo Sapiens
cagtaaatttgccataggtgcctatggatactgtttagatctgctggtgacatttaaagaaagagcctttgagaaacatgcatacttttctcttttctcctatattcaatactcatatagcctaaaagatggaaactggttcaagaatttaaatgacttgttccctaaaaagttaatctcctcacctttgtgaaatatatcaagtgctttctataaataagggcaggaaatgctaacttcataagcatagtcctagtcattaaaataatttgatcatcttctaaaatttaagtatgatagtaacacagtaatatggaaaatctcaatatacttaacacttcctaaacagcacaatgaaatgttgttcaaggtctgaattaatttgctacaggacctaagcaagtctgtttgcttatcttttggctttaaaattctttaagtctaaaatggtgataattttagaataaactgacaatgtggggaaca

SEQ ID NO: 90528 - DNA, 512 bp, Homo Sapiens
gcggccgccatggtggagcagggtccgagccacgtcctgcagggcacgtctggggcatttcctgttttgtggtaggaaatgtccctgacctttcagaaccgaacccaatcctgaggctgactcctctacggaaaatgaggacaggacgggggtgagggaatgagagtgggaggtccctgcacctcctcgcccggctcctcaggaagaaaaccgctggcccttcccgagtgtgccggccgagggccgagggccgtgcacatggggagagggcgtcagcctgatggctgagcttttaaatgtcatcatcataacattatttatttaaatgtagttattttggtatttaattattttttagagaggaaaaaacctgtattttcctggtgggatgaaatagggatgaaatggctcagaatggtatatttaggcaattttaaaacatttattatttacataaagaccaaatatgatgaatctgttccgtgaattgtgtcggccctcagcatggggct

SEQ ID NO: 90529 - DNA, 413 bp, Homo Sapiens
cagcttttaaatccctgccttcctaggaagtgacctcataagaaaatcttataagactgtcctgtggggaaatcctcataacatttgggttaatgcgcttacactgcaggagaggtcaccaggaacatccaatcatcagaaagtcctacagggacgtgatgttacctgggtcatggaaggatctctctcaacacacatctggggtgttttgtggcatattctatagcaggccatgtggcttaatagttaaaatatggggctgaaagttacgagggttgggggatcatatggcagctgagctattgcctgacacgctgaccctacacaactcatgagttcgtggtacttcagtcagcttagctgtaaaattgggcacaaaggccagactttaccaaaaccagatgttggactcc

SEQ ID NO: 90530 - DNA, 398 bp, Homo Sapiens
tctaataagcctctatagtgtaggctattttaattgacattaactgtttacattcctatacatcctgcaaataatataaattctaattagggagcacttttgttttatttattgttgtatcttaagagcctagtatcatcctcaataggtgtaaataaaagaacaaatgtggttctcagatatatatggaactggcttgcagtcaaagaaaccaaagtcttcaaaattatatagttgtatatttcaataagatagtaagtaaaaggcacatagaataagatagttgtaatagaaaatttaagagattgttcagaaaaagacaagtcattctataaatagtgcatgcagtataaaaacgccaaggtaccatgaaatatgtgaataggaaaaaactttgg

SEQ ID NO: 90531 - DNA, 480 bp, Homo Sapiens
  misc_feature (287)..(308): n is a, c, g, or t
caagtgatcagcagagttgcatttccaaagaaaaaggctatgagatgagctgagttatagagagaaagggagaggcatgtacggtgtggggaagtggaagagaagctggcgggggagaaggaggctaacctgcactgagtacttcattaggacaagtgagaatcagctattgataatggccagagatatccacagcttggaggagcccagagaccgtttgctttatacccacacagcaactggtccactgctttactgtctgttggataatggctgtaaaatgtttnnnnnnnnnnnnnnnnnnnnnngaggcactagtctatctgcaattactcaacgaggcattttcataggaaacagactatgattaatccatttattcttcccacacacttaccttactaagtctttgctttaataaatgagcaaccctgggtatagtcttaaaattctgcacaataaattttgagaaagaattgt

SEQ ID NO: 90532 - DNA, 404 bp, Homo Sapiens
ctgcgttcagtgctcagtggtgagttcccacgcaagagcctgggagtcaaccagaaaagaacgcacgcgggcgggcccagcgacctcgggcgccatctgctgattaccagacgccactacctgagaaatgcccctccagtcccctcattgcccagctgcggaccctaagcggagccataaccgtcctaccaacccacgtcagcagaagagcccagtgggagggcgtgtgttcacttctgctcctctgggcaaagacgcccaggtcagaaacacccacccgaccctcccactacccagagacagccccacctgcacagctcagagcaggaccactgaccctctggctctccggtcatatttgctattgaagaccagaataaagtatttttatcaggattgaaaaa

SEQ ID NO: 90533 - DNA, 397 bp, Homo Sapiens
ggccttcaatcaccaaactccccacgatgtttctccgggcctccacctcgggcaccaaaacaggtcactacctccctgaagcccaggccttgccctggcccaaagaggccagtttctctggagctcattctccaaaagtcatcagtctagttccagagccacggaggccccctggaacaccccctccaaacccaaccctcccaaccaggccccagatctcgaggagtccccgagacaccctgaagggctggctggccggaggtcaggtgtgttctcctgctctgaaccctgggagccccttgtggagtctgctgtctccaggctgaagaggaccaagggcaccaaggccccattcagccctccgtgtatctaataaagtctgaccctgtgaaaaaaa

SEQ ID NO: 90534 - DNA, 456 bp, Homo Sapiens
ttttcttcagtaaacagtacagaaaatgatctgagaatgaaattattttttaaaagcccaaaggagaaaaagaataacaagatatcatagtctagcatttacaggccaaggtcaaaaacctgggtgcaatggatcccatcagcatgtaattacatagattttatatcccttctgcagttaaaatatttcatcttatcttaaaacacattgctgtggtctggagaccagcagtctctcccccacatctctcttcattcttgcttgtttcagtttcttatcttattcctctctgccctttctgtaaagaaagcaaagttatcttctcatgactacgtgattaaggggtatatataaggatgaattatacataaagatccatgtaaataatttatgttaaaatatttaagttaaacaatttcgatagaaaaagttcatttctatggaaagacagaattg

SEQ ID NO: 90535 - DNA, 492 bp, Homo Sapiens
gcggccgccggcagccctaccccttcgagcgcatgatcttcggcgcctgcgctggcctcatcgggcagtcggcctcgtacccgctggatgtggtgcggcggcgcatgcagacggccggcgtcacgggctacccgcgcgcctccatcgcccgcacgctgcgcaccatcgtgcgggaggagggcgccgtgcgcggcctctacaaaggcttgagcatgaactgggtcaagggtcccatcgccgtgggcatcagcttcaccaccttcgacctcatgcagatcctgctgcggcacctgcagagctaggggaccctgagctgctctcaggacggtggaccggtgacccctttgtattctgggcccatggaacggtgggggggtgcgcttgattctacttcaagaggcacatggggcgctttatggaacgagcaggtgggcctgaggggcctgggctcagagtccacgtccaaacgcaaagctggcagccctggaagtg

SEQ ID NO: 90536 - DNA, 735 bp, Homo Sapiens
  misc_feature (484)..(545): n is a, c, g, or t
tttaaattatatctcaataaaactgtataaaaataaagagaagcgcccggaagtgctgccttggagtcggtgagaaggcggccacggccaggcctggtgcctgaagaggagtcggagacggcggctgcagaggctgtgcaccacatacacctgcagaacttctcacgcactctgcttgagaccctcaatgggcagaagcttggggggacacttctgtgacgtgactgtgcgcattcgtgaagcttcgctgcgtgcccaccgctgcgtgctggcggccggctcacccttcttccaagacaagctgctgctcggccactctgagatccgtgtgcctccggtggtgcccgcgcagacagtgcgacagctggtagagttcctgtacagcggttcgctcgttgtggcgcagggtgaagccctgcaggtgctcacggccgcgtcagtgcttcgcatacagacagttatcgacgaatgcacgcagattatnnnnnnnnnnnnnnnnnnnnnnnnnnnnnnnnnnnnnnnnnnnnnnnnnnnnnnnnnnnnnncactcgcacctgcgcagctgcgtcaccgcctgcgccacctgctggctgcacgtcccccggggcaccccggtgctgcacacagccgtaagcagcgccagcccgcgcgtttgcagctgccagcgcccccaacacctgccaaggctgaggggcctgatgctgacccctcactgtccgcggcccctgatgaccg

SEQ ID NO: 90537 - DNA, 484 bp, Homo Sapiens
cactattattatatgtacaactaaggaagaaaaaatgctgccaattaaactgtgacataatgccatgattacagtcctgtgaaattgctgagtgccatgagaggacagtgacaaccttggggcctcatggtgaaggtggcagaaactttgttagcctgggtgctcagggtggacagctgctcttgccaaccgggaacatttgccttgagctcttttgtaagtgacagataagcttttattgtacttcagccaagatacaaacattggacgtatttgtacagcagctaaaggtactataataatacatattctgaaatcactatgtaccctaaaatattttaacaaaattcttgcaatatttgtatgagaactgctggattttgctttcttaccaaatttgctgttgctactgaaaaaagagaataacttggacaatgaaatgatctcaaatgaggtaataaaatcattactgaattttaaaaaa

SEQ ID NO: 90538 - DNA, 757 bp, Homo Sapiens
tttatagagaccggatttcactccacaggtattgacttagtgtattacatgaccataggcactaactgctggccactcctgtcaacctcaagtgaggtatcagtagtaaagttcatccggactgtgtttacacactattccaaagggaaaattaaagtatccagaagagtttaaagagtctcaaaaactattttgaatgcaaactggtagtaatgaaagtgtacacattattttcagatgaaatcttcaaaacagacgcacttttgaacttagcatccccagtttgatgcacctggatacatgggctgtgcctgacctaaaacgtgtgtctgttcgtttctgaaaataggactgtgttgttctacagctatagcctacctccttggtcctctcctacatccatttgaaaaatctttgaaaatgggaagagatttttaaaactcagacaacggtcaacttgaggttcaaactggttctagtttgaagttctaaaattaacttcctttaaaagaaactcagcatgatcagatttttaggctagcaagctaaatgtgctgcaatgtactgtggaaactatgatgactgtgcttttatctataaattcaatctcctgtaacattcaccaagactacgaaaagcaatcactgagcaggccacccattttctctctactattctttcaaaacaggaatattaaaatgtggtacaacacagaatcatctttactgtgaattacatgttctgctaagtaacttgc

SEQ ID NO: 90539 - DNA, 476 bp, Homo Sapiens
tgtgaattagaatcaggaacgaagattcagggaatgtctgtcacatcttatggcatcccacctggacagaatatccgatttgaagattgtgattgacttccgtaaaactgtacaactctccatttggcagtgcttacgtgaagtaccaaaacctaaaataaaccaagcagagtagctgacttgtaagaaaactgctctgcctggtgaacttcagcatagaagagtgggctccaccttagattttccaccagcaagaggacaacagtctatcactcttaaacaataaacagggagttaatgccgagaatccatcagaagtatttactgtttagaaggaaatggagcagcaccaaatgggtttaattcgactggttgggactgttgggactgatgtggagtgatgctttgcaccacaagttctgtaaagggcacggcaccaaaatcatccattttcaatacatttgcactatggaatg

SEQ ID NO: 90540 - DNA, 836 bp, Homo Sapiens
  misc_feature (146)..(173): n is a, c, g, or t
cagtcgacggtaccggacatatgcccgggaattcggccattacggccgggtaagcactgttagaaggtacaagtgtattaatatcactagttttgaggcgcttgggtacattgtgtttcgaatatatttagaatgtgcagtaaacnnnnnnnnnnnnnnnnnnnnnnnnnnnnagcaaacttgtaattttaggtccaattattgagttgacagtctactgtgagaatgagatgacatatctactgtgagaataccataaatgatgaatagtttatttgagaacttttatactcagtggtgttttatatattaagataaaaatatgtacacacatgcatgtcacatctctctactgtggagttaatgtgaatttttaaaaaatggaattgcaaccacaatcatatctaagagaacattcactcctagtgagggtttacaaaagctactaagagaataaggtagatgataatgcaaagggtcatgatttggggttattcggttttattttcacaactttatactgctactttggaacagaactggtcatccatgacctatgctcttaaaggtgattgaaaagtcatctaatagaagctgtatagaagctacttttgacttgctggcaaacagctttaagtgcacttactttgattacacttcccattctgttcaaacttgaaattttcttgaagccttttatgtaccacttaagcaaagtaacttttaccttttaaataacagcaaatttacatccttcatggtatttctactggttacgaaagatacttggtaagtaattcagtgctcaaattatggtgggaacactatgagatggc

SEQ ID NO: 90541 - DNA, 901 bp, Homo Sapiens
  misc_feature (330)..(354): n is a, c, g, or t
accccccaaaatccatggacccttttgcatttatcattttaccttattctctttagtagctttggtaaaaccctcactaggagtgaatgttctcttagatatgattgtggttgcaattccattttttaaaaattcacattaactccacagtagagagatgtgacatgcatgtgtgtacatatttttatcttaatatataaaacaccactgagtataaaagttctcaaataaactattcatcatttatggtattctcacagtagatatgtcatctcattctcacagtagactgtcaactcaataattggacctaaaataacaagtttgctnnnnnnnnnnnnnnnnnnnnnnnnngtttactgcacattctaaatatattaaaaacaaatgtacccaagcgcctcaaaactagtgatattaatacacttgtaccttctaacagtgcttacgtgaagtaccaaaacctaaaataaaccaagcagagtagctgacttgtaagaaaactgctctgcctggtgaacttcagcatagaagagtgggctccaccttagattttccaccagcaagaggacaacagtctatcactcttaaacaataaacagggtaagactgaaagttgtgtctatttgcaaatccggataatgtcgtaactatacccaacacgtacacagggattggggtaagggaaaataattacactcctgaataaatgttctagtcagttaaattttcatccggcctacaacctttcctcctccacctattatacttaccatgcaatttttgtgtcttagcagatacattcttcaatgccataaaaagctgatctttttaatactaacattttactgacgtgatattaaaataagcaaatggtccactttttaaaggattattcaaa

SEQ ID NO: 90542 - DNA, 454 bp, Homo Sapiens
gtttatttaagaaccattccctagctagggtcatgaatacattcttatgaattattaatcccatatggatagctagtttccctagcacctttaaaaaatagtttattattttcctcctgatgtataaggccacctttaccaatttacatataatgtacggaaatgtttcttggctctgcattctgttaaattggtccatttatctaactttgcttagtaacccactgtttttatcattgtggtatcataattgattatcacaaatggtagaatgattgtcctcaaagtcttttctggtatatatggatataattgtatagcttttcttggtgtagtaaagtacacagttaaatcttctaacattgaaatatcttttagattttcacttacagaatggcaatgtgaagggccctgtggacccactgtcctaggaattagctataactagagaaaa

SEQ ID NO: 90543 - DNA, 1314 bp, Homo Sapiens
ataaaacaagctacaaatagtttccctctctccttcacaaaggaaaaccacacaacaccacctacacacacgatcctgtgggagacaagatgcctggggagatctcgaagatccaaacatctacaggcaggcgccgtctccatgtgtgcatgcttcctccaggcctgaaagtggggccagtgtctcgtgcaaggcccactcagctccggcacgttgagttctctcattggggctaatgggagaaggcttccttcccacctttccacgttggggcagggccaccagtcattcctgagataacctctaggactttctccaggacagcagggacctcctttagcccaagaccccatcagatcctgtcccgagaaggttgtgctcctcccacagggacagtgcttgtggtgccaacgccttccagacccggaacgggtggaggtacttttagggatgtcgggttggaatacaagatgaggccagatttgcaagggtgatctgaggaggggaccagtccagggctacccaacctccctcactgccaccacagctgcttatgggaaggggcgctaagggccacttgctgctctgcctgaaggccacttgaataggcacagcacctgggcagagggagctgcgcctcagaccagaaggctgggcagcccaccctagaatccgcggaagatgcctgtgatgcctgtggaaagttgggccgggatttccctgtagctgggttatcacccctgcccttctaggggaggcagaataggaaacccaagatcagttttacttctggaattagcttaaagcctggaagcccataagaaaacttgagggaacaggaagaacctcagtattgggtttttaaaaaaccaacaaaacaactttagtgttaccaacaaggtgactgacacctcccccaacccacccacccaggcctgtgatagccactaggacaacagcaggagatggaggagtggagaggtcacacccaatctgccctggcactgagacagctgcgtctctgggagcctcactggtaggtttgcagggaggtgaagagtttccctgttggcaccgcacccctcagtgcaggctttctgtcctgtcccctcccctgcttagatattaaatatctacttttttaaaggcccttctgtgtgtctttttcttctttgcctcccctctcatgcgttatacagagtagatgctaagcatggatgaaaacgtttcgagtgacgtaatgcaaatcctttgtggatcatttgctccgagggtcactaagatactggtgcggacgcgtgggtcgacgatatc

SEQ ID NO: 90544 - DNA, 433 bp, Homo Sapiens
caaatgtatgagttgaataaattgaccccaaaacaacacaaatagtggtgagtatggcttcccggtgcaaaaaccctttgaacctgggagagtttcaacataaaggctaaaaggcaggggagatacagcagagaagacatcagaaaggcctaagaggcgctagaagcaaggcagcgacaggttactagacgcaggcgcttcaaaacaagctgcctcctggggagacggcaggagagccaagtgggctcagccccaaatggctgaggggacacctaaagggttccaagcaggggaaggacaggcccggtagcagggcctgtgagtaagggcagagggacggggagatggcttcacttccgaggagcgttgcgcagggagagaccgccaccccggccatggtgacccgggagagtgacattgttcaaagtcaccg

SEQ ID NO: 90545 - DNA, 584 bp, Homo Sapiens
agactcggtagagcttggttttgctttggtttgttttaattctacaactactgcgaacaagaaaataaattagctttgtgctgcacccgcagtttaaattatcatttggaataactgcttcccaatttcttagactgtttgaaaactttccacacaaagtcagagctgacataagccaatgggatagctacttctctttctttttgcagcgcagttgtgttcatttccactggttggccatccaaataatctagtctcaatatatgaataaaaggataaatgaagggaccattcttgtcgtaactgcatcactatttttgagtgtgtgaattttttccacttatctgtggcaagtatacttggggtttagtttataaaataacctctacctctctaaaagaagaggaagaaaagtgatcattgtaggaagttggtttacaaatttcatctttcaggctcattgtgaagctgagtatatttttgccactttgctttaaagtagaattaactggttaatacttctcttccctcttctgtcttcctccgtgagtcctgttaataaaaataattggttcttggattat

SEQ ID NO: 90546 - DNA, 504 bp, Homo Sapiens
atctgtcagccctggtcagtagctcagtaagcaccttgagaatagctcaagtagatctgtaggacccttcttagaagcagtggttcctcatggagaaacttgtgaggctgttacacattctacacacctaacattattttcaaacaaaaatgataattttcagatgcttgacttttaccaaagatcactggaaggcccagtcctaatgttaggggtttgtttaaagtcctttttattttacaatacagagccccagtcaattccacaatctcaatttcatacatgggaattttatttaaaaatctgtggtttggggctttaatgaattggcctgtgaaaatgagctctaaatttcctcccacgtacactcaaaactcaagattgctccaaatctctaagttcttccagcaaaagatttcttggcatgtatattcacttatacttagaaatattcattcttttaatttatgccagaataacaaagtggaaatcttatttcaaaaa

SEQ ID NO: 90547 - DNA, 423 bp, Homo Sapiens
gagagaaattaagctttacaaataccccccctccaggatgaccccgggcccctcatagtcagccagacggccacatcagctcagctctgagaagaaagcccgtggttgggcctggcagagaggggcaggtggtggtcactgcaggtctgtccctgggcgctgccatggagaagaggacacactggttatattaactctcttcatattcaccaaaattaatgcctgcaagtggacaggcgcagacactgtggcagagaaactgtagttccggactagcgggtgaacccggggccatgttaaggaagtggccaagccgttctgctcacgtccccggtatgtcagccactttcatcagttttgttttaccttgtaataaaagttaccaaggagttagcaaaatctattaaaaattaccaagaagat

SEQ ID NO: 90548 - DNA, 415 bp, Homo Sapiens
tttccaaatcaaaagctattttattataacagaaaaaaactccccctttgatatagtcagtcagatacaagccaatgcacacatgttctcaagataaatgataacttgtctgcaagtaggaggacctggcaacaccgcttaccacagcagttctaaattccgtgggaattgggatggccatctgtgtgagccaactgtctttaaccaaaggaaaaatcaagcatgtgatacgtctagggcatacaacttggagccacgcagctaagctaaactcccatgagacagggatctccacggcagtgctctctcttttatgtttacatttcaaacaagtggcccttaaggaaaacattattgggttgtaaagaaagaactgatatattttctaaggaaaatgaactaagagaggggaaga

SEQ ID NO: 90549 - DNA, 508 bp, Homo Sapiens
cttgagatcatcgttggtttggtccgcgagccgaatgcacatgtagaggatgtaggcggagagacagggcactgtgtccaacagcatctggggcttcaagtctgtcaccaggttgaggatgaggagggcctcgccctctttgcggcactccaacatgccctggaaatccttttctttccactgaactgggacctgcctgttgaactcatggcgcttcctctcactctgggccaacgcctgggcagcttcttcatgtaaatcttcagttgcttttagagcttcctctcattcttttcctcttactttatttttcaccacagagcttcctatcaactagtatgttgaatattttgcttattaactttgtttattgtcttctccctcgattagaatattagctacttgagtacaaggatttgagcctgttacattcactgctgaattttaggctcctggaagatacccagcattcaatagagaccacacaataaatatatgtcaaataaaa

SEQ ID NO: 90550 - DNA, 951 bp, Homo Sapiens
aaaaggtcattcagccccggacgggtattcggggaggtcaaaatttcttaggacagggttcattctgctttgcagtgttcggagtcaggaagccttcatcccccgctgtactgcttcagccagtgaagaaggcgccagatgttggataaccagaatgacgtcatctcaaagtcatcattgcgctttttcaggactttcttaatgccgttgatggtggaggtcaccagggagtgcaccttgagatcgtcgttggtgtagtcccgcgtgccggatgcacatgtagaggatgtagccggggagacagggcactgtgcccgacagcatctggggcttcaagtctgtcaccaggttccggatgaggagggcctcgtcctctttgtggtactccagcatgccctggaaatccttctctttccgctggaccgtgacctgcctgttgagctcatggcgcttcctctcactctgggccaatgcctgggcagcttctaggtcctgggctttcttcatgtaaatcttcagttgctttttgagcttcctctcattcttttccagcttttctaccagttctttaaggtccagattctcgttggtcagccgggatatttcctgctgaacgccgaattccacctgggcctctggggagagcagtagcgtctggcagaaggtctgctgctgtttgtccatctcctccttcagggcctcgagctgagccttgagatgctccacctcctcctcatgctccaggctctgggcctgcagctgagcctccagcagcctgtttgtctggcagaccccgtgataggcctcaatggcatcctcctggtcaacatgcttttcactgttaggccacttgatctggcacttaatgttcggctccgcgttcctgccggcgagtcgccgctggtcggcgctcacgatctggtcctgagatgagcacctccctcgtgccga

SEQ ID NO: 90551 - DNA, 540 bp, Homo Sapiens
tccagtcggtccggtgttatcgatgccaccaaaatatattttggtggcctgccaacgctgagaaacttgagtatgaaagcaaggccagaagtaaatctgaagaaatattccggctgcctcaaagatattgaaatttcaagaactccgtacaatatactcagtagtcccgattatgttggtgttaccaaaggatgttccctggagaatgtttacacagttagctttcctaagcctggttttgtggagctctcccctgtgccaattgatgtaggaacagaaatcaacctgtcattcagcaccaagaatgagtccggcatcattcttttgggaagtggagggacaccagcaccacctaggagaaaacgaaggcagactggacaggcctattatgtaatactcctcaacaggggccgtctggaagtgcatctctccacaggggcacgaacaatgaggaaaattgtcatcagaccagagccgaatctgattcaatgacggaaagagaacattccgttcacatagagcgaactagaggcacagata

SEQ ID NO: 90552 - DNA, 406 bp, Homo Sapiens
gaatcaggcctctgagctactgagctggaatctgccttttggccggacccggttgattggaaccgcgttcatttgaggaatgctccctgcgaccagagctccaccaggacactccttccctccgccggccacgtttgcagggagcccctgagaggcagcggcagcccggatgctgaatcccattcgccccggtcatttccggagcgtcttccagcccgttccccgccatgacagcgacgtgtgctttgagctcagtccacagcaaagaccaccttggttctgtcccgccgcaaccacatccgaagaaaggggtcaggtattctaggcgtacggggactgataaattccaaaaatatgttgcctagaaaaagattgttaaaaatataaaggcaagttttattcaaaa

SEQ ID NO: 90553 - DNA, 478 bp, Homo Sapiens
cgcctggcccagccccgcctgcaccgtcctcaaaaagcgccagcagcgccgggcgtcgggccccgcctcgcgcgcgccgcgggcgcggtcgccgccgggctcgggcaacagcttctcggccagggcgctcaggaccagcagcttctcctctacgcggccggaccccagggacgccccaggcgcggccagcccgccccacacggcccgcagcgccgccccgccacattggaccagcactggcagcagtcgcacggccaccagcaccgccgcgtcctcgacaggcacggcctcatccccgtccccgcccccgcccagcgccagggcgacggcggtccccgccacgcgctccagtagcggcccgtcctcgcggggccgcaaacatggcccgacggctgctagcacttccacggcagcctcggaaacaggcgcgcgccacccggcgagcagatcgcgcaaagcctcctcagccagcgcggcc

SEQ ID NO: 90554 - DNA, 476 bp, Homo Sapiens
cagcatgattcataaactaaccagctgtgcctccttttattttgaggaccctgtagtcactataataaatttctaagccaaatttttcaaacaagatagttcttatagaaggagaaataataaatatgtgtgtgttgatgcatgcacacagaatgacctgtgaaaggaaacttaaattttgccggtaaaacaaacatatctctacagactgtgattatacttcataagcatttaaatacagttttatttatttccttaaatatattacttgggtaattaattttagatttgattgcaaagagcactgtatagcagttgggaccagctcttggcttggcttggcttggcttattgttaagagtttattggatcaagactaacaaataactttgtgatgaaaattcttcaaaaatatagctactcttttcaagtataccatttaaaatatttcatcaggcagagccctgaccaggaaa

SEQ ID NO: 90555 - DNA, 803 bp, Homo Sapiens
taagctgaagtttatttaccattaagcactccaaggctttagaaagcgagcactttagccctttggccatgctgaaattgcccttgattaaatccttgattttccccattgggcttgatcccctgatcattgtttccttcctactataatgtgcttcatctgtaacactttctcttgaactctgattggattcactgtgcatgcttcagtgggatctgctccacctttcagtgacatttaagacatcatattcccgtaacattatgtctcagtctgatcgtctttaccagtatgaaagtcattcatttagtgctaccaaaggggatacacaagccctttaggaagcagtacctctcgcctggaggatctgtgccatcttggattgagaattgcagatgtgacagaatggattgaccctagttggttggtattgatgacttcagcctggaaattgcttgccttttaaagaagcatatatgggttggaattatgccaaagcataggaagctgggaataagcaaacaaatgctgatatagtcagcaaatttggatagtctctagggctcatcatttttcatactacctctctcttctggcctgtgtctaaggaattgtacaacataggccagggccaacaaagtggagaggtggacacattttcatgttcattactaaaacaaacagcaaaactattggtttgttattctgtgttttcctcaagtcagtacatactatttggtttcaggatttctttccatttctctatcaagcattaaataattgagaactgtttcttcaaaaaa

SEQ ID NO: 90556 - DNA, 179 bp, Homo Sapiens
cgttcccatattcagaatttaaattatgatcatttattgtgatgtttttaaaaatcacttttaagccttaaaagtgaaattttcagtgtgaggtgctttcatgctattaatagatacagtatatcctaatatattagtcttcaaaatattaaggccgaaacagtgatttaatgatacta

SEQ ID NO: 90557 - DNA, 476 bp, Homo Sapiens
agaggttacaacgagccagacgactattctacacagtggaacttggtcatggagaagctaaagtgctgtggggtgaataactacacagatttttctggctcttccttcgaaatgacaacgggccacacctaccccaggagttgctgtaaatccatcggaagtgtgtcctgtgacggacgcgatgtgtctccaaacgtcatccaccagaagggctgtttccataaactcctaaaaatcaccaagactcagagcttcaccctgagtgggagctctctgggagctgcagtgatacagttgccaggaattcttgccactttgctgctgtttatcaagctgggctgacacccaggcctggagaagatgagacacctgggcccatctggctgctggagattcagtctcagttttatttctctgtggcactcactgcttctggaggggagactgttaataaaagatttgggaaaccccaaaaa

SEQ ID NO: 90558 - DNA, 448 bp, Homo Sapiens
aactttctcagagtcagtggtggagtcagtcttcaagccccttgatgtccagcttcagagtccatgcagatagtctcagttgacttagtcctaaaggcagctgtgggttgaggttccaacagcctctggtctgcttcattcctcaaagtaatctccaagcccgaatcctagcatggtggtagaggtgaggctccataaaccttagaaatagctctcccagatatgacaacatttgggccttggaccagtggtcgtgcatccactctacagtaacaggggcttctatagttaatttgattctcagttttaagattactagagaatcaaatgttgagtatgcacttttgtatgttagtgggatatctgaagcaacattactgataaaaagtaattgcacatttctggatagtgataactgcaataatactctcttgtgataaaaggaaaa

SEQ ID NO: 90559 - DNA, 486 bp, Homo Sapiens
  misc_feature (169)..(230): n is a, c, g, or t
ttttttaaagagatggggtctcactatgttgcctaggctgcagtgaagtggctgttcacaggtgcaataatcacactctaaagcctcaaactcctggactcaaataatactcctgccttatcagaatgtaagctcatcataactcaagaagcatctgtacttaagattnnnnnnnnnnnnnnnnnnnnnnnnnnnnnnnnnnnnnnnnnnnnnnnnnnnnnnnnnnnnnntgggcaggctgccaatccaggaccaaggggtaaggccgtgtcaatgcacctagagaacggaatatcaagccacagagaactattttcaagtctcagaactgaatggaatttgtcctgcagacttacaaacctgctttaaaccccttttctccttccaatttatctcttttggaatgggaatgcttcttcacctgtcccaccattgcatctcagaaacagataacttgttttctatgtatcacagctttagaaatag

SEQ ID NO: 90560 - DNA, 526 bp, Homo Sapiens
ctccggtctgcagctcccagcgtgattgacgcagagacgggtgatttctgcatttccaactgagatactcagagtggaagtaagaatgaggaagatagatagatagatagatttgcacatagccatgaaacctcctgtccgagttgtggaaggtccttggactctagcagccctctacccggctctacccaagagtggaaaggaacaccaaggccatttcaattttgcagcaccatccaagaaactactacctatcaagaatgctgtcacacctctgaagcctggcaagcatgagattcaaccaccgatgcccaccgtggtctctgaactcacccaagcacccaccaggcaggctacaagtgaggctacctttcaaactacattccccaccctgaaggcggataagccaaccatgccctccatagaggtcccccatccttaaataagagacccctaagagatccccatggctcgacatactccaaataatcctatctcacaatatattccattgcatctcaaccac

SEQ ID NO: 90561 - DNA, 386 bp, Homo Sapiens
tttcatgttctaggaatttatttgataccaggatgtgccatgaaattattgtaacactttacatgtattagctaatttactttacacaacagcctatgacattgctacattgattgtccccactttaccactaggactactgagccctgcgagtttaagttatatactcaaaatcacacaaccacaaaatatgtaggaaaatgtatctgagatgtgagcagccatggtagtctggttgactcctgttaaatcagataatcacattaaactgtatagtatccttaaaaagaatagcaatagaatatataattatgtatgaaaaacaaataagaaagagaaatcaaccaagccaaaatatggcaagaaagaaagattaggataccaag

SEQ ID NO: 90562 - DNA, 435 bp, Homo Sapiens
caggaaatttacaagggaatagaacttgtcagttaatctgccaagtgggttaagtagagggcaattaagaaagcaactagatgtatacctaatacgttgtgttttaactattatatgtctataacttacggtgtttataagctaatagccctcctttcccatcacatctcttaaggcagatttttggtaagatctaaatattaatcctaaggatctgtttcatgcaaatctaagtactagtttttcttactaaacctttatttggtctctaaaactttaaggctgttatgtttcattctttgtcttctggtgtcagttcacttgcatgtgcccgaaaatgtatttttactcctctgtttctgttctccccatggctctatctttcataattattagccccttagaacactataaccattaaaaatggcaagcatg

SEQ ID NO: 90563 - DNA, 547 bp, Homo Sapiens
gcgaccgcggaaggccgtagagacagaagttgcaagagaggctacctggcctactcaggggcgccgcatctccgaggtggggcgtcctcaactttcctctttcttgagcccggcctgctccggcctctgaggggcgaggacgcttcacgtggtggcctggggcccaccccgcctaggaaaggcggatcctttacgtctgaccctctagcaacccctgggccggtctgggaaagttccccagctgcacttctgggaaatgcagaggctgcctgccgctttctttcgcagttttgcggcccaaggcttgggcgaatcagttcacatcaacacccctactagcctctccctccggggtcgaccatttatctccagcagcggaccaggcgcccgggccagggtgacatgcgcgccctgcctacacgcagctcggatcctctgctgtttctggagaggcctccacaggtagaagctccctggaacaactgctggaataaggttccagagtggaaggtggaagctccctcttgggataaaggatccacagtgg

SEQ ID NO: 90564 - DNA, 549 bp, Homo Sapiens
ttttcttgcagctccagctcaaaggaaaacaaaaactgggtttgaatcctcgctctaccactaggctgcgtgactagcactaggctgcgtgactaggggaatgtcacttagcacctaggagccttggtttcatcacattgcaagggtggtgtgagaatcaagtgataaaatgttaagtgccaaccaggcacaatgtctgggtgcaaatggttgcatgacaatagaggtttctttacattatgatgactactcagccttttaagtgacaaagcatcttttaggtggagaccatgtatttctagtgatcaattcaaattagtacgactttccctagaagagtcctttcctgatatttgcagggttaggccagtcccctggcctaatccagtgctgtgcaaaagaaccgtgccagacggggaaaatggttaacaatatttggcttctcaatcagcatcattcttttcaacaaataaagaaaatgggagaaggaaatagaataaacttattcaaagagaagtacgtccactgttagtatcgattttactggca

SEQ ID NO: 90565 - DNA, 794 bp, Homo Sapiens
cagccccgaatggagtgcccaggcgtgttcgccgcggaggcgccgtcatcccgggcccgccggccctgagctcccggcggcgcagattggctcacagtggttgattgatcaaccccattggacgttggttctgtggtacaaatggagtacaggactcagtcgtcacggcctgagtgagagaagccttatttccaagatggacgaagaagcggagaaagaaatgaaagcctctcttcaggctgaaccacaaaaggccatgggatttaacttttatttatgttgggcaagactgtaagatggctgatcagtaatgttgcagcttcttagctgaaaccaacaagcttcacttttaatcaacgaagaacacaagtgtgactttgacatatatgcaattttatgatcatattcgcttgtgaccatgaagcttgtcaacatctggctgcttctgctcgtggttttgctctgtgggaagaaacatctgggcgacagactggaaaagaaatcttttgaaaaggccccatgccctggctgttcccacctgactttgaaggtggaattctcatcaacagttgtggaatatgaatatattgtggctttcaatggatactttacagccaaagctagaaattcatttatttcaagtgccctgaagagcagtgaagtagacaattggagaattatacctcgaaacaatccatccagtgactaccctagtgattttgaggtgattccagatcaaaagacacaacggcaaaggggggctgcataacaacttgacagatcatccaaagcat

SEQ ID NO: 90566 - DNA, 455 bp, Homo Sapiens
ctaggggcaccgtgtgcctcccagtgatcgagtttcatgcctgctgcttcagcgagagatgcctggccacactgagcctgcacccgtcccttccagacgccatccacagcctttcacattactcctggaagaacaaatcacgttcacaaaacacagaccatgtgcccaatattccacacgagtctgctttgcattttgctatgagaagcatttcctcgtgacagccaatggctgatgacagaaggatgaccagcgagtaactgcgttcctgagtaaaagtgtctgtgtccagctttcagaaggactcagtcagcaacagagagagacctcagctcctcacatgccaacttcctttatcaattccacaagggctggccgtcaaggtgtgggaagcagccactgcagtgaagacatggatcatggccagcttgcagaggtcagcagcggagcctatg

SEQ ID NO: 90567 - DNA, 500 bp, Homo Sapiens
tttttgaagttgcaaagtcatttattagtgtacgccctatgtaaatgaagaggctatttcccgtcatagctgatgtgtttccgtttgatttcgttctaagaagttcttaggttacctgcctccatgccctattctcctgcctcagaagcacagccctcattttgctacaccccaatctgtatcagactatctcaaagagcattccagtttttaagaaaagttttcagagaaaaattcttttaaataaactctataataaaaatctcttgcatttaacattggcagagtgaagaaggggtatctctaaacccgtcattctgagaaattattgtataaacatattagtaagacagaaaaaaggaagactggagcagaattcaatggaatggaaatcaaaatagcaggaataggaaaaaagataaataaagacaagaataaaagaagatgacaggcaaaaggaagacatgtgaagtagccatggaaatgagatacaaacacag

SEQ ID NO: 90568 - DNA, 592 bp, Homo Sapiens
tactgatattgcagaaagaagatagttatacaagggtggcactgaacacacaagaaacaaatgattcacggtagcattagaggcaccagcaaaggacacacttttagagaaaggaatctgctcccctgtggctctccaaatcacactccttaggcaccacatctacagggaagacccaggtagagactgtgaggatctcaatggcctggtgggccacaagatcacttctgcttccggctggaatgctccttctccacagagtccggaaactgacatatgcagccacccacccagaaggacatgtccaagaaggaatggaaagaaaaatgatggcccagatgttctgtagcttgcagtgactgccaattcaccacagaccccagtacctgggagggcaaggcagcatcaggctcttgcttcctggtttcaggcagccagggccctgatggtgggtggcaactctgacagaatgcagactggccaggggagaaacctttagaagggcactggctgacgggacttgggggttgaacacacagcgctgatttatcacttccttactcataaaaatgtgattcgaactgctaaaaaa

SEQ ID NO: 90569 - DNA, 569 bp, Homo Sapiens
tgggctggtggccagcggggtctgggcgtggttttacccagctcctttgcgaagctgctgtcctttcctcaacgttaccacccggctgggcagcctaccctcgcagcaacaggtgtgcaccttccaagcttgcaacagaccacattcagaagcttgatttcttgttgttctgggaatatctggatcagagatttctccaagccactctccccgtcatctcctccacccccaggacccaactcctgcccctcccaccctagcccctgttctccctgcccacctcctaccccactggagtggcctttcatcaaacctaaaccaaagaaaccaacagaccttgctgtcaccactactccgggacctggaagttaaagcgagggagagacggtgaaacacagaaagcagaacgccttctgttcttccacaacacagggtttgtggacgtggccactataagaactcgcactgcgtgctgattatactcctcagcacaattcatttcttaaactttttagaataatttaaaatttacaaaaagttgcaaaaataaaaaccagtaaactcttaaa

SEQ ID NO: 90570 - DNA, 527 bp, Homo Sapiens
  misc_feature (472)..(472): n is a, c, g, or t
  misc_feature (477)..(477): n is a, c, g, or t
  misc_feature (510)..(510): n is a, c, g, or t
tatttaatattatggacctatgcacttcttgtggaaggagcaggtctttcagagaaagtgcctattttcttgaattacaacatcatgaagatttacactccaaagttctaaagaaagactccttccaatgtgggtggcacatttataaaataatgctcaaaaaacaaaccaatggacttgtcagaaaaataggatgaacacaattaaaaacttcacaccctggctcattcaacaatggtcaagattttcacgatgtcttatttcaatttttgttgcttttaaagacgtgtatttttggcagcaatgggacactctggtggcttgaaatgcacttgaaatgtatccaaacttcgactctgaagcctcagaaacatgggcagtcatggggcacaggccttgaggaactggggatttacaagaagccaaaaacatgaaagctgttagtactcatcataattattgagatctgtanagtangcattagaataggtcttcccagtgagatgtggnggtgaagatttgttctt

SEQ ID NO: 90571 - DNA, 170 bp, Homo Sapiens
ttccctccactctccccctccatacgcaccccgccgccccgccacaaacccacccccttgccatctgtagggcaaccaagtgttctgatgccgccctcggagcttccgcccatggtttatgttaagagtaacatttaacttctgttgattaaaaaatcactgctatgaaa

SEQ ID NO: 90572 - DNA, 551 bp, Homo Sapiens
gtatctttagtagagatgggtttcaagcaatattcctgccttggactccttaagtactgggatttcaggtgtgagccactgctcctagctggaaaaacagtgcttttaaatttttatttattgattgtattttctcaggagaaacaagaggttggactagcaaaatagaccctgagggcccatcatccccagactctcggttcctataaagaataactgtagtaccctttgctttccccgcccctccacaagaacacactggtgcaccacccttctctactccacgtctagaggaacagatctgatctatctcaatccagcagaatacatgtttaacatttattacaacaaagaacagacctagagggaatttgggataagaatgagggccagagagttcttagtctctgtggttcattacacaattcccactgccaccattcaaggagttagagatactcccagaaataaatgtgctccttctgcccctctttatgccacagcgaggcaataagataggtcttttcaggatagaggatctaggccaaaag

SEQ ID NO: 90573 - DNA, 830 bp, Homo Sapiens
ggcagataagaagtggcttggaactcccattgaggagatgagaagaatgcctcggtgtgggatccggctgcctctcttgagaccatctgccaatcacacagtaactattcgggtagatcttttgcgagcaggagaagttcctaaaccttttccaacacataataaagatttgtggaataacaagcatgttaaaatgccttgttcagaacaaaatttgtacccagtggaagatgagaatggtgagcgaactgcggggagccggtgggagctcattcagactgcacttctcaacaaatttacacgaccccaaaacttgaaggatgctattctgaaatacaatgtggcatattctaagaaatgggactttacagctttgatcgatttctgggataaggtacttgaagaagcagaagctcaacatttatatcagtccatcttgcctgatatggtgaaaattgcactctgtctgccaaatatttgcacccagccaataccactcctgaaacagaagatgaatcattccatcacaatgtcgcaggaacagattgccagtcttttagctaatgctttcttctgcacatttccacgacgaaatgctaagatgaaatcggagtattctagttacccagacattaacttcaatcgattgtttgagggacgttcatcaaggaaaaccggagaaacttaaaacgctcttctgctactttagaagagtcccaaagaaaaggaattccctttcttcttactggaatttttcctgctgatgggaacagttccagtcaagggacatggggaggacattttgtggtttacgtaaaccttcctggccc

SEQ ID NO: 90574 - DNA, 305 bp, Homo Sapiens
agtctttccatcctcctcattcgtctaggggcacccgaatcccctattccttatttcccctatcactcaggcactggcagggtcctttgcccactcctgttggccgctgcggctccaaagcgagctgggcagatgtgcctgagacaggtttgaccaggcaactgaaaagacatccctaagagaagacaaagcaaaggtatgaaaggaacacacgtccctgactgactaggaggaacagagctgcctgctatctggaacaacttcctcccagactaagtgagaaataaacttctgttttctaaaaa

SEQ ID NO: 90575 - DNA, 103 bp, Homo Sapiens
aaagagcagccaagcacaaagtgtgactttgttgacattttatgtgactttgtcatatgttcctaacccccaataaaagcaatgttgcatcaactgtgaaaaa

SEQ ID NO: 90576 - DNA, 437 bp, Homo Sapiens
gaaaattcctcatgaatgaagaaaggaatggcatcccttgagaaggaaagtggttaatatacatactgagctcctaaagtttaaattcaggtactgagtgtacaatttcaccaacattctaacccatgaaacttttacactctgtgccaagaaactgttggcttttgtaaggtacagtgctcaacatttgcagattcaggtctcaagaagcagagatgtctcataagcagcattttcccaacagtttagcatctgtacacatctgccttggtcatcagtccactcacagagtaccatactttatcatcacaagtgtctgacgtgaacgaatgccattttctattccatatattttgctttacaattttaagtatttgatgaagatggtaactttttcctaacttagttaactattaaaaaaaattttgaaaagcaaa

SEQ ID NO: 90577 - DNA, 417 bp, Homo Sapiens
gccgcagaggagaagctctcagaggaggccacagaggaaccagacgcagaggaaccggccacagaagaaccgaccgcacaggaggccacggccccagaggaagtcactaaatctcagcccgaaaagtgggatgaagaggcccaagatgctgcaggcgaggaagagaaagaacaagaaaaagagaaggatgcggaaaacaaggtgaagaactccaaagggacctagacgcagcagaggtgaagccaagaaaatccagatgcctgtgggaattgtaacacatatcattccaaagttcgttacatcaaaagtgatatccagtgacatctaactttcatggatgtatgtgacagtgttcaagttaaaaaataaaagtttgttttaaatgaataaactgaaacgtgggaagatttttcaaaa

SEQ ID NO: 90578 - DNA, 321 bp, Homo Sapiens
ggtcaccattttgagaggcagcaagggtcttcctaaccctcagctccctctgatttttggaattcagatttggattttggatgtacatcaagaggctggctccatgcattttaattaagttgtcttttttcatttattactaatacactcctcttaactatgatttattggttaaacaaagcaccataagccgtcacttattcatcttaatttcaacaaaattaaagtagtcgctgttagattgcacctaattgcacttgcaatgaaaagaacggagatgttaatcaaaataaattgaagataaacaataaaatcattaaa

SEQ ID NO: 90579 - DNA, 712 bp, Homo Sapiens
  misc_feature (130)..(157): n is a, c, g, or t
tttttcttggtagctttactgattgccagggaaaatgaaaaccagaaaattaattaatctctaaaattaaactttacactgaatgttcttgtttctctaattagaacttctgctagcagctgtggctatnnnnnnnnnnnnnnnnnnnnnnnnnnnncctcacacctacacgtttgcactccggaactgtcagagggtgtcaggcacagacagactctaggttgcctagacaggcacacacatgcagtcactcccaagccccctttggtgctctgctcagcgcctgcttagcggaaggagtccctggagagcaggcactcctggactggggttgtagcccatgacctgccctttggggacacagttctggaggctctgggccaatgaatcagcccaaggaggatgggcaatggcgctcagcctgaatcagtcagctaggtctcttgtgcccctgggggctgatgtgattcctgtaggtgtgcccccagggtggacagctacagagtgatgggggactcatgtagggcacctggaaggctccatgtgtcctggggacaagggcttgtggggtgggctgggcctggctggggagaagacaggtctctgtcaattgggtgcatcacactgtggcctttttgtcgtggatttaagcgcaaagattgtacaaatcaaactggtggataataaagtcgtggatgactccctgaaaaaa

SEQ ID NO: 90580 - DNA, 768 bp, Homo Sapiens
ctgtttagctatcttaatgagaatttgttgacaacaaaagatcatccatcgccttatgtgtgagtaagattggagcctctatcaagatttagtcaagttcagttagattgattctagaaacaaatatttatttctttcttttacggggatgtgaataaggcttttccttaaggccttcattctttaaacaaacaggttgaaatggtatgttgtaaaagagaagacgggagagaggtatttagatgataagtgtacttcacaaaaatgccaaagtttgaaaaataggtatgtttgttctaaatgtttaagtgcttctctgttaggttctggggcttgcaatcatttgaattgttctgtttcacaataaaggagattcactgggttctgcattttcaggattcaatagaactgctccattaaaaaaataatccttagcaagcattcgaatcctaactgctttgatgcacttgccctcgggcacctgtcatttccaatatggtaggtgtcaaagtcaaaagtatttactgggagaaaaaagagaggagtggttgtagaagtctccctaaatcagacatgtcaagcaatcagccaacgtggtgtatttctcattcaatattttagtgtgaattgagacactgagataaagacatcgtgcagagataaatggggatacagttaaatgtagcaactcttgagttcattttttcccactgtagcaaaattaatgctttctctttattgaaataaattgctcattcctcaaaaaaa

SEQ ID NO: 90581 - DNA, 490 bp, Homo Sapiens
ttgggggtccaggggtgaaaagcttggtgaaggattttaaggacttcccattggctgaaggctggcaaatggagtttgccatcctctgactacagccattctgaggactggaaaggataccctgagaagtggcctattttatttctgctggaagctggatgcttcctgccctcgaaaatcagactccaagttcttcaactctgggactcggacctttgaacacagactgaaggctgcactgtcggcttccttacttttgaggctttgggacttggactgacttcctggatcctcagcttgcagatggcctattgtgggacctcaccttgtgatcacgtgagtcagtgctccttaacaaactcccctttgtatatacatctatcctactacttctgtcactctagagaaccttgacgaatacggttatgcatttttattaatgtaaattatgccttaattaacaataaataccttctcaacctccaaaaaa

SEQ ID NO: 90582 - DNA, 527 bp, Homo Sapiens
tgcggccgcggcgggaagaagggctagcgaagcacccccgaccgggcccaggcgccggacgccggggggcgcctcgctgcaacttctctttggaagccccgacacgagccccggcccgcgcgcgcgctcccccacggccacgcgcgcaccctgccgcccgcacccccgcgcgccctccgtctattttttcctcttcctttcatcctcacactctaaaataggtcaaggggtggaagttacacctggtgcagccctcggctctgatgcaaaagcagcttttgcccctggctgcgggacagcgctgtgactactcgcaacgggagagctgctgccagtcgccacaccgtgcggaaagcgccggcgaccggagcactgacaatggtctgcataggggagcggagagaagcttctgttgcgccctagatccgctgcctcggcgcccgcccgcagggaggagggggcgcgacaggtcgtctagcgcgtgccccggagcccgcgcccgggtctggccgcctgaggcctgtgct

SEQ ID NO: 90583 - DNA, 510 bp, Homo Sapiens
  misc_feature (51)..(98): n is a, c, g, or t
agggggtggtgctacttcctctgtaacatgtttttaaaactatgattatgnnnnnnnnnnnnnnnnnnnnnnnnnnnnnnnnnnnnnnnnnnnnnnnnatatccttccccttaactcttaaggaaagtcttctttcctacagggctgtgaattaaggaatgggtagcgtttacatttaagtacaccaatgtctgcccaatttcctaatgtatacatttgttttattttaaattattttttgttcttaaaaatactagaagaaaacatagatgtttctagtgcctttgaacttatactgtagtctgactaatttaatgaataacttcagtagcattactataatactgtatgctggccaaaattacaaattacagtttgttgcatcagtttcaaaagccatgctttcattgtattttatgtataaattgtatttgttcaagttgtatatattggtattgtatgtatacatgcagcatggttaaataagaataaaaatcttttacctaatgc

SEQ ID NO: 90584 - DNA, 528 bp, Homo Sapiens
  misc_feature (49)..(49): n is a, c, g, or t
tttcttattgggaaagcttggccatgatccaacacaaaatcccctagtngtattcttaataagcgagtatataatattcctgtgcgatttattgaagcaacaaaccaatatgccttgggcagaaagaaaaatggtgaagagtactttggaagtgttgctgaaatcatcaggaatcatcaacatagtcctttggttcttattgacagtcagaataacacaaaagattccaccagactgaagtatgcagttaaagtttcataaagggggaaaaaaaagatcaataccattgcttcagacactttcccaaagtttctccttttgagaaaaagtcccaaaacttcatattttggattatgaatcatccagtaataaaatggaagatggagtcagctattgaagtggtcatccatttctttttaagaagctcatgtggacttgttctattgcctgacctgatgaactgttaatatctggtgaggttgagttatcatgctactaatattttccaaataaatatttttattttta

SEQ ID NO: 90585 - DNA, 632 bp, Homo Sapiens
  misc_feature (422)..(430): n is a, c, g, or t
  misc_feature (575)..(575): n is a, c, g, or t
tgcggccgccttctcttcccgggggatggcgggaaagaggctcggcaactgctgtacactggggcaaagtcagaattcttggggatttttcagagtgttgcggaagggcacgttgaccttccttttcgtgcacattctgaaagcccgtacctttgaggaccctctaccagggacccagacccctccgatgctttgcaggggcagcatttggatgaatggataggaaaggttgatttctcttttttatttacactttttggcagcaacggggacagtgctgcccctaacacctgcctcacatgtgattgatgttgcaacttttacttatgaagagtcatttgttaaaatatcccttcctaataagtataaagtgaagcaggcagtctttgatgatttggaaatgttcgctgaaaggcagcgannnnnnnnnccatcttaaaatagacatatcaaactgatttaaaactattaggacactcctgattaaacaggacatatcccatttcttccagtatcactcttcttcacctccaaaggaaggaatcacccacaattgaaaagaaaaggacacttangggcctggtggtgtgttcatgctgctttgaatggagggtgaacaaatccttgccagt

SEQ ID NO: 90586 - DNA, 258 bp, Homo Sapiens
aattgtaggcaatataagataaaaacgtgctgcgggaagtgagaaaaactacatgcccccccatgctgagtgcccacaggaggcgcacgggtagtgcaggaaaaaggcaaatggccatagttcctgaaaccagcataaattaaaacaaaatacaaatcataccctggcaaatggcaagtaacagccgatcgccagtatgcgaatcacgttgtgattttttaaaatttgttttgtaataaataatttgtttgaattttg

SEQ ID NO: 90587 - DNA, 545 bp, Homo Sapiens
caattggaaacttgatgagaaggcgctaagaacacttcactgggagaaacggtggcttccacttgcactgcctcctttgcttttggacagagaagggaagaaggaaaatactgaagtgggaggaacggccaaaggcggcttgctggatgagctatgtcttctttcataatgtgattgaaatgcctgcggtttgacaacctgattacagtcgttacacaccaccaagtagaaatcatcatgggctggacagaaaccaaatattggcatgtcttcccgacagagccccatgacttcgcggtttttcccaaactccttgaaactttcgtccaattctgtcccgtccttcccaggaagtttggaagcctcaacccacagattccacgactgtcccagcatcacttcaggactgggcagaggcctgcgctccccgaccgtcgccattgcggcggccgaggtggaggcggcgccgggcccgccgtcctccggccgtgtgcgccgtggcggcggtggcgggtgctgctgccgctggggctgcggaggcggcg

SEQ ID NO: 90588 - DNA, 675 bp, Homo Sapiens
  misc_feature (115)..(229): n is a, c, g, or t
  misc_feature (233)..(302): n is a, c, g, or t
agagcctagagatctaatgtgtaacatgtagctaataagaggactgtagctaataaaattgtactatatttggaattcctgctaaatgaatagatttttagctgtccttgccacnnnnnnnnnnnnnnnnnnnnnnnnnnnnnnnnnnnnnnnnnnnnnnnnnnnnnnnnnnnnnnnnnnnnnnnnnnnnnnnnnnnnnnnnnnnnnnnnnnnnnnnnnnnnnnnnnnntgcnnnnnnnnnnnnnnnnnnnnnnnnnnnnnnnnnnnnnnnnnnnnnnnnnnnnnnnnnnnnnnnnnnnnnngctcaccaggtagtgctgatgtccacctagagttgagaatcacttttctagagcaagagtgggcaggtgtttcctgtaaagggccagatagtaaatattttaggctttgcatgccatatggtctgacacaattactcaactctgctattgtagtaagaaaaccatagatgatatgtaaggaatggatgtggctatgttttagtaaaatgtaggtgaggggtaagaaaatagcaagtatgtaggatgaaagagcctagagatctaatgtgtaacatgtagctaataagaggactgtagctaataaaattgtactatatttggaattcctgctaaatgaatagatttttagctgtccttgccacaaaaacaaacc

SEQ ID NO: 90589 - DNA, 589 bp, Homo Sapiens
ctcaacatctgcctcatgctgaaactaagctatctgacctgggtgcgcttctccatctggctgctgatggaacttgcagtgtatttcggctatggcatccggcatagcaaggagaaccagcgggagctgccagggctgaactccacacactacgtggtattccccaggggcagcctggaggagacagtgcaggctatgcagccccccagccaggcaccagcacaggaccctggccatatggagtagctgatcagcccacacttgccccgccctcccacacctgcttgggaggccagagaggccagacaagccgagagccccttctgttgtgggcagcctgggtttgcaggcctgcacaggctggggagtcctcaggaccttaggaccttcatccaggggctgggcttcgggtcttcaggagtgggccttggctggtgctggtgccatggactctgcccagagccttcttgtttatgatcagctccagctacctgggcagttgtggtggggtggatgggaaggcccacagcccaagggatccataataataattgcttggccagccatgtggcctgctggcgtaaaaaaa

SEQ ID NO: 90590 - DNA, 511 bp, Homo Sapiens
agacttggacgggaaaatccagaatgcaccaaattctcatagtgcacagcatgtgaagatggggtatggagcatggtacctcaagcctaagttggggaaaaagctaagaagtgatgaacctttgattgaccccaagctcgtacttgaaaagcctgatgaacccgacattcttgacggtctttatggaccaattgcctttaaggatttcattctaagcaagggctatgaaatgcctggcatcattcaaaggctgtttgccaggaggggatggacttatgactctgttaagactcctattcaacgtgcaatgaaagtttacaagtacaaagaaaacgtcacagaggcatcggaagaagattagacagttttcaatttactactcaattgggtatttcttgctctcattttaaacatcaatcagaatttatgatgactggccccgtgaatgcacaactttggcaacatctgtaaattcaatacctaatgtttataaatatttcttaatgaaaaa

SEQ ID NO: 90591 - DNA, 487 bp, Homo Sapiens
  misc_feature (112)..(235): n is a, c, g, or t
cagggaaggatcttcgttgactcctccggcttcagggggctccaggcgtcccttggttctaaccgctgcctctgtggtcttgtggccgccttccctgggtcctcagatcccnnnnnnnnnnnnnnnnnnnnnnnnnnnnnnnnnnnnnnnnnnnnnnnnnnnnnnnnnnnnnnnnnnnnnnnnnnnnnnnnnnnnnnnnnnnnnnnnnnnnnnnnnnnnnnnnnnnnnnnnnnnntacagattcccgacacgtcactgggaagccaccatttggtcctcaacatcccgtctcctccgcccccagatgcgacggcgtctcagcagcgacttggagccatgcagggtttctgttgtggttgttcacttgggtaagcttcctgctcttaccgacagtggatgacacactccccactcccacgccacttcatgttccttcgggagcggagggggttggaagaataaacacccagatcttcaaaacgtaaaa

SEQ ID NO: 90592 - DNA, 300 bp, Homo Sapiens
atctctggccctgcaaccccaaggttggcaagtgggctgacaagttttaaccctcaaatcaagtgattggcctttctgactaaaccaactatgaggctatctaggggccccaccaaaatcacctcacagtagaacaaactcacgtgtggtccaaagtggatcactaggaacgacaaagacactcctagcactctgcaaactccgagtgtttttggagagctctgtgccaagaactgggacaaagaccaaatatttacttactctattacaatgctaaaaacaccaaataaagtaacaact

SEQ ID NO: 90593 - DNA, 289 bp, Homo Sapiens
ataaaatagttttttaattcacaagatttaataggtagattaaaagaagaggtaagacaaaattaaaagaggtaagacaagagaaggaaaagtcagactgacagattataagttcctatggtacacagtccccttagattggaagaaaggagctaagagggtaaggaagcttggttgccagttttttataactggcagcctggtgatattgggtgtggtagctgagatgtcccaattgtagtcacaaggcctaaaaaagcagatctttacaaatgtttaaaaatactag

SEQ ID NO: 90594 - DNA, 1350 bp, Homo Sapiens
caggctggtaccggtccggattcccgggatatcgtcgacccacgcgtcgccacgcgtcggatcaacctatggctacccaatcttgtctcacccctgacaacttcttactctgacagccacgaacagcttaaagacattcttgggggtcctatcagcttgggaaatatcaggaacttcatagtgtcaacctggcacaggcttaggaaaggttgcggagctggatgtaacagtggtggcaatattgaagattctgatactggaggtgggacttcctgcactggtaacaatgcaacaactgccaacaatccccacagcaacgtgacccagggaagcattggaaatcctgggcagggatcaggaactggactccacccacctgtcacatcttatcctccaacactaggcactagccacagctctcactctgtgcagtcgggcctggtcagacagtctcctgcccgggcctcagtagccagccagtcttcctactgctatagcagccggcattcatccctccggatgtccaccactgggtttgtgccttgtcggcgctcttctactagtcagatatcgcttcgaaacttgccatcatccatccaatcccgactgtcgatggtgaaccaaatggaaccctcaggtcagagcggcctggcctgtgtgcagcacggcctgccttcctccagcagctccagccaaagcatcccagcctgcaaacatcacactctcgtgggctttcttgcgacagaggggaggtcagagcagtgccactgatgcacagccaggcaacaccttaagtcctgccaacaattcacactccagaaaggcagaagtgattaacagagtccaaattgtggatcccagtcaaattctggaaggaatcaacctgtctaaaaggaaagagctacagtggcctgatgaaggaatccggttaaaagctgggagaaatagctggaaagactggagtccgcaggagggcatggaaggccatgtgattcaccgatgggtgccttgcagcagagatccaggtaccagatcccacatcgacaaggcagtgcttctggtccagattgatgataaatatgtgactgtaattgaaactggggtactagaacttggggctgaagtgtgagccagtgtttattataaagacatttctttttccctctcaattccaaggcattggaaaaagagaggaacaagcagaagatgcctgcaggtatcactttgatcctatgtgggagcgactgaaaatagaatgagcttggttaagcacctctcctttgcccttcaccctgactcctgtcactgtctccatccccaaataaagctgaaatatttttttaagttaaa

SEQ ID NO: 90595 - DNA, 437 bp, Homo Sapiens
tgcatggacatcatgaagaggaacatctcacactatgaggaacagctggtgaagatgtttggctccagcgtggatctgggcaacctcgggcagtaggtgtgccacaccccagagccttcttagtgtgacaccaaaaccttctggtcagccacagaacacatacagaaaacagacatgacagaactgttcctgccgttgccgccactgctgccattgctgtggttatgggcatttagaaaacttgaaagtcagcactaaaggatgggcagaggttcaacccacacctccactttgcttctgaaggcccattcattagaccacttgtaaagattactccaacccagtttttatatctttggttcaaaacggcatgtctctccaacaatttaagtgcctgatacaaagtccaaagtataaacatgctcctttcctctctt

SEQ ID NO: 90596 - DNA, 525 bp, Homo Sapiens
gttaatccttcagagtatcttcatgcataagcaaaaacaaatacatattcctaatttccccatcttagacaagagatagcatgtatagtccctgttccaccctgctttttccacttaaaaatatgtttggaagatctttctatccttgttttttaaatagctggatacagttctactctatagacacaccattatttatataattagtacccctactatagacatttgaattatttccagtctcttctgcaaggaaatctctttcattttgcacatgtgccagtttaagtgtgggaaaatttccagaagtagaattgctagacaaaggacatatcagttagggttctggcaagaaacagctcattcaaattaggatacacgctttttaaaaaaataaatttaaggggtacaagtgcagttttgttagatagatatattgcatagtggtgaaatttgggcttttagtgtatccatcacctgaatagtatacattatacccattaagtaatttctcattccttaact

SEQ ID NO: 90597 - DNA, 622 bp, Homo Sapiens
  misc_feature (17)..(17): n is a, c, g, or t
aaaagccagagaaatanagatattccaaacatgttggacgttctaaaggatatgaataaggttaagcttcgtgcaattgagcggtcacctggcggtagacccattcataagaggaaaagacagaattcacattgggatccagtttctttaatatctcatgcacttaaacagaaatttgcatttcaagaagatgattcttttgagaaagagaatagatcttgggaatcttccccattttctagtccagaaacttcaaggtttggacatcacatttcacagtcagaaggacagcgaactaaagaagaaatggtcaacacaaaagctgttgaccaaggtatcagcaacacaagccttctaaactcaaggatttaaactcaacttaaggttgagctttaaacttccaaaacttcttcctggatgataaattattcttagaaactgatttggactgttaaaggctaaaagtagatgtatttaaagactcttcttgacacattttgcctacacttgctatgtaaatatgtatgcctgtcatttttgtttcctttgttcctttttacgtttatactctgttcttctgtacatagagcttaaaataaacattctttttgaacttgaaaaa

SEQ ID NO: 90598 - DNA, 465 bp, Homo Sapiens
tcttgcatcagtgtgccttcaatattaatagttaatttatagagaaactgaactaattttatctctcaaaattggccgttagaatctcacacacccacctcttccatgatagtccctgggccttgaggaatttaatagttttaatttctggccttgtgccttatgaacacagtgtattttgattggtatcttctactgggtctgaagataaggctttaactgctgtcattgtttaagatttagcaagacttggtgttctttttatatccaggagtcaacgccctgtaacttaaaggcacaaggactttaaaagcaagaaagttacgtggatatagtaaccttgatttaaaagaaaaatttaacctcagtttttttctaagcaaattaaaacttaataacaatggcataggagttattttgataaaatgtaaaatttgttagaccagttaccaaaaggcaagaaaa

SEQ ID NO: 90599 - DNA, 497 bp, Homo Sapiens
gtgcataaagtaacttatctaggtctttaaatggctaggaagttaggaagttcaaatggctaagttctatttgaagttggggtaataaaataagcatcgaaattcagaacattctcaacaatcacttaggacagcagttactgaagcaattcttaatagtgctgtgaaaaggcagcaagaagtctcagataaggaatcatgctagatcataaatatttcagcaaattatgatgacatctaaaacacaaactagtcaagagaggcaaagcaggctttttgattagtaagtgaaaaatgaaacaagatgcatatcacaatacagtcactagtagacagctgaaattgatcacagtaacgtgcactttgtcactagatacaagtgggataaaagtcgatcccaaagcatgcggtacaaaatgtgcaacatccagctttgtgcagggggtcctctataaaccctatgagcccaaattatagtcacaatcgctggaaggatt

SEQ ID NO: 90600 - DNA, 401 bp, Homo Sapiens
aaaagcaaaactctgcccaggaagaccttactttacaaaccaggtgaccaaatttctaaaacatcattcccgtaatccctgatcaacagaaaggaagctctggaagcatgaatggtcagtacacacatcgtccataggactcacacaccacaaactagtcattgatccttttgacccaatttcagaaaatatgtttacatagagacacatatttttgctatttactttttgagcaaccaacaggaaaacctatccacatatgtccattatgatcctctctaatgaagactatctctttatgttgtttaaacaaaaagaaattaatgcatgagaatgtcaaagttctgagctttaagtttctgtactcaatatattgaataaaagatatatgtagtataaaa

SEQ ID NO: 90601 - DNA, 475 bp, Homo Sapiens
tgcttgcattcccaacgttgacatgaggaattatcaatgggttccggacataatcagccacacggcagagtgaattccaggagtgtaaataacaagagctgcctataaatctacctcagaagacaaagggaaaagcaaaactctgcccaggaagaccttactttacaaaccagctcaaccatatttaccagccttcctgtggtcatttgtttgagctccagctagtgaagtatgagtagaacagacatgcaccacttccagacctggcaccggcaaaccccccatggcaaccctccaaccctttcctcaacaactggaccacgctggaaaggactgaggatctagaggaggacagggctgtaatatggaaggagtttggtttctgaaggaccatgtagcaggccacctgcagggcgggaacatctttaataggtttggaatagcaagaaataaactggtcttgtattaaccacct

SEQ ID NO: 90602 - DNA, 417 bp, Homo Sapiens
gaaaagcaaaactctgcccaggaagaccttactttacaaaccaggtgaccaaatttctaaaacatcattcccgtaatccctgatcaacagaaaggaagctctggaagcatgaatgctcaaccatatttaccagccttcctgtggtcatttgtctgagctccagctagtgaagtatgagtagaacggacatgcaccacttccagacctggcaccggcaaaccccccatggcaaccctccaaccctttcctcaacaactggaccacgctggaaaggactgaggatctagaggaggacagggctgtaatatggaaggagtttggtttctgaaggaccatgtagcaggccacctgcagggcgggaacatctttaataggtttggaatagcaagaaataaactggtcttgtattaaaaaaaa

SEQ ID NO: 90603 - DNA, 732 bp, Homo Sapiens
gggccacctagactttccagtctaggactagagctgtagcaatgatctgttgtgctgtacaagaaaagagaaagaggtgttcatttgagaacagatgtttttatacatcagagtaaaagctgtattgaagagcaggctgaatcccttccatatagaatgaaatatgagcttgaccccagtccttatcttcagttacctccataccaactggtggcatgttggatttagcatgtagaataatttcccatctcttatttttcccaaggttaatggcatccttctggtacctggcttacatgtgaactgaattttgatctgggttctattttgaatttttctccttcagagacctaagtaggcaacatgaaagacaagtagttaagaaagaaaaaatgatgtttcatacacacaggctaccaacgagagttttctatgtaaaacatttagagtgtattctgatttaaaatgagaataacttcaaggtagatattatagtatttatgtagtttgcaaaagaagtttacatttttttgctattgtgatataacatttatgtgcaagaactacttgtaataaaaggatttgagatgtcatgcttctaaatataatagcctaaaatagagaatattatgatttgaaagtgtagatttcacaaactctgtatagtatgtgggtctatctgaagcttttatcgaagctacctataaaataaaattttaaaagatcaaaaaa

SEQ ID NO: 90604 - DNA, 1267 bp, Homo Sapiens
  misc_feature (37)..(37): n is a, c, g, or t
  misc_feature (78)..(89): n is a, c, g, or t
  misc_feature (122)..(184): n is a, c, g, or t
  misc_feature (213)..(213): n is a, c, g, or t
gggggggtgtggcaacctctcgtgaagagcattcgtncgttatgtgggaagactgcgggcagtgggtgggcatggtannnnnnnnnnnnaaagatgtttaaggggtggttatggtttagtgnnnnnnnnnnnnnnnnnnnnnnnnnnnnnnnnnnnnnnnnnnnnnnnnnnnnnnnnnnnnnnngtttgtatgtagttattttaatggtgtanggttgggggccaataaaatcaaactttaaattggggagccagataaatattgccttttctttccaaaattttaatttatactttttagtaaaaaacataacacatttctcattcatttaaccaattaatccaaaggaaaaaagtgaagtactataatcacaggtacactaacaaacacttttacaaagacattcagaaatatttgcagcaggttttataagactctgatataaaacaaagtaaaataaaacgttttgaaatggcaaaatcggtttacctagcctgaattgcttcaaagaggcatttgcacttcttgtcctggcttaataaaacaaagtaaaataaaacattttgaaatttcaaaatcagtttagcctaaattgcttcaaagaggcatttgcacttcttgtcctggcttaaaaacaaaccctgaaattactttcttttatccaaatcaattgaccatattaatctgcataaagtctatgaggatacgttttgataaatgctataaacacaaaattaaggcaaatctgatagttattgtcaaataaatagcacatttagaagggcctttgttaataaaatgcctctaatgtatccagaggtatagatttcaaagggcaagtctgtacctgttgcacatctgattctcacagcattcatgaaagaggagacaatgatattcccatttcactgaaaactaaggtgacttgtttaaggtcatacagtccgatcagtggcaccaacacatttaccaatggccttggaatacagagtacagggcttcctgttggtagatttaccttcctaacctcacggagatgtgatccaagtatcaaaacaagtgtgagtcccttcaggtctggaaaatactccagccataacaggtgaagaggaaagtcagctcaagatttgtcatatgctacacaatttacagtaaaacactgggaaaagcaggaagctgatgtgaggaagggtgaagaatgatttgaaagattacaaaatggcaaagttcctccaaaacctataataagctaaaacaaactggaaa

SEQ ID NO: 90605 - DNA, 892 bp, Homo Sapiens
  misc_feature (655)..(655): n is a, c, g, or t
gcggccgcggccgtgggctggcgttgccgcgctacggtcatgccgggtccgcacgaccccagagttcggagccgggtgcccggaagccgcactggaggactgtgcggcggcgatggggcgtccagccgtcgcggcgagacgcagagggaccaccccattgcacaggcgcggagactgaggcccgcaggggccgcgcctggcacgatcgcccgtcggggacctggagccccggacagagaggggaagaaggaggggccggcgtcagtgacgtcagcgagaccaaggtgagcgtgggcgttgccagtggtgctctgtcagtgcctatggattatggcagggaaagtaaaatgggtcactgatatcgagaagtcagtgctgatcaataactgtgaaaagagaggatgggtccaagtgacagaaaacgaagactggaatttttactggatgagtgtgcaaaccatccgaaatgtgttcagcgttgaagctggatatcggctctcagatgaccaaatagtcaaccattttccaaaccactatgaactgacccggaaggacctgatggtgaagaacatcaaaagatacaggaaggagctggagaaagaagggagtcctctggcagaaaaagatgaaaatggaaaatacctctatctgggtntactttgttccagtcacctatatgctgcccgctgactacaacctgtttgtagaggagttccggaagagcccgtccagcacctggatcatgaagccttgtggcaaggcccagggaaagggcatcttccttatcaacaagctctcacagatcaaaaagtggtcccgggacagcaagacatcttcgtttgtgtctcaatctaataaggaagcctacgtgatctctctctatattaacaac

SEQ ID NO: 90606 - DNA, 206 bp, Homo Sapiens
gtcaattctccctttccatctggtgcacatgaacaaattacttaacctctccttgcctcactttactcatttataagctaggaatactgtttagtagtgtttgactcattgggtcattgtgagttttaaacgtgattacacataaaaaggtcttagtacagtgcctggcacataatacacattaaatgtttgcaattattaaaaaa

SEQ ID NO: 90607 - DNA, 516 bp, Homo Sapiens
attggacagaagctgaatttgtacccctatgctgttaaaaaaatgacttaaaatggattttcagaatgaaagataggaaatggcttgttgaaacattaaaatgttatctgcttataagatttttaaacattggctgaaattgttggaactgatatggccaaatgaagtccatgaagaatcagattgcatatgttagagcccaaatttccattgtgtgtttcatactaactctccctgaatttgcatgtgacttgagaggaagcaagaagagatgacagtatatgtctcatgactttccatattcctactttccttccagcaatcccttacagaacccacctcttaggccttttctaatcactgccttaaagccagtataagaaaacaaatttcagctggactgctatctcctttttggccaacctacaacatgatattttcctcaaaacccaagggccatattactgtcatcaggctgtaggccattttattcaataaaaaactgagtcactaaaa

SEQ ID NO: 90608 - DNA, 586 bp, Homo Sapiens
cctgcaaatagcagctacctgcttcagcctagatcctgccatgaagcggactgctgctccctggctcccactctgatctgcttttcactcttgccttgtctcccaattaataagcagggtggccactgcaacaggtgtggatgtgcctgacaagatgaagagccgaatacctgtggtgctcctggcctgtggctcctttaaccccatcaccaacatgcacctgcgcatgtttgaggtggccagagatcacctacaccaaacagatttttgtctttcaaggcctttgtttcccagggtgcacttcagccaacacaaccaagggaagaagaaaaagggcaaaagtgtgcatgaggtggtaggggccagactgtgcttgtgcccacagaaacaccaagcttctcccagcaaaagccccagaactgaagtctgcaaaagggaagaggcaaattagtaatcattctgtgctacagagcagccacgtctgagcattacctaatgcttttctcaattgttttgacacatgtagttttgttttaaatatgtatggtaatttttaataaaatgctgataagtgtgccaagccaaa

SEQ ID NO: 90609 - DNA, 597 bp, Homo Sapiens
agcctaaccaacaggcaatggattatagtgattcagaggaaagataagaaggttcctttgtcttggacctccactagacatcaaggaaacatgccaaaaaagtaaacaacaaaggcccccacacctttccaaactacaacccaaaataagttgatctgagaaacaaattgcaatgccgcatgcaaagcagatgtgtccaaattcatgtaggaccagacacatcctgaacctttcagtgcaacagctgttcaagactttcttcaaaatcatccaagcacaagggttgataaaatacacacaaaatgggtatgtgacaccctggattccatgcaggtttggcagtaaccagggagaattagaacccgaagctagatttcgaaatagagctctggactgaagcattcttgcacaaccatcccacagatggcttccggtctcgctccaactccagtcctctgtggggcctcttctcagctctcctgctttttcccaaaccctcagtaacctccctccttagtagaaggctatgacttctctttcccaaaccaattacttttcctcaatgaacttcttttcttgatggatttaggttataaa

SEQ ID NO: 90610 - DNA, 462 bp, Homo Sapiens
tctattatcatggccataacatcatggatactatatacctatttaaatacaaatttacaggaaaatttaagcacagtataagtaacttcttcccttaatctttgagagtaagctgctgagctgatgacccatcatcacccctgaatacttttatacttcctacaaagacattctcctacagaaatacaatcatctgggaattaacattgatacattattactggaaatcaacacactaatacattactactacatactcctcaaaccacattcaagttttgtcgattaacctaataatgttatgccaaaaggatctagttcttaactaagcactgcatttggttgtcaagtcttcttacttcactttagacaagtttcttctccatttttactttattttcttaaccttaatactttctagattacagaataagtattttgtagaatatcatttaatatgtg

SEQ ID NO: 90611 - DNA, 715 bp, Homo Sapiens
taacagtgctccaccctgggtctgtagctccacgaccctcaaaccagaacaagacctctcctccctgggtcgccagcttcctgaccctcgaattacaacaaacttgctcctccctgggtctgcagctccacaaccctgaaactagaacaaaatttctcctacctgagtcgccagcttcctgacactcgaacgacaacaaaattgctcctccctgggtcggcagctccacgaccctcaaactcgaacaagacttctcctccccaggttgccagctaccggaccctcaaattacaacaacattgctcctccctgggtctgcagctccacgaacctcaaactagaacaagacctctcctccctgggtcgccagcttcctgaccctcgaactacaacaaaattgctcctccctgggtcggcagctccacgaccctcagaccacaacaagacctctcctgcatcgccagctttctgaccctcgaactacagcaacgttcctcctgcctgggtctgcagctccaccaagagctcgggagacagcagtcgctgtgggctgatattcacagaaaactccagagtcatatggatgccttgaggaagcagaaccgggagctccgagaagagctgagaggcctgcagcggcagcagtgggaagccgggaagaaacccgcagcgtccccagcacgcggggcgagaatcacacactctggtaccaaaa

SEQ ID NO: 90612 - DNA, 373 bp, Homo Sapiens
gcggccgctgctggtggttgcagcagcgacggcgacaacggcggtggcggcggcgaaagaggagtactgcgtgggtcgggacatcttcacctgcacagggtccaggatgcagtggatgtggacatcctgagccttgtctgggggaccacttgggggactttcactggcctgaatttcatttttctgagtagcccaatcaatcatcttgtctaaggcgttctggagtccatgccacatcatagttgccacgttgatgccaatgttgacaagaacgatgaggcccagcagcaggagtaagatgtcctcggcatcgtgggggctttcttggtattgattgcaacatctcacggtgttatgccataactggttttcc

SEQ ID NO: 90613 - DNA, 639 bp, Homo Sapiens
gaaccctgtccatcttttgtaagttcattaaaaagatccataatgcactccaagaatgcaaagtttctctatttcttaagatccagggttccaggactgccaccaactcctgtccagctgctctatccagtgtcccgattcagcaatgtcaaatccctccagcacctttgcagattccggatacgacagctcgtcaggatagatcacatcccagatctcccactgcctaaacctctgatctcttatatccgaaagttctactactatgatcctcaggaagaggtatacctgtctctaaaggaagcgcagctcatttccaaacagaagcaagaggtggaaccctccacgtagcgaggggctccctgctggtcaccaccaagggcatttggttgccaagctccagctttgaagaaccaaattaagctaccatgaaaagaagaggaaaagtgagggaacaggaaggttgggattctctgtgcagagactttggttccccacgcagccctggggcttggaagaagcacatgaccgtactctgcgtggggctccacctcacacccacccctgggcatcttaggactggaggggctccttggaaaactggaagaagtctcaacactgtttctttttcagaaaaaa

SEQ ID NO: 90614 - DNA, 450 bp, Homo Sapiens
tgctgcctttgcctggtcctccaggttgctgggggcaccacagacatcaagattccagttcatccaggtggctggagccagcagccaggaccagggtcgttgacagcaggttctgcagcatcctgccttgctgctctgtcccccacatcttcctggccacagccccttgcccctcctctaaggggttttactagcaagcatcctggctgctggggctacttcattccccctccataaagtttcagccattatgggcactggttttaaaaaatttattagtttgactatttgatgtttttatagtgattgccaactttaaaaagtaggctgttcataagcactgatgcagtccctagggaatagaatggtgcttctgatcacctgtgacatgaacagtttcttctgtgaggacagttggctattgaaataaaatgagcaatggaaaaaaaa

SEQ ID NO: 90615 - DNA, 460 bp, Homo Sapiens
ggatattgttaggcttggtctagaacttctgagctcaagcaatcctcctatttcagccttccaaatagttggcactgtaggcatgtgtcaccgtgcccagccctagtttggtttttgttgtctacaattgaaggcatcctgactatcacaactcagctgcatcacccgttttatgaactgggaaacagggccccatggagaggcagctactcaaggtcccaaacagcacaaggactccttggaggccgcccatctaggcttctctcaggagatggcccaggcacgtttcagcagctttttcaggagctctcttgtgcctcggatctgtttctccccctttctgttcccagtcattacacctccaaaataagtgatagctgctttctagagaaagtcccacacctaacatccttctaaaaaagggagtctgaatctgagagctgagaggagccaagaaata

SEQ ID NO: 90616 - DNA, 524 bp, Homo Sapiens
tctcgcctttccctcccgagggctggcaggagtcactgtcagtcacccttcatggggtctgaaaggttgcatgggctcacctggtcttagacaaggacagttgcagcttccgcaccaggcagacctgcagtttgagtggctggggataggtggagcggcggcctggccacagtgccctggacagcagcacatcacatcagttaacactgtttgccttccaactagttattacggtgtcctgtgggacaattagactggaggagccaaaggaatgtgcaggggcactgggtttctgtttggagagaggctctcggtaaacagagttcgcattcctccagattctgtgggaccagagtaaatatcattatgccacagccaggcttaagcaatctatctgcagtgccgttcccgcagcgcacactgctccctctgtctctgccgatgaccttcgaggctgtcctaggcaggttctccctgaggagctccccacaccaagcctccctaactctgcaaagcagccggag

SEQ ID NO: 90617 - DNA, 688 bp, Homo Sapiens
  misc_feature (626)..(626): n is a, c, g, or t
gcggccgcccccgccggagacagtgaccaactgtgcagacggcggcgtgctcggagcggtgcccggcgtgctaggctgcgcgcaggccctcgaggtgctcaagatcgccgccggcctcggctcctcctacagcggcagcatgctgctcttcgacggcctcgggggccacttccgccggatccggctgcggcgccgccggcctgactgcgtcgtgtgcgggcagcagcccaccgtgacccgcctgcaggactacgaggccttctgcggctcctcggccaccgacaagtgccgcgccctgaagctgctgtgccccgaggagcggatttctgtgaccgactacaagcggcttctggattccggggcgccccatgtgttgctggacgtccggcctcaagtagaggtggacatctgtcgcctgccgcactctctccacatccctttgagtcagttggaacgcagggatgcggacagcctgaaactcttaggggctgccctcccgaaagggaagcaggagtcgcaggaaggggttgctctcccggtgtatgtgattttgcaactgggaaacgactcccagaaagctgtgaaggtcctgccgtccttaacggcagtgccgggattagactctntaactggtcaggcatcgtggggggactatggcctgggccgcccaattgatgggacatttcca

SEQ ID NO: 90618 - DNA, 606 bp, Homo Sapiens
ggctgctgggcccaccctcccggaaccgtccgaccctcggtggcctcggcctcttctgccatctccggtcctaccctggggcggagggtggaaggcagcttccgtcgaagaggagggggctgcggtggccaccgcggcggagcccgagttattttaccaagaaaatggtttgcacgactttgaacatatactatccatgctgatgggacaggatccaatatgaatataaatgatggaggaagacgacgctttgaagataatgaacatacattacggatatatcctggggctatttcagaagggacaatctactgtccgattcctgccagaaaaaactccacagctgctgaggtgattgagtctcttataaacaaacttcatcttgacaaaacaaaatgttatgttctagcagaggtaaaggaatttggtggagaagaatggattctcaatccaacagattgtccagttcagcgaatgatgctgtggccccgaatggctctggaaaatcgcttaagtggagaggactaccgcttccttctgagagagaaaaaccttgatggatcaatccattatggtagcctgcagtcatggctacgggtaacagaa

SEQ ID NO: 90619 - DNA, 346 bp, Homo Sapiens
ttttaattggggggttttcctgtgaggactggagattctaaaagacaaatcctaaaagagctgtaagacaagatgttagtttttaaaccctgcagaaaagtctcaggcatttatatgtaaaacccaagagcttgaacacacacaaccacacccctaaactgtgagttgcctggaaaggggagagggagggaagcaggacccgggaggtggaggagtgtctgacgctgagacttttctcagtgcctgcattaattccttagcaacacagggcccctgtcacgcaaatctacgttccccagaaaccctgctgaccagttcgcctgctaactgcgcctgcaaaaagcct

SEQ ID NO: 90620 - DNA, 890 bp, Homo Sapiens
gggaggctcctgtgggctagagggaggcagacatggggaccatgaagacccaaagggatggccactccctggggcggtggtcactggtgctcctgctgctgggcctggtgatgcctctggccatcattgcccaggtcctcagctacaaggaagctgtgcttcgtgctatacatggcatcaaccagcggtcctcggatgctaacctctaccgcctcctggacctggaccccaggcccacgatggatggggacccagacacgccaaagcctgtgagcttcacagtgaaggagacagtgtgccccaggacgacacagcagtcaccagaggattgtgacttcaagaaggacgggctggtgaagcggtgtatggggacagtgaccctcaaccaggccaggggctcctttgacatcagttgtgataaggataacaagagatttgccctgctgggtgatttcttccggaaatctaaagagaagattggcaaagagtttaaaagaattgtccaagagaatcaaggattttttgcggaatcttgtacccaggacagagtcctagtgtgtgccctaccctggctcaggcttctgggctctgaaaaataacctatgagagcaatttccctccgaagacactgtacaccccccaaataaaacaaaatcctgtccgggcgccctcgggcccccgaaaagtttttttaaacccttccctttgggcggcgcgggccccacccaggtaagtgaaacctggcccattaccctgtttccctaaggaaatccctggccctcggacaaaggccttggcaattcttccccaaataacaacacccccgggggggctaaacccagcgttttcggaaccacacccccgcaatgggaagtttcttgagagatcca

SEQ ID NO: 90621 - DNA, 488 bp, Homo Sapiens
cacctaggctcctgctgcctgccctgatgtctgcagattcacttggtcaagaggagttccttctatgcctgctgtgtttttcagccatagcacagaactgttttatggggggagcatgctcatgcgctaaatcagtggtctctcactcagggaggaagagaggccaacatttgctgagggcttactgtgccctgggttctcagctgtccccacgagggggtgcaatgcccttggttttaaagagatgaaaatatcaaggctccaagaggtaaaaaacttgccccaggccacctagatgtggctggtgaagctatgtttgaacccaccgctgactaactccaaaattcatattcttttctcttgtctcggctgtcttccaagtatccagaatggactgtctggaaagcgttctgttagtacttcttgactgtgggactacaggtctttgagtttctcctaataaagtgatttctgatgaaaatctgaaa

SEQ ID NO: 90622 - DNA, 417 bp, Homo Sapiens
gcatcaaaaagacaggcaaaaatcttcgtggctgccatccaagaagccaagacagaagggcccccatcacagagcactggccaagggatcccgggtccctgccagaaaggccaaaagctgagcaggctcccctacaaagaaaccaatgcacttattgcaagcagattggacactggaaaatggaatgcccattaaaaccagaagaaaaaccagaagagaaaaaggtcctcaccctccctgctgcggaggaatctgatgattgatggggccggggctccctctcccttggcccctgggagcccatggtgactgccacactggggggccagcctatacgcttcctaattgacaccggggcggaacacttggtactgcagatacccttgggcagtgtctctaataaaaaggtggctgtgc

SEQ ID NO: 90623 - DNA, 526 bp, Homo Sapiens
  misc_feature (42)..(42): n is a, c, g, or t
ctggcgctaagggcaggagacgtggtcatggtttacgggccncagggatgaccaaggattctattatgaagagttgggcggccacaggggcctggttcctgccaacctgctggatcaaaatgtccctccatggacactgagcaagcatccttgcccaggtagtggcctctggctgctcacaccctgccagaggagaagcaagcgttcagaccctcacaccagcacccctcctcaccaccataagtagcatgtgctccaagtgccactgtgttaaactgatggtagtccttaagcgtcccctaggctctgaaagtagcaggacttaagcctgagttatttgcaaaagcaaacacaacaagccaacccctgagagtctgagaagccatttcaaagttgctgataactatggcaggtatacggagaagcgcctttttctgtggccaatgtgtgttttctctgggaggttaaggttatctgtccattgccttgtacgaaagtctcaagaaaagtctacatcttaaaaaag

SEQ ID NO: 90624 - DNA, 415 bp, Homo Sapiens
gctgtgctgacagacggcctggtgagggaacccgggaggcctccagcatctgcacccctctcctactttgatctctgtttcaccaacattgcaccccaacttaaggtcacatagctactgtcaagccaacaaggtgctgcctctcccgccgtgtgagggtggaaccccataagccaccactggaggcatccaagcatgttgattccttctctagttcagacaccacctctcctggacatcctgtggcctaaagactatcctagaatcaacactccttaaataggagtggggaaagaaaaggaaaatgtgtgtaatacatgtgaatcacagataacgtagtcattggttaatatatacaactacgcgtatttacattctgtatgcgtcaatgagtaaaatactgtggttggtgctt

SEQ ID NO: 90625 - DNA, 460 bp, Homo Sapiens
tttcctcctattacctgagtttcaggcgtggttcccacgccgtctgacaaactccagagaaactgaaatttcacacgtcatgaatgaaaggctgagtttacatttgccaaggaaaaaaatgcaaaagcacaattggggaaaaaagggacaaggtgggtaaaacatgataagagaaaggaaattcaactgtacagatgcgtgacccttaacaacgaccccagctgccccccgtgccccgtgcccaccctcccgcctttctggacagccacttacgggtcccacggaaggttccagaagccgcctttctcccaacatctcagagcagggggagcccccgttggccttgactgtggggcacccactcagtacgcagccaggccccacggtcccaagtgaactagaacccatccagggtcctcgtggctgaggggactgcccgaccccctcccagtctgcataa

SEQ ID NO: 90626 - DNA, 563 bp, Homo Sapiens
tttatatgcatctttcaggcaaacataatttgttactgctctcattgctattggcaattttccaattgccttcagatcaataggctttttgtgagcagatataataagtgtgttcatccaccagtatgttgcttttgacagcaaattcacaaatggttgaagaaatctcactcccagatcctggaggtcttcaggaggctttactttctgaggattcatgaaaaatacatatctcctgactcgaatgacattgatctccacagccatcaagaccccattcaagatgaccatcatgcctgtgatgcagaaacgcaggtttgatatgtccaagccagactgacagtacttaaccaattttattgtttttgtaataaaggccattacccaatacaggaacagggctaaaagtaatttaggaaaatttgatgtttcgatattatgataatacactatcgatgttgtagtggcaacgaatcccatcacggctggcataaagaggtggaggtgccttgattcccgccgcgagtctgaaacaatgccttctgctatttcacagacatgca

SEQ ID NO: 90627 - DNA, 554 bp, Homo Sapiens
  misc_feature (410)..(469): n is a, c, g, or t
tttggtgtgacaatactgtgatttggttttaaagaagaatccttatcatttagagataacgtactgaaacatttacaggatgaaatgatatgtcagaaatatacacaaatatggagtggggaagagggcacgggtatagatgaaacaagattggccatgaattgctcattggagaatcactgacatagaagggtaaatgaaagtaggtactttcacctgggccaggtcaaatatggcaacagtacaactgaggcaaaggaaagccaattttgcactatgggtttccaacaaaatggtcttactaatccaaggtaaataaattcatttttctattctgtgtgtgtgtgttaagacattttccaccatacaaacaacaacaaaaggtttttttgagacagagtcccgctctnnnnnnnnnnnnnnnnnnnnnnnnnnnnnnnnnnnnnnnnnnnnnnnnnnnnnnnnnnnngctcaagcgattcacccgcctcagattccagagcagctggaattacaggcgctcgccacatcaggctaatttttttgtattttta

SEQ ID NO: 90628 - DNA, 482 bp, Homo Sapiens
tttttggctctttccattatgagctgtgtaaccttggatacagtttcctcatctataaagttgtggtgggagaatggctgagaacagtgatctctcagctctccagctgtaaagatgttaattatgattttaactctcaagatcaggccacataaggaacaggggaattccaggggtgggacacagctgggggagtccagaccagggcagggaaaggagactcacaagccaaacagagctgctttggggaaagttcttatcagctggtgctgcttcctgagccatatgcccattcctcaagctgtacccctttcttggctatgtaggatgagttcctcctaggcccttgttaggagtggctattggattctaagcggttggggcatgagggaggatattttaaagggaagtatagctgattttaaaagaacctatacattcaagaacaaataaaaaacagcacttttctttaccaagaaaaa

SEQ ID NO: 90629 - DNA, 409 bp, Homo Sapiens
tttacacctttgaaaggctctgaagacatggcaaatgtaactttgaaatcagcagaatctttttgaggggcagctggtataggaggagtgacttgatggacttgtcacctgggctgatgtagtctttttctgggtttctgcctttcagtgattacctgattttctttttctgtgtctgtccttcagctcatctgattctttatcctccttctcctcccacccccattcaagatggaaacgaatcttggaaagttatgaaagatgtaggtaaagggggagagggcatcttccacctgccaaccacaagaacagacttcagaggcaaagtgaggatcaccctggccatgtgatacttccatctggagaccctgcttctgagtcgatgtctttcagaagaggctttcctcat

SEQ ID NO: 90630 - DNA, 477 bp, Homo Sapiens
ttattcatacattcagtgaaaattttgttgaggtactgggacaggttaaaaaatacagttgtagccctcaggatatttaatatccagtgaaaagtgacagtcagtaaaccaacaatctcaatactttgatatatgttgtgaggttgtgataaccgattcttgtttagtttaattctatatctcccttagaccagtgttaaatttaaataaaacacctcattttttccaattcagggaaggcactaaacataaagcataggatagaaatgttgaactcatccaaaatattattttgtttaatgaaaatgatgaagattaaggaatacttccatgtattgagtaaggttgataattttctaattcttcactgtgcattattttgtttgaagttggtaaatttggagtatcctgcagacacattttgctttatgtactacaacattctacaaccaaataaaaattattttgattatctga

SEQ ID NO: 90631 - DNA, 460 bp, Homo Sapiens
tcttggtggagaacttgatagaggagagaccagacagaaacctttctttcttagcaggccttccggcactcagaacccatggaaattaggaagagttgttccgacaagaaaatgcagaggattcagttcttatgaatctgaatttctgattacgcccaatttttaaaacttggaattagttgaccttttacagcgttaacctctatttcttaatttttatcttgtgacataaaagaaaatctctaacgaattgtgagaaaaacaagcctgtgtccctaaaaaatctgaaatgtaaaaagacatgcggtattattagttgcaagctgggctaacaaacattgaaaggtcccggtttattatgcacatcgatttgtaattattatattgaaatgtcaccctaaacaagatgtattcataacttttccagacatatccttttgtataacccttatccttcacc

SEQ ID NO: 90632 - DNA, 422 bp, Homo Sapiens
caaatgtcagaggaggaagaaaaaccatcaagaaggggaagaagcagccaagggcacagggagaacccagatggagtaacttcatggaagatgaggacttgggcgattcaaagaggaggggctgtctccagagtggattgaaacatcccaattagagccggagatagcccaggccacgagcagccggacagtggtgtacaacaaggggttgtgagtgtggtcagcggcctggggacggagcactgtgcagccggggagctgaggggcagggccgtagactcacggctgcacctgcagggagcagcacgccaaccccagcagtcctgggccccatgggagagtgctcaacctacagtggagggagactgacccattcacatttcaacataggcaagaggagttctaacacatttcgtacaaaa

SEQ ID NO: 90633 - DNA, 525 bp, Homo Sapiens
tttcctatcagtgagaaaagatctatgggtactagttgtgtgtggagtatcttagccactatgaagcgtaagcccatttagtttcaggatagaaaaacacagtaaacgaagcgctatttcttggctgtgagataatattattttgagaagatgtcatctgtgacacagcaactgacagaagcaaactgactcatctggtttatctcagtagatggcataaagtataaccttgcccaggagaagtggcaaagaatttcttattcatatttatatctttagttttgctatccaaaggaacacacctgctagattctgagttccatagtcttagactggaaggaacttccaaaatagttcctgagctctttgttttctgggtgacgaggtaatttgttcactggcttccctgtaaaagtctaaaagccagtgctgtggtggcccatcacacactgtgggtctcatgaaggttggagagaggagtctgttcagatggagcttcttgtttctgcttcttactcttcctgc

SEQ ID NO: 90634 - DNA, 520 bp, Homo Sapiens
aaactaaacatagcattcccatatgatccaccaattttcactcctagggtatatacttaaaagaattgaaaactggtgtgcaaatcaaaacaaacacgaatgttcatagcagcactattcacaatagtccaaaaaggtgaaaacaacccaaatgtccatcaacacatgaacggataaacaaaatgtgatatgtcatttgtggctgccaggagatgggaagtgattacttaaaggatgttcttctggggtgattacaaagtgttgaaactagagagggatgatggctgcacagcattgtaaatgtgctaaatgccactgaatcgtacactttaaaattcttaaaatgctgaatttcatgttatgtgtattttgcaacttaaaaaaaacatgtttacctaagtattgatagaggcaacattggcaaatgtgaatgtgtttagtacacatgcatcacattctacctgacatccttttttggagcaagaaagggcataaataaatacttcttttagagcttaaa

SEQ ID NO: 90635 - DNA, 396 bp, Homo Sapiens
attaaaacttaggcacggtactgtgcatctgtacttctagctacttgacagagtgacctggaaggactgcttgaacccaggaattcaggcaacagaatgtcaccctgtcttaaaacaaagggggtgttggacaggtaagatgttattgttagatatgaagaataagctcaggtgttctcttgcatggtaaggtgattatagctaataataatgtatctttcaaaatagaagagagaagttttgaatgctcttatcacatagaaatgatacacatttgaaatgatacacatttgagataatggatttgctaattaattttatatgatcattatacaatgtatacatgtattgaaacatcacattgtacttcataaacgtacagtcattgtgtcaatt

SEQ ID NO: 90636 - DNA, 453 bp, Homo Sapiens
ccagccagaaagtggttctcatgatgcttctcagaccggcaacatcagcatcactggaacttgttaaaaatggacactctcagaacccacaccagacccaccaaatcagtttgagaactgccattcagtagagaattatttgcctactgtaaattttctaaggatttatgatgggctatttttgacccataggctcagagaatcctgcaaaatccttttttattgtttattctgcagacaaaaatgtgacaatatgctttgaaaacatagatatacttgagtaacatttatttacataaatcccaaattctacctctgaaggtatatgaaatttaactatgtatgtattatgcattttgtctggctttctatcataattttaatttgtaaagaatgtgcttacttgggaaagcaaattaaagtgactactgtttgctatcgttattaaaaaaa

SEQ ID NO: 90637 - DNA, 992 bp, Homo Sapiens
ggccgcggatggggctgggaggggacggtcctgccgggagaggcggaggaggacagggtggggttgcgggcccggcgccgcccctcccggctcctggctcccctcgcctggtgccccgcgcctggccgggaggcggcgggtctcgatcgcgcgggcctccctggaggggcgcgggctctggcggcggggaggcccctgctcagcgcaatggcgggcttgcatccttgggtgattttttcgggccccttgtggcctttgctcacgcctagagagcaaaccacccgcaccacccaggagcagataaaatcgagaccacagcctgcaagggagcgcgcctccatcctgtttgcccctcgggtcgccgtctgagggcgggcccgtgcccgctcagagcctacatccgagtcgtataaagcgctgacagcagagaaagctgcggctttgctccgtgcagatgagcaggggctgagggaggacgctgtgctctcagtagccgcgcttggcccggggaccctgcaggcttagaaacgtgagtcacgcctgcagcgtggcgaggaaacgccgttgatgtggcatcctcagcctggggttgtggctttaagccagaaggtcaaaaaaagaagtcttcctgagctgagactgccctgagtcgctttaggggcgaaattccgagcatccggttgcatttcctgaggatgacacgcgtggtgggtgtggacggcctacaggggtccatcctcagcggcccctctgcagggcagagtctcgctctcactctcccagctgactcctctcaagcctgttaaccattgtacacgttcccaaggactcccaagcaggattggacttcaggaaacattgcaggttggggtctgggaccattgtttacactccaccttgctaaatggcttggaggatcacaccaccagaatcgtagaaccatccggaagatcatcgcagggccacttggaaaaattggtttaataaaaggg

SEQ ID NO: 90638 - DNA, 410 bp, Homo Sapiens
gtattatgcaacctctcacatctttagttttccaactgcagaatggagataatagtacgttataggacttctgagaaggtttaaattaaaattcttttataaagcacttgacttggcatatcatagaggttcattaagtattaggtttatttcccgttagaatacacataggatagaggagcagttaatttttattattactatagaaatcttcagggaggaaatgatatttaaattgtgccttgaaggtggagtagggttttgatatgtgttagatgggttccaaggacattctacttttaaggaactaaatgagcaagggctcaaaggtgtaaaacgtggggaaggctgtaaatacacttatgaatgtcagcatagtccagaaccttaggaaaagcaatttaggtctt

SEQ ID NO: 90639 - DNA, 509 bp, Homo Sapiens
atcatgcacagatcagagccatttctgaaaatgtcgctgctgattctgcttttcctgggattggcagaagcctgtactcctcgtgaagtcaacttgctgaaagggacaacattctggaccacgcatgtaaccttggccaccatgctgactctcctggatgggctgccatcagggatcataggtctcataagcagactgtcaccggatgacggactgaaccccaacaggtgttcttgctgcatctatgcaccgccagaacccccacacctcccattcttcaaatggacgtacagctttctccttaagtcaataaacttgaaaaagttgctttataccacttgagtaagtggtcagcctcataaggaggagacaactgtgaagataaatatcatgaaaacaaaacaagattaaattataactagacactgttttctgccaaggctctttgtgtgaaggttgttcccgctgttcggtggaaataaacactagcaagtgttatgagttaaaaa

SEQ ID NO: 90640 - DNA, 489 bp, Homo Sapiens
  misc_feature (12)..(12): n is a, c, g, or t
aagttattgtanaccacagaaataaccaaatttccttataaattgtctttaactataattatttaaagtcatttccacagttaattgcttaatggtgatgcagtttctaaaaacttcacaagcatgcaaaattctagaatagaagattcatgaaagaatgaaaaggaccatgaaaaacactcgggaacacagaggacagccaaccccttcacaatctagaatctgatgactggatcttctgagaacatcagaggactgcccttgccattcacatgacagcaaaactttaaaaccttaaactttgggttcatagtcttacaactcagaagggtccctccacactcggaaccatacaccccttggaacccttaaggatgttccagcataagaagacaccttctactcaagtccttgttccaccttttcaaatctcactgttctatttcccagtgggtttctaaaccaaataaatacatttgcaagggtaaa

SEQ ID NO: 90641 - DNA, 576 bp, Homo Sapiens
gccgtccctccgtgtgttgccttccgggggggccgctgtcccggcgcccgcggcgcctccttctctgcttctggggagtccccggcgggcccgaccccagcttccagctgccgttgagccgccgccgccggtacagcgaccctgaccgccgtccgagccgccagacacccagagagacgccagaggccgcggaggggcgaagacccgggtaactctcccttccaccccaacccggatcgccagccctcgagagctctgtgctccacgccgaggatgcaccgtctctggattggtccggccttcttcctaatgacatcgctcagcgtctctggagccgtcatcccgcggaatgggggcccagggggtgtcagctcggggccttgcctcttgcagctactctgtggtcaggccgggtcctccaccatcaggaagatcccatcctgagctctgtctcctgcccctcctgctgtgggatgctgagcacagagcccacagcccatctgcctcttcacctccctgaatccgtgtccatctgcaataaacgacagcctcggctgcctcgtgctgtgtcaaaaa

SEQ ID NO: 90642 - DNA, 503 bp, Homo Sapiens
aaaagtatccattttttactacatgtcatttttagggaaaagtaaaacaccaaaacattttaaaattaaagcattaactggttttccatttgctaaactctttttgatatgaatgataaatcattttttccttaaaactacagcattgctaattttctccatatgtgtacaatttggctttgacctttaacaaatgtcctctaggcagtccacttaccatccaagaacaacgccacaacatcattttacttgcacacaaagacttgaaagcttcataaaaataaatgatccgtggcgtaagatacattaaccagcagaataataagctatttcagccctgtaaattttagcacccgtctattcaaaaacctcactgggtcactttagtattaaattcataggagtaaaatggtaactacacatgctttatttgttaaggtgccagccatatattttgtgaaaaagtttgttagcctaggatatttaaaagcaatgtctctttc

SEQ ID NO: 90643 - DNA, 403 bp, Homo Sapiens
  misc_feature (87)..(87): n is a, c, g, or t
gaccatccgcttccagcctaccgtagaggaaaggcccctcaaaacaggcatatggtccgagctgggcctaagggcctatgtgtatcntgtgaacccacccctcccagccctgaggctcctagccacaagaacggtggggagggggcggtgccagaggcagaggcggctcagtaccagcctgtcccagctcccaccctgggcccagcagtcatccctgaattttcccggcaccgctcctcaggccgaatagtgtatgatgcccgggacatgagacggcggcttcgggaactgacccgggaggtggaggccctgtccggctgctaccccctagcctctggatccagcactgccgaggagacaagcaagaattgggtgtaccgttccctaactgggaggtgactgg

SEQ ID NO: 90644 - DNA, 500 bp, Homo Sapiens
gttcagtagggaggtggagaagaaattaacccccatttactagcaattgcttggggcaagtctcaccagggaacatcagaatgtgggctaataaaggaatctgtatgatgctccgacctcttcagggtccttgcaagcctcttgtctttcctcatcatcaccacacccacctggggcaggtggagctggagtcctcacctcctatatatgacatatgagagaaccgaggcacaagcaggcagggtggcttgcccaagatttcagtgggttcctgatttttacctgaccacatcgctgctatgtaggcctcatctcagtctctcggactggagggacaaccccatggctgttttattacaagacaaccagggaagaaggccttgtattccctaatgccctgcacattcccgggctgcagccaaagttgcctcagattataaaggccagggggtcggtaaggattcactgactcattagcgtttgagccatcaccacccagg

SEQ ID NO: 90645 - DNA, 477 bp, Homo Sapiens
cagctgctccggccgtgcctcactgacctgaaatccacttgcacccacaccaaggccagggtttttaaacagaagcctcagcagatcctctctctggccagctccctgttgaaccaggaagcaggtccctgttgaacctcagcatgacccgcccccacccctgcatcccacttctgctctgggagcctctgggttcctgggcgcacctgctgcccttccctgtttgtcactgggtgacctcccgtccttgtgggcgctcccgggccctggtctcgggccttctgaggacttgctctcctggtagcggctgctgactgtgagcccagagagcaggcgtggctgttgaccttaggtcctcccagaacctggcggatcgcctggctcccaggcaggaggcgctgcatgacgcctccaacttccgccaatctagcccaaggatggcgctctaaataaaacgcgttctacagaaaagtgaaa

SEQ ID NO: 90646 - DNA, 600 bp, Homo Sapiens
ggccttttctggagctctctgtacatcctcaaccagagccacagcttcctcgccgttttctggatgctgctccctcacccaggtctggatctcctctggcaagatagtcagaaactgctccaaaaccagcagctccaggatttcctcttttgagtgggtcttcggcctcagccactgacaacagagttcccagagtttgctaaaagcttcatgtgggccagttacctcctggtagcaaaactgcctgaagcgctgacgggaggcctcggagtcagggctgttaccctggagggctgatttctggccctgtgtgggatccttgtttgaggatgggtgtgcctcggtactcttcactgcagccatcatttgcttcaacgaactggcttactctggttgccacttctaccctggagatcagagtccatctttcccacatcactgggaagccatgttctcctgcaaggaatgtctttctgtaatccgtgggacatgagagtgtcagacatgtgtagagactcacagcggaaaaaaagggctcaactttgaaggatgtctgaagaggatggaaaaagacaatataaacctatcaaacattcaaaa

SEQ ID NO: 90647 - DNA, 575 bp, Homo Sapiens
  misc_feature (65)..(65): n is a, c, g, or t
ttgagcgcttttgttgctgtttcttctgtcctgtcaggtctcctggggatggtggcccacatgtngtattcacaagtctttcaaagcgactgtcaacttgggtccagaagactgaagaccacatgtttggaattatggctgggccttctacatggcctggctctccttcacctgctgcatggcgtcggctgtcaccaccttcaacacgtacaccaggatggtgctggagttcaagtgcaagcatagtaagagcttcaaggaaaacccgaactgcctaccacatcaccatcagtgtttccctcggcggctgtcaagtgcagcccccaccgtgggtcctttgaccagctaccaccagtatcataatcagcccatccactctgtctctgagggagtcgacttctactccgagctgcggaacaagggatttcaaagaggggccagccaggagctgaaagaagcagttaggtcatctgtagaggaagagcagtgttaggagttaagcgggtttggggagtaagcttgagccctaccttacacgtctgctgattatcaacatgtgcttaagccaacaaaaa

SEQ ID NO: 90648 - DNA, 141 bp, Homo Sapiens
cctgtttgtaaaggaaaataacaacactatcatgtatccctaacagtatctgggcctctggcactgtgtctactaggcctaatggaaaagtagatcctgcattcacccattcaataaatatgtattgaacatctaaaaaaa

SEQ ID NO: 90649 - DNA, 574 bp, Homo Sapiens
  misc_feature (192)..(192): n is a, c, g, or t
aattcacattcctgggcttctgaacaaagcactgaattaccagactcaactccccggtgagaactgcaaaatcaagcaacctttgatatattttccttccaatatttagaacaaaatgaaagaaaacaaaaccctgagatgggcatttcagaatgtgggctcctaaaaccagcacttgaaatacttccaggnaatgccagccagaacagaaagaccactggcagcaatctccaaagcacactcaaaagatccacaggtggccagatggtgccatgacacagccaaggcttccccaagggccccaggatggaagaaaataccagggctctgtcagagacaagcctgcatctgccagtgtaaagaacctttcctagccaagttatgacaatagtcatgggaatacgttcctgtcttccactgcctttccccagatgtgcacctaatgtccaagaggagatttattgcaaatgccttcacagtcatcaggatagagaaggagtactcagggtctgggctttgcttttctcttaagaggaaactctgttagaaataaaaaggtctacaggaaaaaaaa

SEQ ID NO: 90650 - DNA, 503 bp, Homo Sapiens
aggcatttcacagaagcagaaacccggagggtcaatatccatgaaaagattgtcaacttcatgaatagtcgggaaacaagtgaaacaccaatgagataccatttcacttccatccaattaacaacaaagttcaagatcaacatggcctggtggcagcaagaatgcagagaaataggagcctcttatgctgctggtgtgacagtgcacacgcagacatcttttaaaaacaactgacaatacctggtaaaggggaagcatccacttctatgtatctgtcctaaaatcactcgcatgtgtacacaagaaaacagccacagaatgtgtggcagcattgtttgtagtcataggaaatttcaaacaagtgtactttgcaaatcacaggacagtcataaattatttgtgacatattccaataatggaaaactccactgcagttggaatgaatgaagggaatcaagatgcatcaaaatgaatagaaataaaaataaataatgttggacaaa

SEQ ID NO: 90651 - DNA, 510 bp, Homo Sapiens
aatatttcacataataagcatcaggaatgagaatggcttcagatatctcaacaacatcatcacaatctatatgtagccaaattattacttgagtttatgggtgaaataaagacattttacacatgcaatttctcacaaaatttatctcttatgtaccctttctcaggttgtgttccaccagaacaaaaggataaatcaagcgaaagacagacatgggatacaggaaataagagatctaacatgggagagaagcaacaggaatacagggatgacagaactggagatcccaggaatgacaactttgaagggcaaccagtctagtgggaataggactgaaggtttcaggagagaccgtcagaaaaatgacactggtagaataccaatacacctgaatgtcctaagaggaaatttagatggctggtgaaacattcaaggatgaataactgataaatacagagaaagttaaataaacagaacactacaagaaaacaaagagttgcacagaaaaaa

SEQ ID NO: 90652 - DNA, 918 bp, Homo Sapiens
  misc_feature (410)..(517): n is a, c, g, or t
cagataatgagcttcaccacttgtctgcctcctgtgtccttccgcggggaagtaaatgtcacttcagcttgccgcatctctaaataggcaaattttcagtgctcagaaaaggacctgatctttgcacaaagtgctttgatggttgcctgcttgagtcactcccaatcccttcctgaagccctttctttataattcttctgttgaaatagccatcatattcacagtactaatcacagcatctcacatttactaaaaacttaccccataccaggaacccagagttgggggggctgtgtcagaattatgtaatttacgtgtcccaataatcctagatgcttcttgaccatctagttttgtcaaatgagaaaactgaggttccaaagaagtcaataaacttgtccaaagtctgnnnnnnnnnnnnnnnnnnnnnnnnnnnnnnnnnnnnnnnnnnnnnnnnnnnnnnnnnnnnnnnnnnnnnnnnnnnnnnnnnnnnnnnnnnnnnnnnnnnnnnnnnnnngaaacaagagggcggggcaccgcacgatacatcactcagcggggcgccacaatcaagggacccgaaattagtttagtaagacacaggggcgccacaaaagtagaggactgatataaaaagagcgcaggcgcgcgttaacaaaccaccggaaggggaagcaaccacagtacgaggcgtacattatggagaggaaacaacccatctatattcgtgtggtagatcaaaaataagacagaaaaccccacatcctcacgaaataaatatacaacttacgctggagtgacatataaaatatatattcatgttaatattagatagagtacaaacaaagaacgtaataattagttgcgtacaaaaaaataacctcatctcactaatatgttagagaaacaattattacg

SEQ ID NO: 90653 - DNA, 121 bp, Homo Sapiens
tataacaacttcagtgtaaatacttactacttacttttaaatacttgattcctaatgttttagtgaaaccctactagcacccatgaccctgattaaataaatttacttttttcctgcttaa

SEQ ID NO: 90654 - DNA, 1065 bp, Homo Sapiens
tcgctctcttgtgtctgtctagcgtctatcttgtgtttccccacagtgatgcttggtctcctatatgtgggtgggcgcgtctggttcgttgttcttccggtgtgcgtgtccatggtggttgggatcctttttgattgttgggccaatcgctgttagttttctgttgagcttctctgtgatagtccgcttgaggcactctccgtagtgtttggcccctgtctggttgctgattctgttaggttcccgtgtagaggtagaatgtgtgtttctgaatcagattgatgcttctcaaaggtcccacattgaggtcctgtgagctacctcccttccgtgagtgggaagagtgaagcccatgaagaactgagatgaagcaaggatggggttcctgggctccagcacaggggctgtgctctctgcagcagggagccccacgagtcagaagaaaagaactaatcatttgttgcaagaaaccttgccggatactagcggaaaactggaggcggggctgggggcacaggaaagtggaagtgatttgatggagagcagagaagcctatgcacagtggccgagtccactgtaaagtggaagagacagaagggacattgtggataaggaaaattttggtttgggacacaacaatgtacccatagattaggacttagctatctacccattcctaaccttctgcaaactcttcttccaacaattccacaacttcccggaaaagggacaggtgggaggaagaccaatgaggggctcagacttcctcctttgctatccacaccaacccagactctgcttccaagactaataacaacagctcatgatgcttcaaggtggggactacggggatcggggaggtgacggacgtgggcatgcctttcatttcttcccctctccagttcaagagaaggatgagggggtcataatgtacttcggagacaaacagaacttgcagacctgtgtagctaactgccgacgcgtgggtcgacgatatcccgggtattccggaccggtaccagcctgctttgtttgtccccacttgttcatgatgtctccactggc

SEQ ID NO: 90655 - DNA, 954 bp, Homo Sapiens
ataactaataacaaaatagaagaattataacaatattctagcatcactactttgatgctttggggctattactaagtaaaataagggttacttgaagagaagcactgagataccatgacagttgacctgatcactgagatagctaagtgactactgtgtagatagagcatgcagtgtggatacactggaaaaagagcagattcacatcccaggtgagaaggagcaggacagtgcaagatttcaccacactgcgcagaatgaaattgacaagatgatcctaaaatttatctagaaacacacgggacacagaacagccaagataattttgaaaaataagaacgaaggactcatacttcttgatttcaaaactgactacaaagctacagtaattaacactgtgtgagactggcataaggatatgcatatagattgataaaataaaactgagaagcccttgagaaataaaccttatatatatggtcaactgatttttgacaataatgacaagaaaattcaataggaaaagaagttatttcaacaaatggtactgggacaactggatacacacatgcaaaaggatgaagttggaaccttacctcataccatatgcaaaaattaatgctaaatgagtcatagacctatatataagaattagaactataaaacttatggaagaaaatataggtgtaagtctttgtgattttggattacacaatggtttcctagaatgactcttaagcacaagcaaccaaatcaataagttggatttcatcaaaattgaaaacttttgtgcctcaaaggacattatcaagacaatgagaagagaacacatagaagaacacacttacaaatcatatatctgatacatatctgctttccaaaataagtaaaaacttttataactcaataataaaaacacaagtaacccagtttaaaaatgggcaaaaacaaaaa

SEQ ID NO: 90656 - DNA, 761 bp, Homo Sapiens
ggatgttggcccaaataaatctgtatcagtataggttcattaaatatcagaagaaacccgctcaccagtcctttctgaatggtctgaactatccatagcttgtcatgtgtttatcaaatgtccgtcggcattaatgcctgcagtcattgtctgagaactgcccgagagtcccaaagaatctagatcgacactattgattggtacaaacgtaatatttcctggcagaccaagaggcacattagcaactacttgggtttgaccaggaaaagatgaaccaccaattgcaactccctgaacctggacttgaccagtctgtggtatgagattctggatgttagcagaaggtgttccagaggcaagtaaggtttgattagagccaggaatgatctgaatttgactgctttcttgatttatacccccattatctgaagagcctgtgaaaccaatttgaacctgctgaccatctgctgactggatctgtggtatcacttgatattgaacactggacactgtaccatttgatgaatctgatcctggtgcaacggaaaatatttgttgattctgcaaattctgaaggggaagaacatactgcccacttgaagtagcagcacttggaatctggactagattaccagcttcatcttttatagttgtaggtgtggctgacaaaacctcccatcggtttggtgctcctcctaactgtgcagaagccaaatcacctgctcgcaccggcggcggcgggggccccggcgcggcggagc

SEQ ID NO: 90657 - DNA, 494 bp, Homo Sapiens
ctgttccgatttaataacctttgataaatttgaaaaatttgtctttcaaacagagcctgttagtattaatgaagaaaatgagggatttgaacataacacacaagttagaaatcaaggaattatagctttgagttaccgtgactgggaggtaaagctctgcctgttgcccctgcatagttctgactctgccttcacttgcagtaagcccagtgcctaaatgttcattattgtctgccaggagattgtgaagacctttgagatttcagagcctgtgattactccaagtcagaggcagcagaagccaagtgcttgatgctagctgaaggactcaaatggatagtgaagtccaaaacggaaagcggcatgtattgtacatattgtatgattcaacatttttaaaggcagattgtttttagtaaaatgtagcttttgatagttaataaatttgtcatggttgtctttgattaaaggaaactcaccaccatattcacaaa

SEQ ID NO: 90658 - DNA, 1261 bp, Homo Sapiens
  misc_feature (545)..(584): n is a, c, g, or t
  misc_feature (690)..(750): n is a, c, g, or t
  misc_feature (771)..(961): n is a, c, g, or t
cctgataccccaatgtccttctttgactttgtggttgatcctcattctttcccccgtacagtggaaaacatctttcatgtttccttcattatacgggatggttttgcaagaataagacttgaccaagaccgactgccagtaatagagcctgttagtattaatgaagaaaatgagggatttgaacataacacacaagttagaaatcaaggaattatagctttgagttaccgtgactgggaggagattgtgaagacctttgagatttcagagcctgtgattactccaagtcagaggcagcagaagccaagtgcttgatgctagctgaaggactcaaatggatagtgaagtccaaaacggaaagcggcatgtattgtacatattgtatgattcaacatttttaaaggcagattgtttttagtaaaatgtagcttttgatagttaataaatttgtcatggttgtctttgattaaaggaaactcaccgccatattcgcggggaagaggaccgggggacgggcggcggacccgctgagtgggtcggcggannnnnnnnnnnnnnnnnnnnnnnnnnnnnnnnnnnnnnnnaaatgtatcttgtggcggcccggcgttggggcctcaggaaggtttttgcaagagcctcccggtgtgggggggcggccgggccccggtgaggggagaggggaaacannnnnnnnnnnnnnnnnnnnnnnnnnnnnnnnnnnnnnnnnnnnnnnnnnnnnnnnnnnnnggattccgccgccgacggtannnnnnnnnnnnnnnnnnnnnnnnnnnnnnnnnnnnnnnnnnnnnnnnnnnnnnnnnnnnnnnnnnnnnnnnnnnnnnnnnnnnnnnnnnnnnnnnnnnnnnnnnnnnnnnnnnnnnnnnnnnnnnnnnnnnnnnnnnnnnnnnnnnnnnnnnnnnnnnnnnnnnnnnnnnnnnnnnnnnnnnnnnnnnnntggtgggcaggtgggccgggagggcatctccggccgccacgagggtgaggggtagagtcgggcggggggcgcgcgggaggcggagggcgggatggtgtgtgtcgctcggaggccgcgcccacccctctggtgcgcgcggacgggaagcctagggtgttgacggggtacaggctgccgagaggagaggcgtgcgcggcacgacgaatatctcgtatggcgtgcgacgcgcgcaccgtgggcgatggcgcgaggtgcgggcgggctagtagattctcccgccggtcgcgtccgtcggctctc

SEQ ID NO: 90659 - DNA, 483 bp, Homo Sapiens
gagacgctcctagaggttttaggatacaatggctgtttggttccagccatgaggctgcatgcaacctgcctgacactgctcgacctggtctatcttctgcatgaacccatatatgagagcctgttgagggcttcaattgagaactccactcacagtcagctgcaaggggaaaagtttacttcagtgaaggaagacttcatgctgttggcagtaggaatcattgcagcaagtgctttcatccaaaaccatgagtgttggagccaggttgtggggcatttgcagagcatcactggtattgccttggcaagcattgctgagttctcttatgcaatcctgactcacggagtgggagccaacactccggggagacagcagtctattcctccccacctggcagccagagctctgaagactgttgcttcctctaacacatgagggaggctgaatccaccaaatataaacagccatccgtcactgcaaaaa

SEQ ID NO: 90660 - DNA, 419 bp, Homo Sapiens
tcagggcccgagggatgcatcactgagggagccacgactggtctctgggcctgacggtaaaccagggctgttaagtgttgcccaggtggccagcaagacaaataagtgcctcaagctaaggtaaattaggaccagagagatgaagctcctggctcaagtggtccctatcccatgattccagctctccagcaattctcccccactcccacctctattcgattctggggccgaaagccagcaaggcagagccactgggaccttccctgcctgagaagcgcatagaagtaagaccctcaaacaggtccaagctgggcccatcacagaaaacagatgtccactgagggtccagcatcgggatttagggctattttttacaatgttactgaatgaataaattcccccaagacttacattttaaa

SEQ ID NO: 90661 - DNA, 353 bp, Homo Sapiens
gtgacttcaagtattgttttatctaagcagtggagtgaaggtcatgagcctctgagctggcctgagttacggccacctgggcgccatagtgaaggttatgggataagtctgtgcctgggcaaacctagataacggacatctgggttgcttggcacacggtcacgtgcaatcctgagtttgtcctgcctctatatccctgctttcatgccactgtaagcttgcttcaagctagcccacccccttttgtgaagtgtgtatagaagtcaagtgctgtctttcttccgggcccagtcttttggacgttgagtcagctgggcctgagtgcactcaataaatgattctcatgttttaaa

SEQ ID NO: 90662 - DNA, 725 bp, Homo Sapiens
gcggccgcgagaaccggatgccgatcctcatctccaagatcttccccgggctggctgccgaccagagccgggcgctgcggctgggcgacgccatcctgtcggtgaacggcaccgacctgcgccaggccacccacgaccaggccgtgcaggcgctgaagcgcgcgggcaaggaggtgctgctggaggtcaagttcatccgagaagtaacaccatatatcaagaagccatcattagtatcagatctgccgtgggaaggtgcagccccccagtcaccaagctttagtggcagtgaggactctggttcgccaaaacaccagaacagcaccaaggacaggaagatcatccctctcaaaatgtgctttgctgctagaaacctaagcatgccggatctggaaaacagattgatagagctacattctcctgatagcaggaacacgttgatcctacgctgcaaagatacagccacagcacactcctggttcgtagctatccacaccaacataatggctctcctcccacaggtgttggctgaactcaacgccatgcttggggcaaccagtacagcaggaggcagtaaagaggtgaagcatattgcctggctggcagaacaggcaaaactagatggtggaagacagcaatggagacctgtcctcatggctgtgactgagaaggatttgctgctctatgactgtatgccgtggacaagatatgcctcggcggtacca

SEQ ID NO: 90663 - DNA, 712 bp, Homo Sapiens
gcaagactgcgccagattcaaggacgagggctgcccgattatctcgtctgcataaggcaagaggaagaggatcctcaggattgtaaagaggaggcgacggctgcagggtcccaggatctgtcagaggctggggagttacagcttccattctggggcgacggggaccccggcggggtagccattttgtaatccccaggccccggacaaagagcccagaggccgggcaccatggcgtccatcctggatgagtacgagaactcgctgtcccgctcggccgtcttgcagcccggctgccctagcgtgggcatcccccactcgggtaaggaagaggagggtgccgctgcccctttcggctctcctagcatttgcgtgggagcagcgaggagggcagctccaagagctcggggtcatcccctgggccgtgccttccgggtataggcccctgattctcctcaggctctcttggcccccagctggtggatagtcgaagtttgaaagagcaacgggagctgccgcgtgatctaggctctaccgctagggtccttttgagagggaattggggcccagataaggaattactcacctacagggcgcagttgggctgttgggagaacttagaatgggctcccggcttctgctgatgcttttcccaccaggccccttctggaggtgggagggaaggaatggacaaagaaagtggtgaaggcggaga

SEQ ID NO: 90664 - DNA, 811 bp, Homo Sapiens
  misc_feature (621)..(621): n is a, c, g, or t
gcggccgccgccgccgcagctgtgtcccgccggaggaaggccgagtatccccgccggcggaggagcagccccagcgccaggcctcccgacgtccccgggcagcagccccaggccgcgaagtccccgtctccagttcagggcaagaagagtccgcgactcctatgcatagaaaaagtaacaactgataaagatcccaaggaagaaaaagaggaagaagacgattctgccctccctcaggaagtttccattgctgcatctagacctagccggggctggcgtagtagtaggacatctgtttctcgccatcgtgatacagagaacacccgaagctctcggtccaagaccggttcattgcagctcatttgcaagtcagaaccaaatacagaccaacttgattatgatgttggagaagagcatcagtctccaggtggcattagtagtgaagaggaagaggaggaggaagaagagatgttaatcagtgaagaggagataccattcaaagatgatccaagagatgagacctacaaaccccacttagaaagggaaaccccaaagccacggagaagatcagggaatgtaaaagaagagaaggagaagaaagaaattaaagtggaagtaganggtggaggtgaaagaagaggagaatgaaatcagagacgatgaggaacctgcaaagaagagatgaagaagacgataagatgacaaaagtgcacgtttacgcaaaaagagaaatatgcctccaatccagtatgtccggtgtgagatgcgaggatgttgaactgtactttgccattcttggtatttgcagcgc

SEQ ID NO: 90665 - DNA, 444 bp, Homo Sapiens
ccagcactaaagtaatggaactttgatgatgcctttgctgggcattatgtgtccatgccagggatgccacagggggccccagtccaggtggcctaacagcatctcagggaatgtccatctggagctggcaagacccctgcagacctcatagagcctcatctggtggccacagcagccaagcctagagccctccggatcccatccaggcgcaaagaggaataggagggacatggaaccatttgcctctggctgtgtcacagggtgagccccaaaattggggttcagcgtgggaggccacgtggattcttggctttgtacaggaagatctacaagagcaagccaacagagtaaagtggaaggaagtttattcagaaaataaaggagtatcacagctcttttagaatttgtctagcagactttccagtttttaccagaaaaccccta

SEQ ID NO: 90666 - DNA, 799 bp, Homo Sapiens
  misc_feature (668)..(691): n is a, c, g, or t
  misc_feature (762)..(762): n is a, c, g, or t
gggagaggccacgcccccggaagcggcggtgcagaacccagggaccatgggcgcctccaggctctataccctggtgctggtcctgcagcctcagcgagttctcctgggcatgaaaaagcgaggcttcggggccggccggtggaatggctttgggggcaaagtgcaagaaggagagaccatcgaggatggggctaggagggagctgcaggaggagagcggtctgacagtggacgccctgcacaaggtgggccagatcgtgtttgagttcgtgggcgagcctgagctcatggacgtgcatgtcttctgcacagacagcatccaggggacccccgtggagagcgacgaaatgcgcccatgctggttccagctggatcagatccccttcaaggacatgtggcccgacgacagctactggtttccactcctgcttcagaagaagaaattccacgggtacttcaagttccagggtcaggacaccatcctggactacacactccgcgaggtggacacggtctagcgggagcccagggcagcccctgggcaggagacgtggctgctgaacagccgcaaaccatcttcacctgggggcattgagtggcgcagagccgggtttcatctggaattaactggatggaagggaaaataaagctatctagcggtggaaaaannnnnnnnnnnnnnnnnnnnnnnncttgtcgggccgcctcgggccctcgaagaagctttcctagaccaattcgtttgggcgcgcgggggccccgntagggtaaggtggaacaatgggtcaataagctgggta

SEQ ID NO: 90667 - DNA, 521 bp, Homo Sapiens
tttctaaataaaccaaatgcttggtggagaagttgagcaggggagatgggcagtagaggttgccaagacagggcagggggtctggatgaggctgtccgatgcctgccagccacagtgatggtgcatggagggaaggaggagcagagagagaagataggcgtggcctccgggatgcccattctttttgcagagagcagcggcagtgggtccaggggtcctggaggggctggaagggggcagctggctggacatccagaagctttttcttccctcggccacgcctgcctggcggcctccagtccttagcctccgctccctctctctctccagatgcccgccccactccgtgtccatagcagtgacacagccacttccccagctccgtgtaattcccaagggagcagtgaaccccaccatctcaaagctgaagagctgctggccacacacatcctctcacggttttctccctccttctgaacgccggctttgctggccctggaatctctggaaaaataaactca

SEQ ID NO: 90668 - DNA, 1095 bp, Homo Sapiens
  misc_feature (770)..(851): n is a, c, g, or t
  misc_feature (853)..(853): n is a, c, g, or t
  misc_feature (857)..(857): n is a, c, g, or t
  misc_feature (861)..(880): n is a, c, g, or t
  misc_feature (884)..(894): n is a, c, g, or t
  misc_feature (1008)..(1018): n is a, c, g, or t
cggtccggaattcccgggatgcctcgcccggtccccgccccgcccgccgggcgccccctgggccttctcggggtcgggaggtgctaaccagctcctcttgccagggtacgcgacggcctctcgggcgcctcctgcaagcagggactcgcccggcgcgccccacgcctcatggacgccggcgcctgcacgtttcggcgcctctgcaggcccaggaagccagaggggtcacctggaggcctggccccgcctctcctgcacccctccgtttgacaacatatccaccgccgtttttcctttcaaaatacccggaccaatcgattagccctcgccggactcggactgcaggaagtgattgatcggctgtttggtttattgattcattaactacggtgcctccctgaccttctgctcctcgccagcgcacaagctcacaatccacaccctcctaagagaacctgctctcgccatccgcaggtctccctggcccaatagtggggatatacctgagttgagctagaggattttatccctgttgggatgggggacgtctcgggaagtgtggtttctaaactaaaagactgcaggaagtgtcaactttagtgactgtcattgccattcaagaatgtttgattagtttatattcccttcgtagtgcacccttcaccgtttcttctcagacaccagcgggtttcttctcagacaccagcgggttcccctctttctcttgaactataataataccctacacatgtgcgtagaacatgataaannnnnnnnnnnnnnnnnnnnnnnnnnnnnnnnnnnnnnnnnnnnnnnnnnnnnnnnnnnnnnnnnnnnnnnnnnnnnnnnnncnactntccnnnnnnnnnnnnnnnnnnnntttnnnnnnnnnnncgcccttatagaaaacaacaccccaggggggggcacattttattccccccacccacttttcttttataaaaaaagggcgccccccctaacggggggccccttacaatataaccnnnnnnnnnnncgggcgctcttcaccataacaccgtttggggcgggggggaccaaaaccccccttccttgggcgcgcatttcttataa

SEQ ID NO: 90669 - DNA, 537 bp, Homo Sapiens
agccaaaagtcaaagggtctcaaatgaactctgagttaccatctttggactgacttttaatataaagctgtaatccttaaatctgtgtcagtagtcccacctactatgtcactttaattggatgaatgcgttaatgaaaagtttgttttcaaacctcactaaactgctacttaagatcacagttaatgtgagtcctgcttaatttggaaagcatttaaaaaatggaaaagtttcttagggaagcaaaaattttgcaactctgcctacaaggtacagtaattggctaggttcttttgaagagcagtgttgactagagttaaggaaaagtcagttgtgaaaaatggacatttttaatagcaaaatgatgtgctttactgtagaaacaggaggaagggtgcattatcctggggaaaatgaattcttcttcagttatattttatgctgctctactttattgcaaaacgctaatattaaatgaatcaagaccacctccccttcccgctttatgaaaataaatagaagtatagaagataaaaa

SEQ ID NO: 90670 - DNA, 698 bp, Homo Sapiens
  misc_feature (184)..(184): n is a, c, g, or t
catggtcataatgtgatatgcttcatcagagtgaaagtttttgattccagatataaagagaagcaaaattcatacaggtatccgggtggttttcacctaagatcatcaaaaagaattaagaagcattttgatagctacatagaaacagcattggatggcagaaaagaatctgaagcccttgtanagctaatggaaatatttgggactcaatgtagttatttgctaagcagaaaggatataatggattccttaaagaatgagaactatgatctggtatttgttgaagcatttgatttctgttctttcctgattgctgagaagcttgtgaaaccatttgtggccattcttcccaccacattcggctctttggattttgggctaccaagccccttgtcttatgttccagtattcccttccttgctgactgatcacatggacttctggggccgagtgaagaattttctgatgttctttagtttctccaggagccaatgggacatgcagtctacatttgacaacaccatcaaggagcatttcccagaaggctctaggccagttttgtctcatcttctactgaaagcagagttgtggtttgttaactctgattttgcctttgattttgcccggcccctgcttcccaacactgtttatattggaggcttgatggaaaaacctattaaaccagtaccacaagtaaa

SEQ ID NO: 90671 - DNA, 477 bp, Homo Sapiens
cctttgggggtgattttgggttggcaagtcatgtgtgtgtgggggtctccttccttcagatccatgcatcagtgtgaatgacagactcttttaatagatgacaaagaaccagacacctgccttttcacagctggatgtgcctcagaacatggcacacccaagactcagagaggcaagcaccttgcttaaggccacacagtgagacaaggacagagtcagaatctgagcctaggcctcctgccttccagcccagggctcttggggccccacagccttctgagaatatcctatgagaaagttggcttttctttttctttcatgtaggaaacagaaaaacagccaggaatcttgaatgtttatctaaatattctgttcacaaaaaaacattttaaccacatggacttgaatgggcttaaattcagtggcacggggtgtaaattccacataaataaaagcactttggattattgaaaaaaa

SEQ ID NO: 90672 - DNA, 536 bp, Homo Sapiens
  misc_feature (88)..(150): n is a, c, g, or t
  misc_feature (180)..(245): n is a, c, g, or t
cagtctcttgccccgctgctggtggaagaagaggaggagaagaaaaatgatgatgaggaggagtatgaccaggaggtgtgtgatgcannnnnnnnnnnnnnnnnnnnnnnnnnnnnnnnnnnnnnnnnnnnnnnnnnnnnnnnnnnnnnngaagaagaggtcgaagaggctgaatatgtnnnnnnnnnnnnnnnnnnnnnnnnnnnnnnnnnnnnnnnnnnnnnnnnnnnnnnnnnnnnnnnnnncgagcagagaggggaagaatttcacttgcctctggaaatgcctttatcaatcttcgtagaggctgaagaaaagagagagaactttataagctgcacttttttaaacccagagcagataattcccaaagtgccacaggaatccctgttcatggcacaggactttaactgttagacatcagaaaagggattgagaaaagggatggaactgatttgaggctaaactggattagcaatttattaaaaactgattaaaaagtgagttccattaataaacagatctatgtaaaccca

SEQ ID NO: 90673 - DNA, 876 bp, Homo Sapiens
tatcgtcgacccacgcgtccgtgcccatgtctgaggtgtcccaggtatccagggcagcccaaatggcagtccccagctcgcggatcctccagttgtcaaagccgaaggccccagccaccctcttggaagagtgggaccccgtgccaaaacccaagccacatgtgtcagaccataaccgcctccttcacttggccaggcccaaagctcagtcggacaagtgcgttcctgaccgagatcctcgctgggaggtgctggatgtcaccaagaaggtggtggccagcccccggatcatctccctggccaagcccaaagtgcgcaagggcctcaacgagggatacgacaggcgtcccctcgcctctatgagcttgccacccccaaaagcatcaccagaaaagtgtgatcaacccaggcctggcctctaagacctccgctcccagtaaacaccctcaggcaccctaaccctgtgtatgtgattattctgagctttttggcctggagaagggagggcgggctagaaggccaaaagaaggatgaggaggacaataatatttatttttgcatccaacctgcgacttgtccagctgtttattttccgagtcactttcattgaccatctcgagcgccttctgaatctcttcagtccagacttattcgtccattcctgagggcccacgggaccgtcggagtcggaacgacagccacagtcaaaccagccgacgctcctgctgaggggccacgggaccgtcggagtcggaacgacagccacagtcaaaccagccgacgctcctgctgaggggtcacggggaccgtcggagtcggaacgacagccacagtcaaagcagccgacgctcctgctgaggggccacgggaacggtc

SEQ ID NO: 90674 - DNA, 192 bp, Homo Sapiens
aaatctctctatgcctccagccgagaagataaagagtgtacatctttctggttaaaaagttttgctttgcagaaacacagccaatttatgattctggccttcccagctagggacagtgttcatttacatttaggaccatgaggagagaggcttagctgtgtgtttctgaggccggagaaaattacagtgata

SEQ ID NO: 90675 - DNA, 529 bp, Homo Sapiens
ttggaagccatgtgttaacactgagtgatcctcctcagccaagtccctaatgcatggaaaagaacctcctgacccagtccccaaaggctggacttttcctttgcaagaaataaggagggtaaagttcaccataaataacaaagtcatggagtcaagctgtcacaattggccaccgttcctaaggcatttgaattgtatgcattgacaggaaaaagcaggaaggagtgaagacagaacaaggggagaatgtaacctgagttggaaggtgtaatatttaaatgtatttgcaaacctgttttgggccaaaaggggtaggaggaagagaagacgcatttgctgagatctattatatgccaattggaggactacagatttcacaattcacatctgttgtcttatttctttctcataatcccaaagataattctaaagttacacattatcatctccatttacaattaagaactgatgctccaagaagaaagatctcccagtgtgtaggcaacagacctaagattcaaacctaaaa

SEQ ID NO: 90676 - DNA, 406 bp, Homo Sapiens
gcggctgcaggagcgcgcgcggccagcagagggcgcccgcgccacacctcgcggaggcctccccagaggggctggagtggaggcagagccacaaccgggaagcgcacttcagggaaccgcacttagggtccgatgggaaggagaatggagaccatcaggtcggaagacactccccccactaactgagaactgatgcctgaattctccttttccaccaatgagatcgaagaaacaagtttctggacaactagattctggctagggatgacgcacggggagggggtccaccagggctcctcacgtggcaacccgaaataatcgcccaggccagggtttccagaacaacgttcattttccgtaattttctcattttcaataaaggcataatctttaaatgtgaaaaaaa

SEQ ID NO: 90677 - DNA, 506 bp, Homo Sapiens
ccacacagctgtcctcactacggggcagggagcagcctcggcaacaggcaaaggccagagtcagagtggtggggaggacaggggctgctgccccgctcctggaaagccactgcagaggggcagtggctggcagtgccaggcctgggggaagtggaagcgtcctgtctgggggcagattcccaagcaagggtgacccatggttaagggccactggaaagctggagagagcttgggatcccttccacctggggccaatggtgttgattgcagactggaggggtaacctccgctgagggtcattatgtgccaggcatggcattgggtactttctgcattgggaccaggcagccgggcctgccatttgaggcagcgagcctccgtgacctgtcctccctcatttgtaaagtggggtaacagctatgtcactggccagttgtggggattaaagtgctgagcttagtgcccagcccaaaatgctcaataaagctattcagtgataaaaaaaa

SEQ ID NO: 90678 - DNA, 1308 bp, Homo Sapiens
  misc_feature (1108)..(1173): n is a, c, g, or t
  misc_feature (1183)..(1197): n is a, c, g, or t
caccatacggctaggtacgaggcctgggtggcgaattcggcacgaggctaggaaccagtcatgagattagaggccgagtcttcggccacccaaaggcggagtaagaaaccagaagcggatctgattggttgctggaagacgccgcgcccacctcacagaaggacgaaccagtgagctaagctgcggggcgcgggctcggccggggcaccggtgagtcgccggcgctgcagagggaggcggcactggtctcgacgtggggcggccagcgatgaagccggctatctttgtcacgagtgaattgttctcagtttctcggtttatgtgctcttccaggttgtaaatttaaagatgttagaagaaatgtccaaaaagatacagaagaactaaagagctgtggtatacaagacatatttgttttctgcaccagaggggaactgtcaaaatatagagtcccaaaccttctggatctctaccagcaatgtggaattatcacccatcatcatccaatcgcagatggagggactcctgacatagccagctgctgtgaaataatggaagagcttacaacctgccttaaaaattaccgaaaaaccttaatacactgctatggaggacttgggagatcttgtcttgtagctgcttgtctcctactatacctgtctgacacaatatcaccagagcaagccatagacagcctgcgagacctaagaggatccggggcaatacagaccatcaagcaatacaattatcttcatgagtttcgggacaaattagctgcacatctatcatcaagagattcacaatcaagatctgtatcaagataaaggaattcaaatagcatatatatgaccatgtctgaaatgtcagttctctagcataatttgtattgaaatgaaaccaccagtgttatcaacttgaatgtaaatgtacatgtgcagatattcctaaagttttattgacaaaactcgttgtgtctctttcatttcttataggaataggaaaattgggataggaaaattggtatgcaattttccttttagaaatgaattggttgttctggtatattctacctggaggtaatgctgaaaacatgcatttggaaaaatannnnnnnnnnnnnnnnnnnnnnnnnnnnnnnnnnnnnnnnnnnnnnnnnnnnnnnnnnnnnnnnnnccctggccgnnnnnnnnnnnnnnnaaaaacttttcaaaaccttcctttgggggcggggccccaaagggaaggggacaagggcctaaccgggttcctaagaaaacccgggcctgactaaggcttggaatccccccc

SEQ ID NO: 90679 - DNA, 824 bp, Homo Sapiens
gggggggcaccggtgagtcgccggcgctgcagagggaggcggcactggtctcgacgtggggcggccagcgatgaagccgcccagttcaatacaaacaagtgagtttgactcatcagatgaagagcctattgaagatgaacagactccaattcatatatcatggctatctttgtcacgagtgaattgttctcagtttctcggtttatgtgctcttccaggttgtaaatttaaagatgttagaagaaatgtccaaaaagatacagaagaactaaagagctgtggtatacaagacatatttgttttctgcaccagaggggaactgtcaaaatatagagtcccaaaccttctggatctctaccagcaatgtggaattatcacccatcatcatccaatcgcagatggagggactcctgacatagccagctgctgtgaaataatggaagagcttacaacctgccttaaaaattaccgaaaaaccttaatacactgctatggaggacttgggagatcttgtcttgtagctgcttgtctcctactatacctgtctgacacaatatcaccagagcaagccatagacagcctgcgagacctaagaagatccggggcaatacagaccatcaagcaatacaattatcttcatgaagttcggggacaaattagctgcacatctatcatcaagagaatcaccaatcaagatctgtatcaagataaaggaatttcaaatagcatatatatggaccatgtctgaaaatggccagttctccaaccataatttgtatttgaaatgaaaccacccgtggtaatcaactttggaatggtaaata

SEQ ID NO: 90680 - DNA, 279 bp, Homo Sapiens
tcagggatgggggcggggttcggagacagtgtggggaggggaggtctgcaaatcgtccaactctggtgttaatggcgggtcttctcagcccacccgcagggcagggagggaggggtcggcgtggccccttccccaagcctcccccacgcccaccctgggtgcatgaaccgcccaatgcagaagctgccgcatgtcacccccctctccccaaagaaagtgtcatgcccccttcccacccaccctcactccccaccaaaataaacgtttccttttcattta

SEQ ID NO: 90681 - DNA, 517 bp, Homo Sapiens
atgacaccattaagggacattataagggtcctggggctgaggtgggaagatttttctatctgccccatatagtttacccttccttgccttgaaaatgaatattttagaacagagtacagctcttaaaagttattagtatcattattattatagttgttatataatactttaattaagaaagatgaaaaccttttttctttcctaagtcagcccaatggtgctattttacatatcaacacagttgaaaggaagtactgttattttgggctgcagtgtttcctccacatctaaagaaagcccattttgaaactggatactgcattaaaacaaagaaggaaaaattattttaactgtgtgcagtttttgaaattaggcatttgtactattttggttttacataattctcttgcattaacaatttactgttttgtgaatcatgtgtactaaagcaaattaagaaaaagaaaataattatctgtgaaagactttgtatattaaacaagtgacgcaaacctta

SEQ ID NO: 90682 - DNA, 334 bp, Homo Sapiens
gtggtggaagaccacggcgtccgcgctggccagcaggcttcggttggcactcaggtggcagcgggcgatgccgtagcgggtgcaggtgtcgctgggcaactctgagggctggtcagtgaaaggccagtgccagacaagaatggtgaatcgtgggctgaagtaccgaagtaccccgaggggctgaccccagcagccacaggagccagagggcagcgagcagagccaacccggccaggaccaccaagcatcgcagcatcagggtggggccgtgcccagcattattcatccacagtctcccaggatcagtcagccaagagacccgagattctcaaat

SEQ ID NO: 90683 - DNA, 516 bp, Homo Sapiens
ctattatgagacttcaatttccaaagagaagaactagcagagaaattgtatttcagtaattttaagctccttctgtcttgtagagtcttgttatagttgtataaatcaaaaacacagaataaggaacatatttaactttttttcattataaaatggttagaggaccctaccccctctagattccctgatttccccaggcctgcagcatacagtaagatgggtccctgtgccaggcctcaatactgccagggaataaaaccagagggagaggaccctcagtgtcatatcaggaagcccagtgccagaggacagacaggttcaaaactggcttttcctctgggcctgggttggtgctataggccaagggtcattttatacttgggtataaatcaatcccagtttgggaaaagattatttttaagcttaaaaggctgacatgtgccattatatgtagtatgtaatatatgtaacatcttccaattcttttaaaataaaattaatatttataatggataa

SEQ ID NO: 90684 - DNA, 383 bp, Homo Sapiens
cctagtcttggtgtttcagcccagttgctacttacaaaggacttctgtaaatgggtattgaataaaggcctttcaaaaagattcttcctggtggcagagaatcctgtctttcctagggtggtagtcagtaaacagtccccaggagaaacagaatttgagggaaggtgtgaaaaatttaactccttcatagaattccctgtacggcaggaatcaccctccatagggccatcaagtgaatcaggcctgtatctccacaatgagccaagaagactggcatcacttttattaaaatctacttccgttagaagtttccttctttatgtccgctgctgaagcagttcgttcccacaatccagaagtttcagtttatcatcaggaatagt

SEQ ID NO: 90685 - DNA, 517 bp, Homo Sapiens
gcgcgttcgaggtggtatggccgtagatcatacccctaagcgttcaatacaatcttttacttacttacacagtctccaacaagtctgcattaaaagaaaacctacccaaagtgtaactggactttaatcaatataaaacagtgattgtcgtttctcgttaaacgtaaaaagcaaaatggagttgtaaagagtttctttcccatttcaactccgacagccacgcgcgctttcagcggccggctacactgcgcggtcgcggggcccggcccaaagcccccgccctgcccggcgctgctgggagaggaagctccggggaccgagggcgggcaggcgggcagcctgggctccaccaggcccggccgggcgggggaaggggcacaggagactaccgggcgcgcttccggggactgcgcgggcggggtcgccgcttggggcgcggggcccgggctaacagtcaggtcaagggtcaggggccaggggaggctcggccacgagcagccggtggggcgcggccgca

SEQ ID NO: 90686 - DNA, 596 bp, Homo Sapiens
tggcttagaggctgcatctgtccatatccttctcactgcaagtgtcagaaatcctggctcaatctaacttagatgaggaggacatttattatctcacttaaagggaagactagaggtgatgcaggccccaaggtggttaatacagtggcttaactctgccaccaacagtaccatgccttcatggtgggttttatcctcaaactggtagtaagatggttacagaagctccatgtcatatccagagaacactcagcgggaggagagacagagactagatcttcttgtgtctctgaggagtgaagaaatttttcttggaagccctctggctgaattcactaatgtggtagaagaatgggtcacaactgtattcctaaatccatcactggcaagggggtataggagtctcatgagtagatgagactgagcaggagatccccctggagctgaaggtgggagagaaaggtggatacaaaagtgatcaaaaagtaggaccaaatgacagaatgggaaaagatgcttgcagtgtctaaaactgactaatatctagaatacacaaggaattcctacaaatcaggaaaaagacagcaaccccatag

SEQ ID NO: 90687 - DNA, 1033 bp, Homo Sapiens
  misc_feature (906)..(945): n is a, c, g, or t
tttaatgtttttgcttaacacatttccatttattatttttaataaagagtttaagatcccattttttaaaaagtacaatacagttgattttttaaaatgaggttctacaaacacttttggacagtctaacatacatataagctgtccctttcaactaggatatggggaaaagaagtcaacccagtgtttccactttccatgaaggacttctcaagggcaaggtaataagcaggaataaagcttccaaaaacctggaaggactctttcaggtggactaataagcatcatcatcacctgccttaaactacagtaaagccaagattgttaataatatagttccttgcttttagctagtatagaaaataaaattgaatcacattgttgatggtaattttacttttgaaactcaagtcacagaactgactgtgggccacttaatccacttcagacattgaaaaccacaccgcgaagtgctcgtaatgaagaaatatctatgacacagatcatgaaacatgagagagaacaaggtaagggggaaaaagctgagatgaaaaaatcttcaatcgcaggctctcttcaccacttcatcttgaatgcactgaagtgttccatcctctgctcttattgtgaaagtctcacctggattaacttgaacgagaataacctgctgagctgcatctccattcaccaagtggggcatcatggctacctctccgttcagcaatggtggcagttccagagggatttggtcggtcatcatcattgtgacgtacatttggagaacttccctcaactggcttccttccctagggctgaaaccggggctctgggcgcgccacacaccgggtcgcccacgccttcccagccggcagcctggaggatcctgccgcccccttcgctgctccnnnnnnnnnnnnnnnnnnnnnnnnnnnnnnnnnnnnnnnnacgcgtgggtcgacgatatcccgggaattccgaccgtaccagcctgctttttgtacccactgttctatagtacatgccccatttctct

SEQ ID NO: 90688 - DNA, 321 bp, Homo Sapiens
ggaactgcaagaatatgaaatgtaaatctttattgatttatatccttccttaccttttttgacatggaaaatgccaaagacactggtcaagttttactctcagctccctacctccagtgagggggcctcttattaggaatgaaatatccaagagatgggcggtgctgcaggggagaccaaaactcagaggaggcattcaaacacttctagcaggttgtctactccatccaactcaaaacctattcaatatgaaggccgagggaatgtgctcacaactccctattaagggaaatcaatataaacccgcccccaccaaccaaa

SEQ ID NO: 90689 - DNA, 567 bp, Homo Sapiens
cggcggctggcgaacgtgtcggccgtcatggacagcttcttgaccatgatggtgccggggcggctacacgtcaagcaccgcctggtgtctgatgtcagtgccaccaagatcccgcacatctggctcatgctgagcaccaagatgcctgtcgtgtttgaccgaaaggcgtcggcggctcaccaggactgggcccggctgcgctggttcgtcaccatccagccagccacatcggagcagtatgagttgcgcttcaggctgctggacccgcggacacagcaggagtgcgcccagtgtggcgttatccccggtggctgcctgcaccttcgacgtccgaaacctgctgcccaaccgatcctataagttcaccatcaagagggccgagacctccacgctggtgtacgagccctggagggacagcctcaccctgcacaccaagccggagcccctggaggggcccgccctcagccactctgtctgagagatgattttctaatatttatccactaataaagaagagtgtaaatgcacatatggaattaaagaagcaaacctatttatgttttaaaa

SEQ ID NO: 90690 - DNA, 727 bp, Homo Sapiens
agaaggaggaatatttggtccctggtcagtttctgctttgggaacagattgaccccaaacatctgacataacctacgtaagtgacagtgttggcttagaataaagaaacaaagactatcatggcatttttttaataaagcaagtgttacagtgacctgttttggggactgccagagattaggtggcagttgccttctagatctagccacaggagaaaaaattaaagagccatatgactgtgaggcagatcctcatcagggaggaggcgcagtgtctttttaaccactttgaagaccaacagccaagacatcttgagctagttgtggtggacagagagttccaaacacctcagccaccaggaaaagggagtggccaggaagaggctgcaggctcaagggcagggattctcccacccacctaaggaacctactgagcatcgaaccactccaacttgccttgggaggaggacttgaatgctaccaaagactgctcggacaaggcctgcaaggcaggactacttttgtgagaatttgaagaccatgccgacctgtcatttaaagacacccatctctgcctgagctgtcagatttgccaagttctgggttgtctcataattatttactcagtacaaaataataccagccatgatcctcagtggtaagtagcagaaatcaactgtatttgtttgctaaggctgtgctaataaagtgctgtaaaccatgtgaaa

SEQ ID NO: 90691 - DNA, 468 bp, Homo Sapiens
atatttgattggaaaagaactctctggtattattaagactcacacagaatcagggacagggcccccaaaggagtttgctgtaaaataggcagtagagttgtggcacgggcccaaccctgcattcaagtgtaacagcattctgtcagggtcactttgaattgtgtacataagaaaaccaatacaaaaaacaatttgtattcaatattgtcacatttctctctggtagaaaaatcaaataccttagagattatgaagtcattaatttatactgaaattggattgacttactacctaacactgagcgctgtttttaaatgaaaagaatgagatttataaccacttgagtgttattgcagtgatatttgaactcatttgaatatattcagtatcatttaatgtctgaattcagaaaaaaatgccgaaatttttattcagatggtccataaattaaattgcatattcattact

SEQ ID NO: 90692 - DNA, 325 bp, Homo Sapiens
ataataagatattcaggataagtatagatttagaacttaaagatgttaaatcatgttaaaattattccaaataccaatatcaaagaaaactaaggttgggaaatctatctcagaaaatatatgaacttaagaaggaaaatagtatttatgatttgtagaattggttcaacttttgacttaatactgactttggactgaattcaaagttttcttgaaatttcacatctggactttttaaagtgtctacatttatattactttggggatcattttgtcaaagtcttgaataaagttacccagtcctggcatgataaacccaaaaaaa

SEQ ID NO: 90693 - DNA, 501 bp, Homo Sapiens
gcacgccgatgacgtcgccggcctcgtccagctccatgtcgccctccgtcgccaggatgcgctgcacggtctgcaggacgttggttgccatggtaacatcgccgcagacaaacatgtggccccgctcgaggcacagcacgcggtgcacctccgcagccagctccgtcctcaggatgtcctgcacgtaggttaccattgcgccctcagcgtctcacaccttggggttgtcaggttcccgggagaaggcggtgaggactcggccaaacaccccgcgctgctgggcgttctgcacctcgtcgcggtagagatggtcaagttgggagcatcggcagccgaacaccaaagtcatgggagtggctgcagccctgcaagcaaccccgcgcttgggaaggctcttctccggggcacagtgctagtgggcctccccacaggccaccgtcgcccagcctggcagcccagcgttttgggctgaaaccaccattactttggctgtttcatctc

SEQ ID NO: 90694 - DNA, 392 bp, Homo Sapiens
ctctagagatcccttggaggcaggacactgtgggaggcagtgtgtgcagtggtggctgagtggtcgtgggaggcacgggagggccgtggttggtgtgccccgctggagagcgcgagtcctcccctctctccctatcttcaggttaccattgcgccctcagtgtctcacaccttggggttgtcaggttcccgggagaaggcggtgaggactcggccaaacaacccgtgctgctgggcgttctgcacctcgtcgcggtagagatggtcaagttgggagcatcgggaggctgaacaccaaagtcatgggagtgggctgaagccctttggtctcaatgtcatgcaggcgctcctgccagaatacccggaagggggccaattgccagtgttctgggc

SEQ ID NO: 90695 - DNA, 1407 bp, Homo Sapiens
  misc_feature (1244)..(1244): n is a, c, g, or t
  misc_feature (1274)..(1274): n is a, c, g, or t
  misc_feature (1344)..(1344): n is a, c, g, or t
  misc_feature (1381)..(1381): n is a, c, g, or t
tctgactactaaccccttcagtcgcaaaaaagaggctggtaccggtccggaattcccgggatgactccgagagccctgggctgaggtgcgaggggcgagggtggccgatccgaagatcctaatccaccacgaactctgacttgatgtcagggttgacttctggcttccacacggagtcctcgaagtcgaggcccaagccggaggcctcgctggggctgccgccgcccccgctgctactgctgtcgctgcggccggccttgcggctgggtgaccagtggtacggaccccgcgcgtcccgccgggcctttctacggagccgtttctgctgcagaagcagctgcagccgttccaccttgcagcgcgtggcgcggttttctgtctgccgaagccggtcccccgggggcttgcacatgcggatctggctctggccctgcagcagggaggctgagggggcagccgtgagcttctcgcaggaggtagttctgggggccaggtcgggggccggtgaggccggggagcactgggcgtggcagcggagctgggccagcgaagggggcatgccctggtagtgccgggtggcgctcaggaggtcgtttcaagatctgcaagatggtgcccgatgtcacccccgcggcccgtcctaaagcattccctctagggggccccaagctttacgcggtaccccacacttttcttgtacaacagtaggtcccctataagccgaggtcacaatcaataagccttaggcaccctgggccccacgtcttctaccaacccccctgaaccgtggaaaaacctgcctcaactttggggcaacctttttgcggaaaccaaacccatacctttctctccgttgttggccctaaatttgtccaacaacttttcccttaacggaaatatttctcaagggtttccaaacggcgctaatctagtcaaaaattcttttaaacatgctactacactgtaggtcttataacattcagctctggacataatagcctctgtgctccccttcctaacgaatattttttcccctacacacctcgaacgtttcagacttcttattatacaacaactattctgaataacccactcgtcgcatcctatatcagcgacttctcttaacatttctttacttgtctcgagaatttttttcccaaggtatataaaaaaattctctccccagttgtagcacgaccactagatttcctcagcaccccgtgcctttataaaataccacttcngcacaaaggatggaatcatttcctacctangttaatttcctcactaaaatctgaccgcgtcgcggaccgtcatacaggtcttggctgctacgcggggccnccgtaggggcgccggtaatcaatacgccccactccgnccatcctacttttataataacaccaa

SEQ ID NO: 90696 - DNA, 555 bp, Homo Sapiens
aggaggcttatggggagcaaaggaaattcaagaatctaaatgatgactcttttcaactcctcccacctatgaatacagatcttaggctaataaatacagacaccccacctacgtcttaggcaatcatcaaggcaaggttaaagaaagtttccctgtctctcgccacttctacacttagccttaggctccatacttttagtggtttatttatctacctcaaggtctccatctgtcatcttttaaatcacttttattctagctaaaaatgttggaggataggaaggacactgggtatttattctaactattttgggggacagaaaggttaaagtaacagaatcagataaactggtgaacatcttagttgtaaagaaaagggggcgctattataagaaaacactgttctatctctgaactttaggttttctaagggagactgctctgtagtttggctagtacattgatgggttttagatgggcaaacctgggctcagagaaggatctaggaagagttgaactgagttattcagcataaaagtatgaaaagagttgaaa

SEQ ID NO: 90697 - DNA, 574 bp, Homo Sapiens
tcacagcagccctctaattccaccaaacccactggattaacaaaaacctgaaagtaaaatagcacaaaatgatatccctgcatgagctactattatactttgcaacctacaattacacgggttcaatctaaatgccccaaaacattatttcattaattcaagccatttcagaactggtaaatattttcttttcttgggttttttattattactctgtttcagcaaaaaaattatgaggcaggcaaaggccacctgaacgagcgtagtgtggagccaactgcacagagtcaagatgacaggaaagggaggggctggcacaaggatgggaaccagagtggacaaagtccatttggagggaaaaagagaaacaatgagcagaaagagagaaagagatcaaagaggaggaccagtggcgatcaaggtggagctctcaggctggtagattgaggtcatctattgcccgtggctggtgccagttatcccgacagcagggtctggcacagctgtgtgccgtggacattgggcatgcacagaagctggggactcacagcggattgaaagccccatgttggag

SEQ ID NO: 90698 - DNA, 606 bp, Homo Sapiens
  misc_feature (76)..(76): n is a, c, g, or t
ccagaccgtcttccttataactaagtcatacttcgacattctgcaatactttctctcctctcagcacaactaccgnagactgtatcacggggacgtgtgagtttttatagaaaaaacaaggtacatgtacattcaaaaactcccacttgtcatgtataggagtctgctgggttgtttgcacagcctgatatgagcacataataaaagtccgtcattccccaaccccctccccctacacacacagcttattttgggaaactgccccttccctgtgtgatttgggaagagaaagtgataggaatcaagttgtcctctggcagcctcctggagagatggctgtgagctcttgctgcttaaacctctagtgccaccctcatttctgacctactgaatgctcagctgtttggcatttcctttgaatgacccagcatcttcccttttgttgtcggaaatcagaatcagtctctattgcttgtaacttaagaatctggatattctgtttattatattcttaaatggttatttggaaaatgtgctcatttataaaagttacagtgtctttttaaagtttgctgaagtaaatgaagcatatcagtcaagtaaaaa

SEQ ID NO: 90699 - DNA, 728 bp, Homo Sapiens
  misc_feature (368)..(383): n is a, c, g, or t
tttggctcatgcatgctttattcctctgaagagcttttataccaagtgaaaggaaataattgcatttccctgaaaattcacaggaaaaagttatgtttttctcttcattcaagtgattctgttagacccaaccacatgcaacaattttaaagttgcttccaaatatatttacaaatatttcctgtcttcaaggaacaatggcaagaccatgactcaggttcacatccggattccaccactaaccatgtacccaattacttcagtcaccttcattcaggtcttacatatcacagaataaaatcagatttcatcagaggaggtgaagacagggagaggagatatttcaatcccttctccgcaacccccgnnnnnnnnnnnnnnnnaacaaggatcctagagttactgaatgatagcacgtttgagggggaaagaccctaaggatgatctttataagccatcacttggtgttggtggtgataagagactcgagtatctttatgcagtggaaagagaagattggactcggaatcagaagcttgagttcaagcactggtttcatcagtcttgtgatcttgggttggtcacttaacctcttcaagggtcctcagcaaagagatggtatgcattgctcccagaagctaaatatcttcaggctttcaatggtggccttcacctgaaaatgttatccctgttgaagctttcaagccagtattttcataagaactata

SEQ ID NO: 90700 - DNA, 615 bp, Homo Sapiens
ggtgtcattgtgactctgtggattattgaccgcatggggcgcaaaaagaccatgggccctgtgcttgctcatcttctccttctgcagcctcctgctgtttatctgtgttggaagagatgtgctcactctgttactcttcattgcaagagcgtttatttatggaggctttcaaccggcatatgtttacacacctgaggtctaccccacggcaacgcgggccctcggcctgggcacctgcagcggcatggcaagagtgggtgctctcatcactccgttcatcgcccaggtgatgctggaatcctctgtgtacctgactctggcagtttacagtggctgctgcctcctggctgccctggcctcctgctttttgcccattgagaccaaaggccgaggactgcaggagtccagccaccgggagtggggccaggagatggtcggccaaggaatgcacggtgcaggtgttaccaggtcgaactctggctctcaggaatagtgaccgatgggggactgagctggtctttgaggctgcagagcttggggggctggcaggccccaactggggcactgattgtcactgccgacatcaagaactcacccaagagtatgacctaaaaa

SEQ ID NO: 90701 - DNA, 540 bp, Homo Sapiens
gagccaccaattgcgccttggagaacacttcagctacaggggcgtcacctacagcctcaccaccaactgctgcaccggccgcctgtgtaacagagccccgagcagccagacagtgggggccaccaccagcctggcactggggctgggtatgctgcttcctccacgtttgctgtgaccaacagggaggacagggcctgggactgttctcccagatccgccactccccatgtccccatgtccttcccccactaaatggccagagaggccctggacaacctcttgcggccctggcttcatcccttctaaggctgtccaccaggagcccggtgctaggggaagcatccccaggcctgactgagcggcaggggagcacggcccgtgggtttgattgtattactctgttccactggttctaagacgcagagcttctcacatctcaatcaggatgcttctctccattggtagcactttagagtccatgaaatatggtaaaaaatatatatatatcataataaatgacagctgatgttcatggaaaaa

SEQ ID NO: 90702 - DNA, 479 bp, Homo Sapiens
tttctcatagataattcttaacagaataaaagctacaggttgaaaccaatttccctttaaaatgtggacagttgaccatctccatgataggtagttaggcactgaattaatgctttttaatggaagagccaccctaagattcctggagtgtggtataatggagtactaaatcagcataggactaataactgcctcccgtgtaaactggtctatccggagagtggtatagcctctcatacagtgttcaaaggcagatttaactcactgcaggtccacagcaaccgataagataaactcgttggttatggtctcccactttgcaaaggagagcacagaggaagaggaaactgagataacttggtttaggaccccacagctggctggagctgggctgaacattagttcattgtttcttcgattaatctatgctgctttttctctacttggctccttttctaaattaaacaaaacaaaacaaa

SEQ ID NO: 90703 - DNA, 548 bp, Homo Sapiens
cgatgaagatctgactgaatgctgagtgtggactagcttgagagtaagaaactcctggggatcacattcttagggaatcccgcacactttgatgactctcacctctagggatcccatcaggttcttacggtaaggaactaagaaaaagcaccttttgtctttgtcagggatggggaaaagtaaccatctgaaatatgcctagagaattctctatacataagcctcttccaaggagaaaacactttaccagtcaaatatttatctcaccaaggagaaagaattcttactgaattccaggcctctctaacctttctgtccacattacatagaagaaataaaactgtgatggttaattttataatatgtgccaatttaatacactaagaaagacacagcccagggatacaggcccacttaagaccagctgtaattgtaagattatagaatgttttccctccccaactttttaacaccacatcaacaggactccagtataataagtgaattatagctgagagagctggaaagcacatgctgcaacttacaaa

SEQ ID NO: 90704 - DNA, 872 bp, Homo Sapiens
ggggcctcggtgatgtcgtgggttcaagcagcctccttgatccagggccctggagacaaaggggacgtgtttgacgaagaagcagacgagtcgctcctggcgcagcgggaatggcagagtaacatgcaaagacgagtcaaagaaggttatagagatggaatagatgctggcaaagcagttactcttcaacagggcttcaatcaaggttataagaaaggtgcagaagtcattttaaactatggacgactccgaggaacattgagtgctttgctctcctggtgtcaccttcataataataattcaactttgatcaataaaataaacaatcttctggatgcagttggccagtgtgaagagtatgtgctcaaacagtctgaaatcaatcactccaccgtcccatgttgtagatttattggactccattgaggatatggacctttgtcatgtagttccagctgagaaaaagattgatgaagctaaagatgaaagactctgtgaaaataatgctgagtttaacaaaaactgtagcaagagccatagtgggatagattgttcatatgtagaatgttgtagaacacaggagcatgcacattcagaaaacccaagccccacatggattttggaacagacagccagtttagttaaacagctgggcctatcagtagatgtattacaacacctcaaacaactataaaattacccttcccttttctaatgaaaataatgttcagaacatttggtttcctaacaatcgaaatttgtactggtttctgcatcaaacacctcaactgtagggttaccctttatggaagtttgaaattaacactatcgtcttcaaaattaacactattaaatgaaaaataagccttaaa

SEQ ID NO: 90705 - DNA, 367 bp, Homo Sapiens
gaccctctctggatttcagtcctggtctggaaaactggacaacacataactgcttcatttggctactgtgagaactgagtgagctctgctatgtgtaagggaaaccagcaatcatcctcataaacatcaaacttgggcccaaagccagcaagggagaaagagtctccagatggggagggaagaggccagacctcatggcctcaagtcctctcttctgagtcctttcttccccttggtggtggtagtggggatatttttcatgaattaccacttggaggacctggcttgatttattatacagggagccgatagttttcctaacacaagtggtcagaggtacagcagttctgcttggccgagctgttga

SEQ ID NO: 90706 - DNA, 549 bp, Homo Sapiens
aacgtttcactttaaccctgactggggagcaatatgttctgtgaaaatatcttgaaattgtacaccaaaaccttacaaccaacttatttgaacatttattacacacagggtttacgtaagacttttcttattggtatataattaatttcctttggtctcccttatccacattggcttattctggaggaaaagcagtgatctgtaaaacaaatcaagaatatattaaatctagaggaatgcagagaagaaaactataaaacagaaccaaaaacttgttgcacagcctacataattaagagatcaactggctggaagcagatcaaggcctaacttcattcaagacctaaatattatgagactcagttattcggttttatgtgacgtctcttccattcaccatgcacaggcttttccagctatctatataatgtttgcaaatatttgataaagatgatgttaccctatcttcctccatctgattcctggaatgcttgaagaaaggggaaatcttgagtaacctcattaaaattaatgaatggtggacctctc

SEQ ID NO: 90707 - DNA, 1310 bp, Homo Sapiens
ctttctttcttagctgttagctgagaggaagtctctgaacaggcggcagcggctcttatagtgcaaccatggcagactattcaacagtgcctcccccctcttctggctcagctggtggcggtggtggcggcggtggtggtggaggagttaacgacgctttcaaagatgcactgcagagagcccggcagattgcagcaaaaattggaggtgatgcagggacatcactgaattcaaatgactatggttatgggggacaaaaaagacctttagaagatggagatcaaccagatgctaagaaagttgctcctcaaaatgactcttttggaacacagttaccaccgatgcatcagcagcaaagatctgtaatgacagaagaatacaaagttccagatggaatggttggattcataattggcagaggaggtgaacagatctcacgcatacaacaggaatctggatgcaaaatacagatagctcctgacagtggtggccttccagaaaggtcctgtatgttaactggaacacctgaatctgtccagtcagcaaaacggttactggaccagattgttgaaaaaggaagaccagctcctggcttccatcatggcgatggaccgggaaatgcagttcaagaaatcatgattccagctagcaaggcaggattagtcattggaaaagggggagaaactattaaacagcttcaggaacgggctggagttaaaatggttatgattcaagacgggccgcagaacactggtgctgacaaacctcttaggattacaggagacccatataaagttcaacaagccaaggaaatggtgttagagttaattcgtgatcaaggcggtttcagagaagttcggaatgagtatgggtcaagaataggaggaaatgaagggatagatgtccccattccaagatttgctgttggcattgtaataggaagaaatggagagatgatcaaaaaaatacaaaattgatgctggtgttcgcattcagtttaagccagatgatgggacaacacccgaaaggatagcacaaataacaggacctccagaccgatgtcaacatgctgcagaaattattacagaaccttcttcgaagtgttcaggctggtaatcctggtggacctgggacctggtggtcgaggaaaaaggtaaaggtcaaggcaactggaacatgggaacacctggtggactacagggattttaattttattgtgccaactgggaaaactggatttaatataaggaaagggaggtgaaacctttaaaagccttaagccaccaactgtggtgccaaaatagaaactt

SEQ ID NO: 90708 - DNA, 605 bp, Homo Sapiens
taggtacatctactatacttattctctcaaacctgggtaatagtttctcagtgttcaggttaccttgagaaaggccatgcttagcgaactggatttctcctttgagaaattttagtatggtttgaggaaatcaagtgataaaggagtatgctgaatatgcaatcatttacttctactgagtgctgcattttaagatgctagatgagaagagtagttggttttgcttcattatgttttatgtctttgagagagatacaggtcttggaattcactttttaaatgttacgttccaaccttatatgttccaaggtgcagtgcactgtgaatcttttatttttaaaaaaatttgtaggtgcttttatgtataactttaatgatttataagatgctaaatgaattgtttttgtacctaaccattgtaatccaaaagataagggtgtggtttacatgcttttcaaaaatttttgttaagaagtagcaaatgaatggtttaggatttcaaatagtgataccctcctgagacatgagcatttggagaggcctgagaacctaatagaactcatatagtgtgagtgaaatttgattaaagatgttggaaaatgaaa

SEQ ID NO: 90709 - DNA, 530 bp, Homo Sapiens
  misc_feature (123)..(123): n is a, c, g, or t
tgagaaacttctgattatagactcctcagtgtcttctgtataacttcaatctcttctatgcaacagttaacagaatctaggtgtttgtttttctcctatttattgacctttccctttagaacntaagctccccacgagcacgatcctagcgtacatatctgcctacctaggtggttcaccattgagcacatatttattgaagtcccatgtgccggccattttcccacgtactgtggataaatgataagacaagtcccagttgtcatactctattgggggtaggagggagaggagacacaattaccagtgaaatacataaaataatacaaaacaatgtcagatagtggtaagtgcattgtcgagaattaaaactgagcaaatatctgtgttagttccggtcgtcaagaaaggccgttcagaactgacatttaagctgaagtgtgatgacaagaagaaatgagccatgagaggaagagcattccagaatggcagagttcgtgcaatggaggaattgaattggtacttttaaa

SEQ ID NO: 90710 - DNA, 346 bp, Homo Sapiens
tctccttcagagcccccagaaagaaccaaacctgtggacaccttgatttttagcccctagaactaggagtatgacaactgggacttgtcttatcatttatccacagtacgtgggaaaatggccggcacatgggacttcaataagtatgtgctcaatggtgaaccacctagtgctttatattttacaaatgtctgcagcagttttttgtcatctttatggaaaacaaggcacgtcttaaagtcgttcaagtccttcactttttcacactgaggtctgtcttcatatccacttatctttcaagtctatgaaaccccttataaaaactttcctttgaaatattttaaaa

SEQ ID NO: 90711 - DNA, 938 bp, Homo Sapiens
cagtcgacggtaccggacatatgcccgggaattcggccattacggccgggagatggacttgacaaaaggaccttaatttataataccatcctttgacaaatgtctctgataactaagtttttgctaaataacatttaagattaccaaaataacaatactcctggagtttcttaagaaatttaaaataggttgatctttgagacagctgctgcagtctagttctgataaaaggtaagggaagtcatgctaaatgcttctctgtcttcatagactttgattttagcatcctgtcttccattaagtttccctacttttttctggttcttgagtcaagatttcctctattaaagttttgcttctaatgattaggattacccatgatttaggccactaccaaattaaggaatcaattgccagtctagtcgtctcaaatcctatttggaacaaggtgggatataaaattttaaatgctaccatatctggtatcttctttccttaaataagggtttcccctctacatatgttataaactattctataattcctgttacatcatgtgttaacttgctgtgatttcatgttgaattaatacaaaactaactaatattaatttttcatgggaggtaagttttgtcagcttactgtttattattgtgtctgactcttaagtttagatctttatgagaattatgaacatgattaaatgttaaaaaattaagtatttgatttctaccctttgtttcctgccctccttttttcttcttttcttagtttgactatccaaagcatacacacactcacattcactctttattattagttaatagttatttggtcccttttctccttgatgtgaaatagtcacagctaatatttagttttatttttgctatttttaattcagttaaaactaatattgatgcaaccaaaactaaaaa

SEQ ID NO: 90712 - DNA, 578 bp, Homo Sapiens
gcgcgcctcgaggccgagtcaaggtgtgagatgcacaatgcgaaacctaggccccagcttttacaccatgatgcgcagggttgtactttttgtactgaactgataggtggcctagtggttatgccctgtactaccattttgaggatctggactccgtttcctgccttgctctttggaccacattgtcaattcacaccgaaactatgttccaacttcctgtcaacaatcttggcagtttaagaaaagcccggaaaactgtgaaaaaaatacttagtgacattgggttggaatactgtaaagaacatatagaagattttaaacaatttgaacctaatgacttttatttgaaaaacactacatgggaggatgtaggactgtgggacccatcacttacgaaaaaccaggactatcggacaaaacctttctgctgcagcgcttgtccattgtcctcaaaattcttctctgcctacaaaagtcatgtccgcaatgtccatagtgaagactgtgaaaataggattctgcttaattgcccctactgtaccttcaatgcagacagaaagacttgggaacacagcata

SEQ ID NO: 90713 - DNA, 414 bp, Homo Sapiens
tttctttctctgtttcttcccttccgcccatccaggggctggatcttgacatggaccgtatgcctccagaattctctccccggtcaaggctgaaatttactcctggctacactcactcacgtttactcatgctcacgcactagaaattaactgcaagattggctgaagttcatttgtaacctggtcaggcccaggatggcactggccccttcaccaaagggaacaataattcaagataagctgttggagtggattgcaccactgacccctcctagcccccttcctctccattccaaacccctctctctttaaaaacccctgcattccccccacaaattgaagggtggaaatttttggaaagaatctcacccactccttcccttattagcatggataataaaatctccttatcac

SEQ ID NO: 90714 - DNA, 248 bp, Homo Sapiens
gactcccagccagtgggagatgacttgtattctaaccacttgttcttaccactttcatgtaggttttgataaaggttttggacctgctttctatatgcctgtatctaaaatttctccatgtgtatttgggggtttcacagaacttcatttatgtggttgacatgaagcagttttcaaaatcaaatattgtaccaactaataaaaatttaatgaaaaatagtaattaaagctatttgatttataagaaa

SEQ ID NO: 90715 - DNA, 243 bp, Homo Sapiens
cagggcaggcgacctaatgtaggaaacttaataaaccctggcattgatataatgatctgtcaggttttcatttgaacagttctccaacattctctgaactgccaaataaactgaatctaagccctattttttcttatgctaaagtgtgaatgattctggactatcttactgggaaaacatttcctaacaatgtttttaaaagtcataaggtcaaaactgcagttataagaaagaagggtgaat

SEQ ID NO: 90716 - DNA, 1041 bp, Homo Sapiens
  misc_feature (785)..(786): n is a, c, g, or t
  misc_feature (791)..(791): n is a, c, g, or t
  misc_feature (883)..(884): n is a, c, g, or t
  misc_feature (896)..(896): n is a, c, g, or t
tgcggccgccaacccgtcccagccgtggtgaggagcttggtggggctgagggggacaccagcagccctgaccctgccggcaggagccgacctcgctacacaagagatagcaaggcctactcgatgatactgctgcctgccgaggaggaggcaacgctgggtgccagacccgacaagcggcggcccctggagcggggagaaacagaactggctccatcctttgaacagcgggtacaagtaatgctgcagaggataggcgtcagccgaggcagcgggggtgccgaaggcaagaggaagcaaagcaaagatggcgagatcaagaaagctggctcagatggtgacattatggacagttccacggaggcccctcccatctcgatcaagtcccgcacccactctgtgtctgctgacccttcctgcagacctggcccagggagccaggggcctgagtctgccacctggaagacactggggcagcagttgaatgcggagctcaggagccgtggttggggccaacaggatggtccaggccctccctcccctggtcaaagcccaagtccctgcagaaccagcccctccccagacagcctgggcctcccagaggacccttgcttgggccccagaaatgaagaacggcccctgaggctgcagcgctcccccgtcctcaaacgcaggccaaaactcgaggcacctccatccccaagcctaggatctggccttggaaccgagcctctgcccccacagcccacagagccctccagccctgaagcggaagcccaacccctnnccccnagccacagaccaaagaggcggcggccccaatccctgatcctctcctctcctgccgcatgagattattttattaaaaaactcaaaggggaggnngaggagagaaanaagaccatgtccggccgccttcgggccctcggagaagctttccttaaaccattccgtttgggcgccgcgggccccagtaggggtaagggaaacctggcccatagcctggttttcctaagggagaacctgggcgccgtggactaaa

SEQ ID NO: 90717 - DNA, 1207 bp, Homo Sapiens
cagtcgacggtaccggacatatgcccgggaattcggccattacggccggggggggctctgggtgtggcggttgccgtagctgaaattggctgcaccatgtcggccttcgagaagcctcagatcatcgcccatatccagaagggcttcaactacacggtgtttgactgtaagtgggtgccctgcagcgccaaatttgtgaccatgggcaacttcgcacggggcaccggcgtcattcagctgtacgagatccagcacggggacctgaagctgcttcgggagattgaaaaggccaaacctattaaatgtggaacatttggtgcaacatctttacagcagagatatttagctactggagattttggtggaaaccttcatatatggaatttagaagctccagagatgccagtatattctgtaaagggccataaagaaattataaatgccatagatggcataggtggactaggaattggagaaggagcacctgaaattgtgactggcagccgagatggaactgtgaaggtgtgggacccaaggcaaaaagatgatcctgttgctaatatggaacctgtacaaggagaaaaccaagagagactgttggactgtggcatttggcaatgcttataatcaagaagaacgtgttgtttgtgctggctatgacaatggggatatcaaactatttgatctcagaaatatggcattacggtgggagacaaacatcaaaaatggggtgtgtagcttggagtttgacagaaaagacataagtatgaataagttagtagccacatctctggaaggaaagttccatgtttttgacatgagaacacagcatccaaccaaaggttttgcctctgtttcagaaaaggctcataaatctactgtgtggcaggtccgacacctgccgcagaacagggagctctttctgacagctggaggcgccggcggccttcacctctggaagtagtctaacatctccaccctgtgacgccttcccatagaaatggtacacaaaaggtccttaggcttgggtccgtgtaatggagctcgagggttagaagctggcatcagtttttcattctggaagtgtttagatgaagttctgcaaatgttacttacagccattgcctttgcacattgtttgcctgtgatatccagcaatctatatctggagaaaaattacaataaataaaagattgccaaaagcacc

SEQ ID NO: 90718 - DNA, 575 bp, Homo Sapiens
caaccccacctattccaaagggtttaacggaaggggcaaccgggcccttggcttgcggccggccaacgtgcaagcatgccaggaggccaagttctttgccatttctacctcccccttttccacctggggacctcctggcgcccacagtacacagaggcccttgagcagcccggctgcaggttccctatctactcagagttctccccctcacgtgcctatccccaaccctgcagtgtctgcggaccaaaggggaagggagcctcaggccaacccccaaggtacagccagaccagctcatccagcctggaagccaagcattctttactaaattcattgtttggatcttggaatgtgtctcccttagaaacaatgttataaatggtgatctgcttcccaggccagccacaaaagtctgttgaacccaaaatgcagctgtagggtggtgctgagaactgtgtcagctaccctgaaaaaggaggccactgatcagctttatttgtagaaaaaatatgtatatatcttctggttctttcttcttgggctataaacactataaattaaataagttaaagttc

SEQ ID NO: 90719 - DNA, 916 bp, Homo Sapiens
  misc_feature (452)..(482): n is a, c, g, or t
  misc_feature (795)..(809): n is a, c, g, or t
ggagctgagagcccctgagaggagggctttcccagccctgggaccctccgaggtgggtgtgcgggtctcacaggtgcttcctgggacttcctgtggctgcacagggcttggctttgtcttcgttcccggtggaaaaccgtgggagaggaagcttgggcctctactccaagtatcagagcctgttcaccctcctccctttggtagcttgtgaatgtgccaggtgtttcgaggtaggcttgccttctggcagcatggactttgttaaaataataggcggaaagaagaggcctgggaagggcccccagtcttttggaatgtcctggtcacagggtcatgtcagctgccagttctcgtctcccgtcctggagttgctcggtcttgcggagctgcccgcctgcctgttctggcggctccagcgcaggctgtccctgctgctttgatcccaggtgaannnnnnnnnnnnnnnnnnnnnnnnnnnnnnngagacggagtccttgctctggtgccccagccaggaatgcaatgggcgccttctccggttcacttgcaaccttcgggcttcaggcgattcctcctgccctcaaccttcctgaagaaacttgggaattacagggtgcattgccaccccaggccccccctggattttttgggatttttatagaagaaaaataggggtttcccccctggctgggtccagggctgggtccgtgaaacactcctggacctccatggatttgggcccgcgccttaaacctccccccaaggggggcgggaaatatataaggggggggaagnnnnnnnnnnnnnnnaggtgtggatttcccagggggaaatttcttttttcctctaaagggcgcccggccaagaggggtggggtctcctctggtgaagagggtgttcgaaaacggggtgtgct

SEQ ID NO: 90720 - DNA, 369 bp, Homo Sapiens
  misc_feature (57)..(106): n is a, c, g, or t
gggggcttggtgaaaatttgctctaggtcccagacttggcaaatgatacaagatttnnnnnnnnnnnnnnnnnnnnnnnnnnnnnnnnnnnnnnnnnnnnnnnnnnaaattggaattactatcctaggcaaactggaatttattcttcaaaattgttgaagttatctcctcagtgggattcaattagctaaagatgagagattttcagctgggagcagctttggagcagcagatacactgggtactgtccctaggctgatgactgtcacatttttagtggggccaaaactttcctccaagattcaaatgtgtgtcaccaactagagagcaggcttggaatttaaaaataaagttttcagtaagttgaaa

SEQ ID NO: 90721 - DNA, 510 bp, Homo Sapiens
tttaggttcttggccaagtatacggcacaattttatttgtgaactggacccagtctggggagtcaaatcaccacatgttgggcaaaggcatatgtcacaataacactgtggaaaggtccagtgataagttccatcatcctgcccatgtcttgactccaggtaaaagattcatcattgtgcttgtaatttggtcccaggtatatggcacaatacaacctgcagattgtgttctgatagggaactcacagcctcacaggtctgctgaatcatggtttgagagtcaccaatccacctggaaaccagatccacatatgagagtaacaaatccaacttgcaactgtgtttatgtgtgagattaagtgccacattcataggctctgtttatgtgtaagaatgaagagcctgtaggctgggtctgcatatgagagtcacaatctcagctgttagctaggccctgttatcaactctctgtatcactgtaggtcttcccatgatagtcctgagtgttgt

SEQ ID NO: 90722 - DNA, 577 bp, Homo Sapiens
  misc_feature (525)..(525): n is a, c, g, or t
  misc_feature (531)..(531): n is a, c, g, or t
gcggccgccgcctctggccgccgccatcgccgcttcagacttcagaaccagcgtcgtcctcaaccacctggccgagaagtggtttccgggccagcgcgagcgggcccgggcggccggcaggctcggggagctactgcaccaggggcgctaccgggaggccctggccgccgcctgcgaggcgctgcgagcagaacccagtgacttgattgtaaaaatttacagagcggaatcatatgctggtctccaagagtttaaagcagccatagaagatttaaatgcagttctttttcaacttccagattggcctgaggtctacttcaggaaaggaaaagtactctgcgatgctggttttttaggtgatgccttacaactctttcttcagtgcttagcccttgatgaagattttgcacctgcaaagctgcaagtacaaaagattttatgtgatttattattacctgaaaacttaaaagaaggcctgaaggaatcttcctggagttcattaccatgtactaaaaacagaccttntgattntcattcagtgatggaagagtctcagtctctcaatgaacctagccca

SEQ ID NO: 90723 - DNA, 485 bp, Homo Sapiens
  misc_feature (35)..(35): n is a, c, g, or t
atgagagtgttctacccagttttcaataaaccttncaggctgcaataaccagcaaggttttcagttaaagccctatctgcactttttatttattagctgaaatgtaagcaggcatattcactcacttttctttgcctttcctgagagttttattaaaacttctcccttggttacctgttatcttttgcacttctaacatgtagccaataaatctatttgatagccatcaaaggaataaaaagctggccgtacaaattacatttcaaaacaaaccctaataaatccacatttccgcatggctcattcacctggaataatgccttttattgaatatgttcttatagggcaaaacactttcataagtagagttttttatgttttttgtcatatcggtaacatgcagctttttcctctcatagcattttctatagcgaatgtaatatgcctcttatcttcatgaaaaataaatattgcttttgaacaaa

SEQ ID NO: 90724 - DNA, 1093 bp, Homo Sapiens
taggagctgtagagaggggtagcagctccctggtcctcatggtcaggctatttcttgtccatcatcttctttgctgtcagagtgtttcagaggctgcagggctgtcttggagccttctccctccccatcctggtcctcagctcctgcattctcctcctcacagctctgtttgatctttctccagcacacgaaagccagggccaccagcagtgcaatgagacagacagacagccccacggtcacccacagggcctctgtgatggtgacagagacgtgcgcatcctgctgcaagcacggggttgcgcaccaggcagctgtaggtgccattcgcacccagcaccacccgcaggacgctgtgcacatcaaacaagccctgctcgttggccatctgcgacgtggtcacgttgccagtcaggggcacaccctgcccatcctgccagaacacctcagcctcagggtagccccggtagctggagcacgtgatggtcaccgtgtcccctggccgcaggtccttgttgggctccagggtcatgctgggcttcgagtagggagcggccacctgcaggctgacggcagcgctgccgaaatcccggatgctcacgaagcaggtgaagctgccctcgtccgccacacgcacgcgctgcagcctcagggatgcattgccttgtgccagcaggtccgggaagagggccgtgcggttggcataggcgctgccctggtcccggccttcggtgaaactgtgcaccagctgtttggtgtctgtcagctgccagatgaggttgagctgtgccaggctgaagccaggctcgggggagaaggagcagcgcagggtggcatcggtgcccactagggccaccaccgggtcctcagggacctggacctccacggctcctgtggggcttctctggggtgtgatggtgacagagctgtgcgcatcctgctgcagcacggggttgcgcaccaggcagctgtaggtgccatttgcacccagcaccacccgcagaatgctgtgcaccggacgcgtgggtcgacgatatcccgggaaatccggaccgtaccagcctgcttttattaccacggtttatattcacaa

SEQ ID NO: 90725 - DNA, 1476 bp, Homo Sapiens
  misc_feature (1150)..(1150): n is a, c, g, or t
ggctggcaggatgggcagggtgtgcccctgactggcaacgtgaccacgtcgcagatggccaacgagcagggcttgtttgatgtgcacagcgtcctgcgggtggtgctgggtgcgaatggcacctacagctgcctggtgcgcaaccccgtgctgcagcaggatgcgcacggctctgtcaccatcacagggcagcctatgacattccccccagaggccctgtgggtgaccgtggggctgtctgtctgtctcattgcactgctggtggccctggctttcgtgtgctggagaaagatcaaacagagctgtgaggaggagaatgcaggagctgaggaccaggatggggagggagaaggctccaagacagccctgcagcctctgaaacactctgacagcaaagaagatgatggacaagaaatagcctgaccatgaggaccagggagctgctacccctccctacagctcctaccctctggctgcaatggggctgcactgtgagccctgcccccaacagatgcatcctgctctgacaggtgggctccttctccaaaggatgcgatacacagaccactgtgcagccttatttctccaatggacatgattcccaagtcatcctgctgccttttttcttatagacacaatgaacagaccacccacaaccttagttctctaagtcatcctgcctgctgccttatttcacagtacatacatttcttagggacacagtatactgaccacatcaccaccctcttcttccagtgctgcgtggaccatctggctgccttttttctccaaaagatgcaatattcagactgactgaccccctgccttatttcaccaaagacacgatgcatagtcaccccggccttgtttctccaatggccgtgatacactagtgatcatgttcagccctgcttccacctgcatagaatcttttcttctcagacagggacagtgcggcctcaacatctcctggagtctagaagctgtttcctttcccctccttcctcctcttgctctagccttaatactggccttttccctccctgccccaagtgaagacagggcactctgcgcccaccacatgcacagctgtgcatggagacctgcaggtgcacgtgctggaacacgtgtggttcccccctggcccagncctcctctgcagtgcccctctcccctgcccatcctccccacggaaccctgtgctgctcacactgccttctccagggcgtctcgctgcactgcggcccccggcgcgcgctcacccttctgctccctctgcccttctccacctacttgggtctcctttcttctctcatgctctcccattcagcttgcatgtttactctggagccaacctacccacgactgtcacgccacctgctgctcccgcgtgcctggcgcggcccctgcgctgcgcacacgcactccacgctccctccccctccacggacctctcccattcccagccctggcgta

SEQ ID NO: 90726 - DNA, 1218 bp, Homo Sapiens
  misc_feature (882)..(898): n is a, c, g, or t
atttacagtaacttacaacaactgtacttttgttggattagcaaatcatgtgtttaaacaaatcccatatgttgggcaacagttcaaataagcacggagaagtgttgcccaaacttggttctctgactcttatgtatttgtaaggctgggcttcaaaatcaaaacaaaaaccccaaaaacagcaggcaaatgctttttaactctgacaccgttgccataaatccctgatactcaaagtctaacaagaaagacatggaaaattagcagcccattttcagaaagatcaaaatgatctagggttctaattgcttttgcatcctattcttacaaagtgatgtcccaacagggaacagtaggagctggagtgggatctccaagtcccagtttgagtgtgggatgtgcttccagcagtgccttccctttatgaaagacatcacatggcatccagggccaggcaggcagcttgaggtgcctttacgagaaaaccgagctggggctgggagaggacagttattgacactgatgtgcaatgaagtgacaagatgagagcagaatcgtaagagctttgaatttgaagtgagtttgggtccccccataagttatttattccttttttctgtgtaaatatatttattttactgtggagcgctaacatctggatcgtaacatgtgcagaatgtatggtaggaatgtattctcttgtaggaatgtaaatctgtattaaaagggggtccaagccaggcccccaggtcttctcattgtatgcacagtccgcattcatttttactcttctctaatatgggtctatttgaaatatgcaaaaggtatgaggaatgttttaatacctccaaatttttaagaaaagcatcaaagggttgatannnnnnnnnnnnnnnnnagtagcactttctctggatgacagaaggggcaaccacatgggcacccttgttcataccaaagggtgagcagtggccagagcctcctctgcacctctcgagtgtctttaccaattgagctttttatcgccatagccccttggagtgccccagctgccctgaggtcaatcaaggaaaatttcttaatgaaataagctccaaagagccaaagtatcaacttacagatcgtttttaaagcttaaatttatgaaccacctttgtggtaaacaatgaattatgaataccgcagggcagccttcttaaatgacaaatgtaaaaaaaa

SEQ ID NO: 90727 - DNA, 458 bp, Homo Sapiens
  misc_feature (239)..(239): n is a, c, g, or t
tcagaggggagaagccgtggctgtgatgggcaggaagtggtcaggacccactgccgagcaccaacttccccagccaccaccaggggtgcgcctggactcctggaaaggggtcgcgtcagggtgcagcccatcaaaggcttcccaagaggcaagaggcaaggagaagtgtcctactttaaacggccagcctcagtggtcggccctgttcactctgccacctccagagagagtgaacccangcagaggtgtgacgggaggctggggagagaccccagcaccttgagcacacaggagccaggaggagcccaacagagcagcaggggctggggtcttctcctgaagcctgactccatgggaccccaaagaagcagatggaaaactgaaaaagaaaacccctcaagtgagccactggaaagaaagcaaaacaagagaaaataaatgagttgtttgacataaaa

SEQ ID NO: 90728 - DNA, 811 bp, Homo Sapiens
  misc_feature (410)..(419): n is a, c, g, or t
gatttgccgcccattttgtccgtgtctgttatacttgatcggggttgcaccgcgcttgttgtttcagaatttttgctccgggttccttgagattcgagtaatcttaggaggattttctagtgccacacaccgaattcattggatttattggggggggtacattgaatctgtactcacttttgatagtacggtcatctgaacctattaggtctttccaaccaagtgccgccagatgtcttccagtttttgccttcttaatttctttgccagccagaagtttgtaggtgttccagataccagacttttgcctctttggttgtttattcctgagtattttctttatgatgctactgtacatagagactgtttccctaatttcccttggagattgttcaaccatggtgggttgnnnnnnnnnngaaacttttagaaatacatttaattcaattctataaatattagtcattcaaaatctggccacaatcttaggaatacaaaagtaaaatcccagttctttttttcctaaaatgtcacaatgtaatagatctaacattgcatatatttctgatgtgatgaaatgttgatatatattttctatcgtgcaaactacagctctaaaatttttcaaagatagtacatgtattatgttttctataatacttacaccatcattattgttttaccttttatatctcatattctattttaattatggaatggtattattacatatccctgataaaaatattaaaatgtgctatgggaaaattaagaaaagacatattaaataaaccttgttatgtagtaaaaa

SEQ ID NO: 90729 - DNA, 587 bp, Homo Sapiens
cccatcaaggcgctgtggctctgagaagcagccctggtcgccagtgctgccccagtcactgtcactactgctcccgcacggctgctcccaggggaggcaatagcccttcacctggtaggtggcattgaagccgtggccggcgctgcgggcgcgcgcgtggtaggccacggtgaggcggccctgggcggcctccaggctcacgggccggtggttgctgcggtaggacagcgtctgcagcaggcggtccccgcgctcgcccaggccctcgtatacctgcacgtagtcgtcatagcccagccgcagttccagctgcagcagcacccgccgggagtcctgtgtgtccaccagccacgtgcagtgaaggtctgagggcccgcgagcggcgccgaacaggtctggggaggcaaaggagccgtagaagctgcccagccgccggccgcacgccaggtcggggcagcccgcctggcgtggctgctgcggcccgggtgcaggcggcggctcccgaggcgtctttgtgcggtggcggtgcaggcccgtagggcgcgcgcggccacatcggccgcggcgtcacgggccatgagggggct

SEQ ID NO: 90730 - DNA, 1117 bp, Homo Sapiens
  misc_feature (24)..(24): n is a, c, g, or t
aaacggtctaggtacgaggctggngttgaattcggcaccgagggagaagcgcgcggtcgcggggctggagggcgcgccgggcgcccgggcgcagctggccgtcgtctgtctggtgaacatctttctcaccgggagactcagcagtgcggttcctgccttagcggcctgcagtgggaagctggagcagcacacagagcggcgtggggtcatctacagcccggcctggcccctcaactacccgccaggcaccaactgcagctggtacatccagggcgaccgtggtgacatgattaccatcagcttccgcaactttgacgtggaggagtcccaccagtgctccctggactggctcctgctgggcccagcagccccaccccgccaggaggccttccgcctctgtggctccgccatcccacctgccttcatctctgcccgcgaccatgtctggattttcttccactcagacgcctccagctccggccaggcccagggcttccgtctgtcttacatccgagggaagctgggccaggcatcctgccaggcagatgagttccgctgtgacaacggcaagtgcctgcccggcccgtggcagtgcaacacggtggacgagtgtggagacggctctgatgagggcaactgctcggcgcccgcctccgagcctccaggcagcctgtgccccggggggaccttcccatgcagcggggcgcgctccacgcgctgcctgcctgtggagcggcgctgtgaacggcttgcaggacttgcggcgacggctcggatgaggcgggctgcccgacctggcgtgcggacggcggtggggcagttctacggtcctttgcctccccagactgttcggcgccgtcgcgggcctcagaccttcactgcacgttggctgggtggacacacagggactcccggcgggtgctgtgcagttggaactgcggtgggtatgacgactacgtgcaggtataacgaggggcggggtgagccgcgggaccgctgtgcaaacgctgcacaacgggaaaacaacggccctgagcctgaggcgccaggccgcccacggggctacaagcggcgccaagcggccaccgtcaggccctacagggaagccaagcccctg

SEQ ID NO: 90731 - DNA, 932 bp, Homo Sapiens
gaccttgccgacatgattaccatcagcttccgcaactttgacgtggaggagtcccaccagtgctccctggactggctcctgctgggcccagcagccccaccccgcctggaggccgcccagggccgcctcactgtggcctaccacgcgcgcgcccgcagcgccggccacggcttcaatgccacctaccaggtgaagggctattgcctcccctgggagcagccgtgcgggagcagtagtgacagtgacgggggcagcctgggcgaccagggctgcttctcagagccacagcgctgtgatggctggtggcattgtgccagcggccgagacgagcagggctgccctgcctgcccgcccgaccagtacccctgcgagggtggcagtggtctgtgctacacgcctgccgaccgctgcaacaaccagaaaagctgtcccgacggcgccgacgagaagaactgcttctcctgccagcccggcaccttccactgcggtaccaacctgtgcatcttcgagacgtggcgctgtgacggccaagaagactgccaggacggcagcgatgagcatgggtgcctggccgccgtgccccgcaaagtcatcacggcgggcgctcattggcagcctggtgtgtggcctgctgctggtcatcaccgctgggctgcgccttcaagctctactcactgtcgcacggcaggaataccggggccttcgagaaccataatgaccccccgggaagctcaatttccgtgcccgcagggaggagacccccaatctccagcggcaggtccatctccccagagaccctccatccaccccgcggaaacggagtttctcacttcatacattttccgacccccgcccaatactattgtccgcacaatatcttacaaaacagcgaccttatagagacaaagcaatcacggacccgcacacacata

SEQ ID NO: 90732 - DNA, 453 bp, Homo Sapiens
tgttaaattcaaacaccctggggtttggtttttgctggtgggggtggagtggagttcctggagaagcaaagcagtcctaaatcaccgagttgatgggtcttttgggtgttcccaccagtccttactgatctctacaaaatcccaagttaccaagctcttcaacaaatagaagacagctgtcaaacaccatgggctacagatacaacgggcatattcagccatctttcagaagagtgataacaaatgacttaatttggaagattcactcaagatccaatttgattcatcgcggacatgcctgcacctaagttcctggggccaaagtgaggaggcagcagttctccacccaatcagaccatcatcctctttttgtaactagtatctttaacactccccttactatcctgaaaggtaatttgtggataatattacctaccaatacaaatttcaaaa

SEQ ID NO: 90733 - DNA, 319 bp, Homo Sapiens
acgtgtccgaagataagctccaggtcttatcgtatcccttgccatctgaacttgtttgcactgcttctgtttgaaagagcatcttgaaaaacttccccggtatgatgattgttggtaacaactttttctatagtcattgatggagtagatcatgatggaggggaaatcactggagatcaaatatgtaaaatcatttcaaatataaaatccagtttactcatggattttagctattttttcactgggtaaattatactacatttatttacaaatgagtttatgcattttcatggctcttaataaacatattgttttccct

SEQ ID NO: 90734 - DNA, 1656 bp, Homo Sapiens
  misc_feature (150)..(158): n is a, c, g, or t
  misc_feature (336)..(428): n is a, c, g, or t
  misc_feature (756)..(756): n is a, c, g, or t
  misc_feature (823)..(878): n is a, c, g, or t
accacaacgtcgtgaggaggggcggcgaaaccgcacggcaagaacgcagcaggttggccagaaagggcggcgcgaaatagcgaacgacaggcagcgggcgcacctgagaccgcggaaaggagcgggacgacatgcgccgcatagggtacnnnnnnnnncaaagggagacgggatcgaggccggaagagcgagcgggaaagggggggcggggcgggagaacagcgggacccgcgcacccggggggtagcggagggcaaggaaaggggagggggcgccgaccctaagggagggcgggacggggggacggacacatgggagtagggcagggacgcgtannnnnnnnnnnnnnnnnnnnnnnnnnnnnnnnnnnnnnnnnnnnnnnnnnnnnnnnnnnnnnnnnnnnnnnnnnnnnnnnnnnnnnnnnnnnncgccgacagaccagcgaaggggatatggggagggccgtctaggcgcgacgagtgctcgggggccgtcactaggcgtggggttccccgaggcatcatcgacccgtcccaagtgccacacctgcctgggctcgtgaccccgacaccaggcaccccagccaccgccatggaccgccttgcctaactccccaccgcgccccagcccttcagcagccgccacagcagctccccactctccccaggaaggtccaacacacttgacaaaaccaaccaacacgtcctcgtccgagcgggagcgagaccgggatcgaaagcgggaccgggatcgggnagcgggaaaagtccatcctcacgtccaccacgacggtggagcacgcacccatctggagacctggtannnnnnnnnnnnnnnnnnnnnnnnnnnnnnnnnnnnnnnnnnnnnnnnnnnnnnnncgccccgcctcccactcccatgcccaccagcactcgcccatctcccctcggacccaggatgccctccagcagagacccagtgtgcttcacaacacaggcatgaagggtatcatcaccgctgtggagcccagcacgcccacggtcctgaggtccacctccacctcctcacccgttcgcccggctgccacattcccacctgccacccactgcccactgggcggcaccctcgatggggtctaccctaccctcatggagcccgtcttgctgcccaaggaggccccccgggtcgcccggccagagcggccccgagcagacaccggccatgccttcctcgccaagcccccagcccgctccgggctggagcccgcctcctcccccagcaagggctcggagccccggcccctagtgcctcctgtctctggccacgccaccatcgcccgcacccctgcgaagaacctcgcacctcaccacgccagcccggacccgccggcgccacctgcctcggcctcggacccgcaccgggaaaagactcaaagtaaacccttttccatccaggaactggaactccgttctctgggttaccacggcagcagctacagccccgaaggggtggagcccgtcagccctgtgagctcacccagtctgacccacgacaaggggctccccaagcacctggaagagctcgacaagagccacctggagggggagctgcggcccaagcagccaggccccgtgaagcttggcggggaggccgcccacctcccacacctgcggccgc

SEQ ID NO: 90735 - DNA, 556 bp, Homo Sapiens
atgacaaggggtggctactctggcattttcaagtcttgaggttgctgttttccagggggtgatgtgcaggggcagacctgcctgacttggatatcagcttctccatgaaaatatgcagtgcctaaaatttacactgatcgatttgttcacgagaaaggacatttctaaaagagccaggagactgcccccagaaccaagaggagtactggagagcagaagatgaagaaaaacctttaaacagcagagcagtgaagtggagggagaggcggcccctctcctttgccagagactcccactcccagatgcaggctggagcgatccctcataatttaagctgacacccctcagcggagatgaaaggaacaccactcgctgctctccaacaacaaatgtcagcatccctggaggccgtttagacacaaacgcagcataaatctgactcctagtggggaagtccagagattaagtctccacacacagcctaccagagtgaaatgaatttgcttggcacaaagtttgaacatgtttctcagggcctttctttcccctttcttgt

SEQ ID NO: 90736 - DNA, 448 bp, Homo Sapiens
tttttacatacattttttttaattaaaaggggaggtgcacagcacaccttcctccactgggagaaagggggcccaattcccactcccccaaacacacacaagtacacactgactaaggcacagctagggctagggcgggggcgggcagaaggccccttgggaggacgtggcgccacacctgcaatgggtgtgggggtgtggagctcatcaccgctggaggtgcgtgggggcaggagaagaaaagcctcagggctccccaggaaataggagaagatggtcgggaaataggcagataacaaaaccaacaggaaacctagaaaagaattgagaggaaagaaacaaaagagagagtggaaaaagagaaacgggtgaaaacaggttgtgggcaacagaacaaaacaagaaggaaacagcagaggaaagggaagaacatacatcagagaactgg

SEQ ID NO: 90737 - DNA, 393 bp, Homo Sapiens
ccagtcttgggctggctccgagaagggcctaggctttgaagcgcttttaaattgtcctctggccctgggtggccagggaaggttcccgggggtgcagccaaatacacatcgcggcaaactgattaaccctgaaagtggcgccgaggcccggtctgtggctcttggtgttccccctccccctaaaccctcttgggggagccagacggccacccccaggggaggaggggcccggccgagcctcgccgcgacttttgcgagatagcgcggcgacatggccacacaatggagcccgcaggcgggagtgcggggcggggcgcggcgccctggccttgcgcgcttacggggtcctctccagggccctctggggcctctgacttaaaatagggaggactg

SEQ ID NO: 90738 - DNA, 615 bp, Homo Sapiens
tctttcaagaaaaaaagtcttattagagaaatcttcatatctcgtgaggatgaattaaaagcagaatctcaactttgctacctttaaatgtcacggagagaaaaaactgcaaaaccatgtgcaacaatatccatgataaatcatctttgatctcaacataacggagactataaggagtataaagactagaagaaagagtagaaggtgatccacaatcaattcagaacctggtcttctatggtggctcacagttcctgcaccctacaatatcgtgaattttcttcctcttcatctaatgacatgaatatgctccagtggatcctaggatatctttcacatgaggttacccttgccctttggatgtcaggtggaacaaagggatggaagattttttgtactgggacattcagtaaacccctaggcctacctattgtctagtcagagttagagaagcaaatgatgtctgtgagggcctacaaggcacaagaggatgaaagtttaacttaaagtttagatgctgatattctagctagtaataatgtatgattgcctcatgtactactctttttttatatttctctcctaatgtataaagatggatttcaaaagataaaa

SEQ ID NO: 90739 - DNA, 959 bp, Homo Sapiens
  misc_feature (52)..(52): n is a, c, g, or t
  misc_feature (63)..(64): n is a, c, g, or t
  misc_feature (109)..(109): n is a, c, g, or t
  misc_feature (162)..(163): n is a, c, g, or t
  misc_feature (170)..(170): n is a, c, g, or t
  misc_feature (204)..(205): n is a, c, g, or t
gatgatgccacgaggggcaacgaggggctgagccgcgaggtcagcacccctnaaagacccggnntaggcggggtggcccccatcagctttctcttccaaaccgatttgngccggcgccagctgcacccttgaaggagcttccctggagctctccgacgatgnnacacagnaaagtaagaccagtgaatgtcaacgagacgcagnnccacccccagtcagagtaaagttgcaggaagccagaggaggcaatacagtgggacagttaggaatgcacccggggcctcctgcagatttcggaaattggcaagctacgggattccttcctgaaagatcaactgtgtcttaaggctctccagcctatgcatactgtatcctgcttcagacttaggtacaatggctcccctttttatatacagacacacacaggacacatatattaaacagattgtttcatcagtgcatctattttccatatagtcatcaagagaccattttataaaacatggtaagaccctttttaaaacaaactccaggcccttggttgcgggtcgctgggttattggggcagcgccgtggtcgtcactcagtcgctctgcatgctctctgtcatacagacaggtaacctagttctgtgttcacgtggcccccgacgactcagccacatcaagtctcctagaccactgtggactctaaactgcacttgtctctctcatttccttcaaataatgatcaatgctatttcagtgagcaaactgtgaaaggggctttggaaagagtaggaggggtgggctggatcggaagcaacacccatttggggttaccatgtccatcccccaaggggggccctgccccctcgagtcgatggtgtcccgcatctactcatgtgaactggacttggcagagggctggtctgtgcatagaagggatagtggccacaattacagctgaggccccaggtg

SEQ ID NO: 90740 - DNA, 334 bp, Homo Sapiens
  misc_feature (57)..(57): n is a, c, g, or t
ctcctcttcttctatatgcaaaggctgcacagcttcctggttcacctggcacctctnccagaccacccatggtgcctgcagctatgagggcattttaaatcatcacagaacaacaagcatataagcattatgagcgcctctggacctctgacgtgccttgtggaggcctgccaggcccacgttttaatttacatgaactcgatgccctttttgacagggagagatctgtttctttatttgttagcctttcccctggacctgctagatctggaccatccccaggaaaggaaggtcacaccacaaagataaatataaacaaaatgagttaattaaa

SEQ ID NO: 90741 - DNA, 686 bp, Homo Sapiens
gcctactactactaaattcgcggccgcgtcgaccagtcgggcccatccacccataattttagtgatgaggggcagtaaccatgctgcatattgtgtttaggtcatgactttgtgaaaactacaaagagtgctagaagaatatagaagcatgctgcatattgtgtttaggtcatgactttgtgaaaactacaaagagtgctagaagaatatagaaacctggccaggtacacagcaaaaaatgaaaaccaaggttacaggctaacccatgcataaaaatgagagcctgttgctacctaattacaattccttctccttttcctttgtaaatgcccacaatttgaaggcagagagagacacccacaagagcacagccccaccatcaggaacaaaaacttgctaacaagtaataacatttaaatttctgaactaaaagcatagtttttaccatatggaaggaaaaaaatgtagtaggaaacactgaccacaatacttagtacaagagccaggcaactacaaagctcaagatctgattgttttcagcgtccaaatatacagtggattttaatgtatttataaacttactttgttagtataatgaagaatccctgcatacctacattattttttaaagtggattggggaaagtgatcattctgtaagcaggatatagtgactccttctggaaa

SEQ ID NO: 90742 - DNA, 447 bp, Homo Sapiens
agacacaaattgtcctcccaccattgattcagttactgagacattgtattcaccagtctattcttaccagccgagaactaactccctctcttttcctaagcaaatagcatggaatcagagtagaacaaacagtattatatcatctcagatacctttaggtgacaatgcaaaagaaaatgaaaggaaaacttcagatgaggtttatgatgaggatccctttgcatattcagagccactatagacctgcccatattcttcacgtgctcttaacttgctgcttacaaatcatctcctgagatgctaactttgaacaaagaaaataagaatggaagcatgccatttttctgcccattgcttagtggttcatgaaggccacactgttttgggtgagacaaaagtctaatgccactggatcttgtgtgataaataaagaaatatatgatcaaa

SEQ ID NO: 90743 - DNA, 602 bp, Homo Sapiens
  misc_feature (193)..(208): n is a, c, g, or t
  misc_feature (485)..(497): n is a, c, g, or t
tttccatcacagctatttacaaataactttggggtgctctcttgattttagtcagttcattatattgggggacagagggctgctggaatgtaggaaactggatggaatgcagaaatataaataagaccaacgttccacaaaccaaagtgtcaatattgcctccccagaaaagttgtgtcctaaaagcacctgnnnnnnnnnnnnnnnnggaatcatatataccagaaacattactgagacctaaactaccgcacaccaaagaggatagaaaataactcaacatttatattaaaataaagtgtttaaccacaaaaaagcagtaataaaatagtttcctaatttacaatttgcatccaaaggatgaataacaactcactaataaataatatttatataaatattttgtatgtcgaaaatagttttttaaaaggcaatggtctcaagaaacctctcgaaaaatttggtggtgaaaaacctgattgtgnnnnnnnnnnnnnactaaatacataatgagtttggttttaataaaacgaatgcgtcttgctgcaaaacggttgtgcttggcgttttggtaatggcagtcggtgagtgtggaaaggatg

SEQ ID NO: 90744 - DNA, 393 bp, Homo Sapiens
ggctccgtcaccctcccgtcccccacactcaggacaagaatgccctgcccggaacaacccagcagcgcctagatggctttggtcacggtccagcggtcacctacccccagcaccacctccagcccctgcgcctcggaggcagacagtggggaggaagaatgccggtcacagcccaggagcatcagcgagagctttctaactgtcaaaggtgctgccctttttctaccacggggaaatggctcatccacaccaagaatcagccacagacggaacaagcatgcaggcgatctccaacagcatctccaagcaatgttcattttactccgcccagaagacaacatcaggctggctgtaagactggaaagtacttaccagaatcgaacacgctatatg

SEQ ID NO: 90745 - DNA, 565 bp, Homo Sapiens
  misc_feature (266)..(266): n is a, c, g, or t
gagactgttcccattatgctggtagaaaacaaggctgacattcgtgacactgctgctacagagggacaaaaatgtgtcccagggcactttggagagaaactggccatgacgtatggggcattattctgtgaaacaagtgccaaagatggttctaacatagtggaggctgttctgcaccttgctcgagaagtgaaaaagagaactgacaaggatgacagcagatccattaccaatctaaccgggaccaattccaaaaagtcaccacnagatgaagaattgttgcaatggctaaatcccaaacatccttggcctgtgaagtcttcatttccagaatactgaatttgtgtgacttatttggctcttaacagagtggcacatcctactgacactgtcctatggagagttacagtgcaggaaacctgaacccagctctcaggtccctctggaactttggctcttctttgttttgtctcagtgagtgatttgggccctctggctaaatagactagtcatgtccttacaggtcttaaaagataacatgtaaatgtttttaaaatggtaaaaa

SEQ ID NO: 90746 - DNA, 443 bp, Homo Sapiens
cgattgagtcgtatttactcactctcccagcaagtgacgcccccattgcctcatctcactggatcttcataataattgtaggaggctggtagcagaggaaggggaagacagagagattcaactggcttgaagatggaaaaaatggaccacttgagaagaaatgtgggcaacctctaagaacattggtgcccccctggcttgacagccagcaaggaaccaaggaccacagatgcaacccaggaactggattctgccagtgatctgaactagcttggaagtggattctacttctgaacctccagataagagcccagccaaggtgacaccctgattttgcctggtgagtccctgagcagggagctcctctgagcctgtctggactgagaacctgcagaagaactgtgagctaataaatgaaggttgttttaagttgctaaaaaaaa

SEQ ID NO: 90747 - DNA, 497 bp, Homo Sapiens
ctatccaaagatattgattgctgcgtggttttcaatactaaacagtgtaaacaatgcaaatatttaacaataaatacagtgattaaataagccatggcatatccagttgatgtaatactttgcaaccattaaattgatgtttacaaggagtttatattgacattggtgatgctaatagcatattaataagtaaaatgtatggcataaaattgtatttgtgtgaatacaattaaaattgaggcatgctttgaaaggttaatagaggaaagtacacatatgtgaatagtggttttatatgagtagtagaattatagacaattttttctttcttcctgcattttcaaatgtaatttaatgaatagctattactctcaaaaatgtaagacaaattataccaagaaaagaaagcattgcttctagtttaaatgcaaatatcctaagaaatacaaccaattatgagctgtcagtacttttcctaagagcaaggaaacagaaca

SEQ ID NO: 90748 - DNA, 591 bp, Homo Sapiens
tgtaaacgctcgcagattgaatgacgaaataaaagaagaaactacagcacagtcaattttctccatgacagcctgagagatgtagctggtgctgccacttttccttcatttttccctgccttgaatatggtggtgatgcctggagcttcagcagccatcttatggccatgaaatggcaagcatgagaatgaaagaaaatgcactcatcatgaaaggaggaagagcagaagaaatctgggtcactggtgatatcaatggatagctgaagcagtgctgctctggatggaaaatgccctgggttctccgagacttaacaccccgccttgtgaacgcgagcaagattattctctctgagcagctcttttcacatgtgataagcttggcaagttgccctggattgaattctcacccactgtcttcacccaacccagcagagaagaaggcttgtgactgtgtaaggtgaaaatggatataccatttctgggaagagaaaagaagccaattaaaagtggggcatgtcattacactgaccagaaatgaacgtacctttttagaaataaagaatctgtatattcctgtggctctgaaaaa

SEQ ID NO: 90749 - DNA, 462 bp, Homo Sapiens
agtcaccatctctgaggatttttaggaaagctccaaattgcccttggttctaatgagcaagaaaagggtcttctctgtataagctctggtatcctctattttaaaacaaccacgttgggtataccaggctacaaacacatgcttgtttaatgagatccatagtaagataacctttctgaaagaaagtcattgattctattgggtaaatatcctcaacttccacaggcagtaccctgaaatcttgggaatggagaaaccattctagatcagctcctagatactcctaagaggggtcaactggtgtttgatcctgcctgtggggaagcagcatggccaaactcatttaaacatctgcgtaactggagctaggatgatgcatagcacatatgtcactaggaatgagaaaggaaaaagctttgggaaagtagctaagcagaggatgcttcttaaaaaaagtcaaaa

SEQ ID NO: 90750 - DNA, 430 bp, Homo Sapiens
gcataattttactaaatagtatttcacaaatattaaagcacttgaagacaatggttatagtagatttgattaccaaggatcactatctgtactggagattagaacaattatatgaccagaagcatctaaccattatgtaaaaagaaatgatgagacaaaaagattaagatacaaattttgtgcagtactaaagaaaaagcagtctaccattgtggtccttgaaaataactatagatatttttgttatttgttagacacaaattataattttgttgttaatgtatttaagcattttatagttatgctttgtgtttttgatattctttgtattgttaataacaagtgttatgggtttttaatgttgaaatcatgtgttaatttttgtacttgaattcaaattttttgacattaaatatgtgatgcttcaaaa

SEQ ID NO: 90751 - DNA, 463 bp, Homo Sapiens
ggatatgcctctgctcccaacttcgccagcctccaatgtacaacttccgcgtgtagtgggcgttgtcaccacccaccctacctgcagagttactaacttctccaaggagcatgtcactccagcagcacaggggacgcaatgggaggcagggacacctggacaatatttatttttgctgaaacccaatgacggcaacctctgagccatcccagagcctggggaggccagggtagaggctgacggcgcaagaccagctttagccgacaacagagactggactgtgggccctcctgctggagccaggccttcctcctgggcgcctccgactggctggagctgccccctccaggccagtttgaagactacatgaacacgtcttgtttggaggtaccggacctcataaaaggactctcagcctcttggcaatcataaatattaaagtcggtttatccaggcaaaaaaa

SEQ ID NO: 90752 - DNA, 211 bp, Homo Sapiens
gtttctttggcctttcatggagtgttgatttgtccattcttaatgtttattaataggtatatgtgcataaaatagctattttgtaacattaaactttttgagtcattttggtcatcatataacttaccttcctgtttatttaagcttctttttacctagtagcctttaaccaaacaataaccttttaaccaaataaaatgtgttaataaat

SEQ ID NO: 90753 - DNA, 304 bp, Homo Sapiens
tgccctgcccacccagagcccctctttgtgccctgatggtccctggtctcacccctgaaaacatcagatgcagaaaaagccctggacttggagctgggaagcctgggttctggtcccatctccatgactgattcacgtgtgacctcagacaagtcacgccctctctgtgcctccgttttctgcatctgccaaaggggttaaacacttctgccccacttcaaattacaagattatggggagaacccaattaggtaggaaacatgaaaaacctttgatatttataaaatcatttttacgtgcaaaa

SEQ ID NO: 90754 - DNA, 435 bp, Homo Sapiens
gtcctttcacataataaattctgccctcctcaatgtgtctgcatgcttaatttttcctggtcacgagagaagaacccagatgtagctgaactaaggagcaaaaacccggcatccatacctgctacagcacagatccagcatgaaaaattatgctaagtgaaataagccagtcccagcagaccacttgctttttatttcagaggcttataggcaaatctatacaaagaagctgggtggttccctagggctgagggaggaagggaaaactagtgaagatggctaaatgatgtggggtttgtttttagggtgatgaaaatgttctaaaattaattgtaatgatgacggcataactctgaaaatactaaagttaatgaattgtatactttaaatgaatgaattgcatggtgtgttcattatttctcaataaacctgtta

SEQ ID NO: 90755 - DNA, 733 bp, Homo Sapiens
  misc_feature (176)..(251): n is a, c, g, or t
actgtcgcagaggggaaaggtcgccagtcaagctgaccaatcaaaggctaactctaaatccctccctctgcacggtaaaaacacgcaaattggggcgggcctagtgcggaaagataccggaagtgtttctgtggccatcttgaacagatcgcaagctaaatcatccatcttaggannnnnnnnnnnnnnnnnnnnnnnnnnnnnnnnnnnnnnnnnnnnnnnnnnnnnnnnnnnnnnnnnnnnnnnnnnnngatgctgttgactggggcaaagaataatgggagaaaaacagctgggtcctaaataacagagggaaaccaactttcaataaagtattcaacaactaatccacaaagcagataactgaacttgctggcctgctctatagtgctgttgcttaaaaagtcatctgtgaagaaaaccagagggagaaatttcacctgccaaagtggataaagaggactgtgcttgcagcaagaaatattgagggatgaggtactacccttcactcagataaagaacttgcttgcttcagcttgttgtaaaatggcaagttccccaagctgtgggttctataagtgttcctctgttgtgaagcaacccatggcctatgcaagtatccacctgagtcctctgcattggacttgggaggaggcaaggagaactaatataaacatgatgctcatgctacttgctgtgctatgaataataaattcctttgtctctaaaaaaa

SEQ ID NO: 90756 - DNA, 1061 bp, Homo Sapiens
gtctagttcccgttccgcggtctccccctctatccacaaaataagtactaagtagcgaggcctgggtggcgaattccgcacgagggaagagaggaaaagtgtggaagtccacaagccgcccccgccccgccctcttcgtcgactttcagctgcaccgggaggcggcggcgcctggccagagccggggcctggagcctggactagacagcctcgccggccggggcgccagtccagcgccctgcgggcaatgggcttcagcgctcgagcacgcgcatgcgcgggcctgtatctccagaggattcctcgggtcacctggacgccagcatctcagccacctgcccctctgggtcccttcttgcccttgattccccctgctgcttctcatcgccagccctcctcctccttcttccgcaggcaccgctagacccggccgcggccgcccgccgacaccccagcttccactgacacgagcctcggcgcgggcttccgcttccgattcctttcttgtctgttagaaacgtatgtcaaacgaggatacagtgtctggaactattggttctaagatataagtggaatgagcctggatcaggagaagtatgctgagctagagttgaaggaagcttctctttctaacaagagaaagcagagttaaattatggcagagacaagtctgttagaggctggggcctctgcagcctctacagctgcggcttttggagaacttacaggtggaggccgagctgctactgtgtgcctgggagtatctgaaggaacctgtcatcctggagtgtgggcgacaacttctgcaaaagctggcatcgccccgctggtcgggcaggacctaaaagagggaacttcccctgggccctggctggtcgaaaagaacatccccgcttaccgggaggtcttccggaccttaatcgggcccacctagggcaagaatgggcggggaaaattgcccaaaggcgcctcccaggcccgttccaggcggaaagaaacccggggaatgaagaagccttttggccccccaaaaccccgggagggccgcttagccccttttt

SEQ ID NO: 90757 - DNA, 342 bp, Homo Sapiens
ggccagaagggatgggggcaagaggaaggcagccaggggctccagcccatgccctcacagatttggctctcgagttggggagcgaagggctgggggaggacactggggaaccgggccagccgtggccctgcacttcccccagggagcaccaaggctaggcgcggcttcaccgcggggctgggtcgtggccagcttcgcccctgggtctgaagacctctgggcggcccaggccaaccttgccctgccgccgcacactcggctgccttctcatacccaggcttggggatttccaggtcccgttcccctcgtggcctggctgccagtcctccagcacccctcact

SEQ ID NO: 90758 - DNA, 525 bp, Homo Sapiens
tgcggccgcaccacaagatggcggcccgccccagggtcccacacgcggggctgcggaggcggcggccccgagggtccccgccccttgctggccctgtccccgcgtgcggggctgcgacctgcctttgtgtgcgggtggaagtgcgggccgccttggggccgagttgcaacttcgcgacactccactggagtgcgatgagacgatgagatgttacctcctaacacttcgggaggtgggcagcatggcaattcctagtaacctcaacgcgattcactcagacttcctttttcccatcctgagccgcaaaaccaggaactggtgaaataaatcaggccatctttcagaggaatggcctgccaccgttaaaaagagcaaagctgcagtttatgtactaatgtggaaccagctctgagataaattaagtgaaagaaagcaaagcacaggaaaatgtgtatagatatgcctttgtgtttttaaacaagaagacccacataaatgaagatatgaatgtgtaagcatagtata

SEQ ID NO: 90759 - DNA, 400 bp, Homo Sapiens
tgaagaagaaaaccaaacccagattccatattctcccaatccaggatcttgtcctatagtagtatgttgccaccacctgaacatcagtctagcagaccttttaccttattatgcagaaagcacacttggcatgaaaagaaagggtatcctcggctagatttgcttctgtcatggctgaaaaggtgaagtgacccgctctgaaaacatgaagcccttggactctcaggtcactgcatagggtgttctaattagaaaaacaagtgtagcattttacccaccaacacagtggtgacatttggtgaagttctaaaaatctttaattattacttacactttacatatttaccaaaatgttatgtatctccttgatatttaataaaatcacttttaaaatccaaaa

SEQ ID NO: 90760 - DNA, 483 bp, Homo Sapiens
ctagctctggtcaatgaaagaaatcaccagtggaaaggctaccaggggctttctcaaaagagagggacagtaaactgcaagatgaacaactcaatgccatccaggtctggatgagaaagaacagtcgagagactgagtttcaggagtggaaacactcaaagcatcatcttccactttcttctccggctgctaggaagaagggaaaaacacagaacttctgaggacctgcgcagcaaaccactggcttcagaaaagcaaacagggacttccctctgcgcagcaggaagcagttagcctagtcggaggcttgactgaagaaacaaatgtatccactgataatgggcaagagcctgaggctctggagccaagggggaaccctaaaaagctgattcaagtaagagaaccaaggatcatgcaattccacatggccacctcgaagcaggaatccgttaatgatagtaaaggactgatgaaaatccaaaa

SEQ ID NO: 90761 - DNA, 872 bp, Homo Sapiens
  misc_feature (272)..(272): n is a, c, g, or t
  misc_feature (762)..(779): n is a, c, g, or t
cataattagaagcagtttaatgtataatggagaagtaatgacagatgtcaaagtacttgaaattcatatcacagtacttcctttcggctgcaagcagacatttgtgggcatcaaaacttttcttttcctagccttccaattgctgaccattccctcttcacttccagttcttgtacctccctgtagctcaactactgtcaatggtggtcgtccaaccaccaaatatatcaatggagagaggataatggaaagaggcagcttgatgcctgagnccacacttggatggcaccggttactccatatttcttaggcggaactgaaatctacttcctggagcttctatctgttgatctcagctcttctcgctgaacaattgtttacccttctatattagtcttttggccacttgcaaatggcaactatatatattcttaatattttcttttccagattaaatatttccaactccttcattgttgctggaaccttcaccaatttggttggccttctctaggcatcaccattttacaatcaccattttacaattccctcttaaattgtggtgtctcaattatccatggtgctccagatactaatcatttcagaatacagtgaaactcttgtctcttccagtctgctcaattttgcttctgtaaatgtagctcaatattgtgcttttatttaaccttctctgtcatggtattgactgaaacctctgagtcataaacctggtatcctcaattttgtatttaggctattggnnnnnnnnnnnnnnnnnnaacttaagtgtaaggttttgcatttatccttgtaaaattttactgatctgggcccagttttctaggctgttcaggaggattgtgagtcctgcc

SEQ ID NO: 90762 - DNA, 755 bp, Homo Sapiens
  misc_feature (602)..(602): n is a, c, g, or t
  misc_feature (641)..(641): n is a, c, g, or t
  misc_feature (723)..(723): n is a, c, g, or t
cagtttacctacagttgcagtaccaatcctttcttgaggagttttaaatgcatggttgagcaattaaattgtatgaggatgtgacatggattagacgatgtcggtagtaccaaactatttcttggctgctccaacatgcggagatgacactgcttttagctcatgacagcccaaggggaatgttttactgactatggacttatagcttggtggaaattaacataggacgttaattagcaaaagtatccaaacagaagagtgaatgaaaatttaaaaataaaacaataatggtgtataaatctattcctgaatgtttttcctgactacctttctaaagcaacaccttccatgtgctttcactaacacagcctcctttcctatgtgactggatccgcttcttcagggccatcagtgcatcagtgagaatagctactggcaaacacgttactcagaggtgttctgagaacggtgctgtgaaaaggacttgtcacttttgagctattgagctccccctttctgagacctgtcattttgttaagacatgattgaggctgagctccagataagatatattctttacggtacacacatacttattagantcaagcacgtttcttagtggcaggcagtaatgactcaantggaaacaaacaaaagggttctaagttgttttctgattacaggcactaccccgaagcttcatagacatatacattttataantcattcattagatgtgaggggataggtcccag

SEQ ID NO: 90763 - DNA, 394 bp, Homo Sapiens
tttaacattggagttcattcaaaacttattgagctgcaactgtgtgctcagcaatgagaatatagcagtgagcaagatgtgaacaagatctctgccctcgtgagcttacaatctagcagcgcagccagcctattacagccataattttacaattgtaataaaaactctggaaaatgcatggtgctaactgatttatcagaaagtcttgacccaccaagaaatcagaaaagacctccctgaggaaggaacatttaggatcagctaggtggaaagtgaaaggaagagtgttgcaggcagagaggacagtgtgtgagggtctgaggcaagacatgtaatgaactgaaagccagtgtgtctaggccatagagaacaaagaggggtgttgcgagatgag

SEQ ID NO: 90764 - DNA, 311 bp, Homo Sapiens
ttccccagtgcttagaacagtgcctggcacagagacggggctctgtaaagatctgctgaatgaacactttatcctcttacttcttatccttcaagcctcagatgttcccccaggatgccttcttcgtttccccagactagttcaagctgcacctccgacgtgctcccacagcccctgagctgcctccctgcagacgccatacctgccgtggctgcttgtttgctgagtagcctctcccactgaaccctgggcaacttgaggtcagggaccatgctgtttactgttacagtgaattaaaatgtctaaaacgg

SEQ ID NO: 90765 - DNA, 487 bp, Homo Sapiens
cccacccagcctaatatactatttttagacactcatgcactttgtttgggcccaggcattcaagcccactgcagagatcctgctgcacccaggctctactctgagtttggcaataaccttaaaccaaaatcaacaaatctgacaagatgccaggccaacctagccaccctattagctgcttgttcctcctgggatttgcagagagcacctgcagcctaaacaaggacaaaagttgaagcatggatctttctgtgcagcagctgtgatttctgcaccttctagctccctcgccgagcaccactccctcatatcttgctggcagagcaaggcagcatcgtgagcagagcaagtcctaagaagtacatgggttcaaatctggtctctgtcactgaccaacagactctttacctttctgagccttagtttcttcaactcctgcttcatttcacattttaaaaagtagaataaagacaaactccatgttttt

SEQ ID NO: 90766 - DNA, 462 bp, Homo Sapiens
ggatccatcccgcctcccggcgtctcactgtgtgccctaccctttgaaacacgcccccgcgcccgccctgccgtagaccaggcagcgaggaagcccacagtctccgggggcgctgcgcgcgaagtagcacgtgcttctcgaaacaccgcagcccccgggtcccgccccgcccggcgcgcgcactcgaacccgcccagagagcggtgcgtggcgctgggtgcgagcagggtctagcgaggcccaccctttcctcaccccaccccaccctgcttttttcaggttcatcaaggtttgcgcagtggatccgcgaatgaagccagcctggaagatccccagtctcgagacagagcctgacaggggcagatgcactggaaggaccctgtctgggtttagcaaccaagcagccatcctggccccacaggtgtgggacttctgggtcttctccttgctggctacttgcta

SEQ ID NO: 90767 - DNA, 803 bp, Homo Sapiens
  misc_feature (74)..(106): n is a, c, g, or t
ggggcccgcccggcgcgcgcactcgaacccgcccagagagcggtgcgtggcgctgggtgcgagcagggtctagnnnnnnnnnnnnnnnnnnnnnnnnnnnnnnnnntgcttttttcaggttcatcaaggtttgcgcagtggatccgcgaatgaagccagcctggaagatccccagtctcgagacagagcctgacaggggcagatgcactggaaggaccctgtctgggtttagcaaccaagcagccatcctggccccacaggtgtgggacttctgggtcttctcctggctggcttcttgctagaggatttcaagagacccagcaagactgtattgtcccactgaatgctcaagatattggttagaagtagaaaaggggagggggtagtatttagcctctgtccccactaaaaattattcccaattgtcatttgtgtcatctgtttagcttacagttttaatccttgtcaaaatgatcatttgccagggtgcataaaacaccctatttgatgagaactggttttaaaggaaaatggggccatcagaaggaagccggttggtgtgaagagacgtctgggaagagcccctggcgagggccctcattccactgggtggcccagaaggagaaaaccgcgatggcgcttctcatttgaaatgttttctttatggacagtgtttagcaattgttataatgtgtacttttgttgattgatctgtatacatatgtaaaataatttgttctctgagttaattttgttggaacaaagactttagtgcttcctacattaaaacattttactgtaaa

SEQ ID NO: 90768 - DNA, 174 bp, Homo Sapiens
tttgggttttccaaggcacttcctttatttagtgaccttaataaccaaaggaagagaaagagcaagcttgagatgaaatacatcttcgaaattctccccacccctcccgggcttttttctctaagattcaaccgctagcaagtgttctgttggccaagaaaagccgtttccaat

SEQ ID NO: 90769 - DNA, 546 bp, Homo Sapiens
tacagcgcggcaggcctaccggtggagcaccacaccttccgcctgcagggcctgcaagctgtgttggccatagatggacatgaggtcatcctagagaagatagaagactggaatgtggtggaactcatggtgaatgaagaagtcatcttccactgcaacattaaggacttggagttcggaggcgatggtaaactagacccactgtgtgaaaaggccaggatagccgtgctgaatgcctactgatctcctcatggaacaggcatctcaagtcggcacaacagcagctgccccagccattctatgatgcaggcagaagtggctgtgccacggtgtggacactgggctctgctagtcagaacagggcaactcgggcctgacctccagcttacgcagcctcaggattgtcacctggctgcacaggagcccacagaaataataaaaaccacatcatttataacatgtctcaatctcaacccatagggagagccctccaatatcaggtacacattgagctgaaggaaacaataaaatgcaatcaaataaaaa

SEQ ID NO: 90770 - DNA, 557 bp, Homo Sapiens
aacgttctgatgagcccccgccgtgtacggaggccatcgtggggccttggggtctcggggctcattgggatcccctgtgcgggcaaagttggcccagtatagcatcactcgctgggcgaagattttctcctatgccgtgtaacttcaagaggggtccaaggggatcccaaagatgaactccatctagtagccgtgaggcacccccatccacaggggccaggagagcgtggaaccaccgagttcagaagacgtaggcgtagacccgggcaccctgagcagacagtcgaccagccagctgggccacggagcacacgacatttgaggtcgcccaccacatcactcagggcctccctcaagcgtgccgaggcctaggtatgcaggcagtctagataatgcatgaccactagccttgggtgtgaagtcacttacctgatgaacctctgcccgtaccgcggtcatgaactgggtctgggtgatgagagactcgttgtgattgatgaagcctgtggccccgtagaccatgatatacgactccttattcttagcacagccaccag

SEQ ID NO: 90771 - DNA, 1031 bp, Homo Sapiens
  misc_feature (895)..(895): n is a, c, g, or t
aaggtgaaataaatttataataaaacaaaaatatttcatctttcttacagttccattagaagagagcttgctaattttagacagtgtagtgcaaaaaatataaacaattattttctgtcagataacaatggctccaacaaatcaacagggtttttctttattattatataaacatggcaaaaagaatgtgaaaataaaatacctgtatttgggaaagcatgaaatatgaacactgtcactattagttttctataccaggggcatccaatcttttgatttccctgggccacattggaataagaagaattgtcttgggccacactttaaatacactaccgctaatgatagctgatgagctaaaaacgagatgtatgaaagtttatgaatttgtgttgggccacattcaaagttgtcctgggccgcatgtggcctgcaatccgtgattggacaagcttgcacaccattctacctatcagtagaagtttattattgccaccaccaccaagatttactgatggacattatatgccagttattgcaatttctttatttcataacagttgctttatacatcaataactaaattacagtgtaaagaagaggattcacatatagttcttctttttcttactgataacaaattcttcctctgtttgctatgcttagtaaggaagtcaatgagagccagtagtcagtggttccacactggcaggagcctaccagcatagctgttgacctgcagcattggtacccagccccaccaatacataatttgactatcacccttaaacaaatgctattttgcaataagaggtaaaatatcagtgcaacttaaaaaacaacacttgtacatatttttattcaacattttacattattccacaaatatgtacanatttcaataataaattaaaaaaatgagtaaagtaagtctgagagaagttcatagtcactatattactcaatgacatttttctgccttcatttctaagagttcatctgatccaaggtctgatcatcttcttgacaga

SEQ ID NO: 90772 - DNA, 481 bp, Homo Sapiens
acagtaaatttttagaaaaaaataccatttacagtattattgtgaaccatttaacccttttgatccaaggccccggaccaaggggatactgtaatcaggttatgtacaccaacctctgcatcagttgcttctatagagcatcagccctcatgtttcattgtcttaatgtcggggagcagcctggtgtcctgccccaggtgtccgcatttttgcatggtaaggaaaaggcttacttgcccttcagctcataaaagcagaaggtgtgctattcacagtaccatgcgagtagcccacagttaattcccggcagattctttggctgtgttttatctttaatgaacgtttctgactaatattttgttgtaaaccattaagtaatgtaacgcatgtaagatgcttagggtgcctggccaggactccgtggtttcctgttgtgacagtaataatggttataataataaaaatgataaaattgcaaaaa

SEQ ID NO: 90773 - DNA, 588 bp, Homo Sapiens
catgacaggactcacactgtagagtatccgtatcaatgcaagcaatgtggcatagcctttattcgtgccagttcatgtagagcacatgaaagagctcataccattaatagatgagaaatccttatagtgcaagcaaccggagaagcttgctgttgtcccacttcctgtgaaacacaagaaaagagagtggtgaaagaacctctggataactgctttttgaattgagaagagagacttgcgatagcacaataaaatctagaagaacttggatggtttcgtaacacaattcacctatagccaatcttgcatgagatttcaaaggcacagaaaaggaaggcatcagtcacatattagaggccccacacagggaaagaggtgtgtggctacccgcttccagcccattttcctgattctttggcttgttaatcgagaatatcccccaaatcacttgtctctgttcctcagagttgtaggtctccagatatgtccccagtgctccacattaaagatacatgcccactttgctgtttcttcaaaaatgttaaaatgtttaccagagaactaataaatgttgttatggctggaaaa

SEQ ID NO: 90774 - DNA, 612 bp, Homo Sapiens
  misc_feature (434)..(560): n is a, c, g, or t
tcacagagccggaggtgagcaacaggtgaatgaggggaaacttcttctgtatttctagccctcccatcacttgcatgaccacctaagcaccatgtcctgtcagatcagcagcagcattagattctcctaggaacatgaaccctgttatgtgcatgtgagggatctaggtttcactctccttatgagaatctaatgcctgatgatctgtcactgtctcccatcaccctagatggacagtctagctgcaggaaaacaagctcagagatcccactgagtctacattatagtgagttgtagaatcatttcattatatattacaatgtagtaataatagaaataaagtacacaatatatgtaatgcacttgaatcatcctgaaattattccctcattcccagtctgtggaaaaattgtcttccacacattcactctgtnnnnnnnnnnnnnnnnnnnnnnnnnnnnnnnnnnnnnnnnnnnnnnnnnnnnnnnnnnnnnnnnnnnnnnnnnnnnnnnnnnnnnnnnnnnnnnnnnnnnnnnnnnnnnnnnnnnnnnnnnnnnnnngactttcttaaaccaaataaaaattaagtgagattacttgagccttgattgt

SEQ ID NO: 90775 - DNA, 511 bp, Homo Sapiens
tgtgaccatgccacatggaacctggccgtccactccacccacctgccttagcaaagtgcccttggtgaggctgagggactaggcagccaggactcctgaggggaccttatcacagagggaagccacctcggactgagtggtgagtgctgctccaggactgccctaaaactggatttgaacaaaagaccacatgccgtatgactccattggaatgaaacatccagaacaggcaaagccacagaggcaggaagcagcatccccccaggtcagcaacacctctggagctgaggctggcagaatgtggcgggggctcctctgagagcatggcagcttctaatggacccgcgtggttagtttgagagaaacagtcaccagaagacagccatatgtgtccgggctgggagacctaacatttcagagccaccaaccctgcatcactggctgacaggtggctggacatcgtgtcaccactgtcttctgggaataaacatttctcagctttccaaaaaaa

SEQ ID NO: 90776 - DNA, 473 bp, Homo Sapiens
ccgtctcccactgacttttctggaaatcccaccagatgcggagtttcgagcaatttcctggggtcagtcccccatcctcacctttccaagcaccacgtagtagtagcttccagaaggtagatctttcccatactgggctcagctcacaactggctcttgagggcctctggacagccccggacgtcaatgcaaatctgttgtccccagggagtagcccagagtcagcaggaagcccagggtggtggcagtatcagcagcagcagctctgccctaccttgcccatgcgtttccaggggagccaagaattattttgccgcaacactgaggtgtggctgattggaaaattcccttttccaacaccaaactacagaataaatattttcttccaatttggtcaaccctctgcatacccatctccctagcattcttccctctaaataaaaagttttgggagccctgagctcttcctcctt

SEQ ID NO: 90777 - DNA, 686 bp, Homo Sapiens
caacctggcttgctctactagtgtccagcaccctgctcaccagcctggctgtggctgcctgccgccaagagctcagcctcttctggactggccagggcagagctaagatgtgtgggctcggctgtgccccttcggctggctctaggcagaagcaggagggcgcagcagatgcccacacagccagcacacttgagagaggcaccagccgaggagcaggggacttagacagcaaccctggagaagacaccactgagattgtcaccatatctgagaatgaagccaccaatccagaggacctgcagtgatagctccgagggctggagtgacgcccacttggatcctaatgagctgcccttcatcccccctggggcctcggaggagctgatgccactgatgccaatggccatgctgatcccactcatgcccctgatgcccccgccctcagagctgggccatgtccatgcccaggcccaggcccacgagactggcctgccctgggcgggactccacaagaggaagggtttgaaagtaagaaagagcatgtcgacccaggctcccttgtgaactggaggcactgggacacacgcctctcaaagggctggtggaacattgcagagcaaagccatgcatggcaacaagaaatcagggcatcaaagagatttcatatctaacagaaacataaagtc

SEQ ID NO: 90778 - DNA, 421 bp, Homo Sapiens
atatttcgttatttttattttacctttttcattttacaagttgcaatatattgtttcgttcatggaacaaatataggctgaattcaaacatgcaattaaagcatgggaagagcttctaagggcatcttaacaggatgctacatgaaaataaggaaagaaattaatacatatcacttttagtttagatttttattttatctcaagtatgtccagtgtgttcggtttgttacatattccatgaaatatctgagtgtgtattttatgattggtattatggaaggcttattgggggaacaagaaaaatataaaaagtgatctctgcccacggaaaggatttaatccaaatggtccacaagaggaatgtgcttaattcctacagtgagtttatatttttgaaaataaaagctagtaaatattcaaa

SEQ ID NO: 90779 - DNA, 547 bp, Homo Sapiens
  misc_feature (299)..(329): n is a, c, g, or t
gtcagtcctaacatctatgcttgcgccacccaaagaattcacttgttctctcctatgtgactctacaggctactagttggttttccatggaattttagtgaagtataagccattaatgatgagtaactgttgacaaagtattcagaaacgatttacaaaatggacattttgaaatctattactaattttttaaaacagtccattctttttgaattgtgaaataactcacaatttactctgaaataataataatcatgagaaaatgattgttcctttacttcctctccttcctctaactnnnnnnnnnnnnnnnnnnnnnnnnnnnnnnncagtgttcataatagttactttctattctgtgaccataattctcacagttgattagcctttgtttctatatctaaatcagtggtttccaatcttgtctacacaatattctcacttgaggttgtgtcaaaaaatactgattctgtggccccatctgtgagattctgaattgaattagtctggagaggggctttgacgagtcaatgtgtgaccttttaca

SEQ ID NO: 90780 - DNA, 442 bp, Homo Sapiens
atcaagcaaagaacttgtaatacgctgaatgctgcatagaaggttttgaaactacttacctgctgtggaacacctgtataactttaaaatgcatcaatcaatctcgagagtatgatcatgcttcctgcttttaaggatctgaagttaactgcaactccaagtatacaagacttctttgggacccatggaagcatctctacatgctcatgtttgccagattcagtggcctcctgaaacctggccctagctaataagttaaaaagctctaagtaatcccgagctgcatttgaatctccaagatcacttgttcatgggttggtaatactttaaagagccatttgtttaactgctaatctggatcttatattctgagccccagcttttttctaaagcaaagaaaatacaaaataaaagtaagaccaaatgcctttgtaccatgaaa

SEQ ID NO: 90781 - DNA, 354 bp, Homo Sapiens
ctcttttaaggaagtccctaatttagaaacaccccccaacttcccaatcataattagcaaacaattggaaggaagttgcttgaatgttggggagaggaaaatctattggctctcgtgggtctcttcatctcagaaatgccaatcaggtcaaggttggcaacattttgtatgtgtgtgatgcttctcccaaaggtatattaactatataagagagttgtgacaaaacaaaataataaagctccgaaccggggcacacgctcatagttctagctgcttggaaggttgaggagggaggatggcttgaacacaggtgttcaaggccagcctgggcaacataacaagatcctgtctctc

SEQ ID NO: 90782 - DNA, 576 bp, Homo Sapiens
gaatttgcaaagtctcaagacctgccttatcaatcatcgtccatagacactttttcttatttgaataatgagtatgtagtcatcgctcagcccattaatgcaaaaatgcattttccttgaatgggaccatgtggaaaagaccttccggaattatgacaacattacagttttaagggaaatacacagatttacaaacatgtcatagttgacttaagcgcatgagacaccaaattctgtggctgccatcagaaattttctacagtacatgacccggatgaactcaatgcatgatgactcttcttatcacacttgcaaatgaatgcctttcaaacattgagactgctagaaccaagcactaccagtatctccatccttaactgtccagtccagtgatgtgggaagttaccttttataagacaaaatttaattgtgtaactgttctttgcagtgaagatgtgtaaataagcgtttaatggtatctgttactccaaaaagaaatattaatatgtacttttccatttatttattcatgtgtacagaaacaactgccaaataaaatgtttacattttctttca

SEQ ID NO: 90783 - DNA, 505 bp, Homo Sapiens
acaccaacagaaaatcaggacatcattaattctctacacttattgatttggaacctccattgaagcagcaagctcagcacagaaataaaactgtcctggtgagtcgctcacagcctgtcccagtaactgttccggagcgtcagcctgacgcagcacccctgaaggaccaagccgtgcgggctgcgagcctcgcccttaaccatgcccagcaggaccagagctgccagcacaaatgaaggtcctggccattgaacaacttctgagcctgcactttaagaaggcgctcttgttttgaatacgtagtctgtcctgttctttcaaagtagatcctggtcaagaatgtctccaaaactggattaagccagtgtacttgaatgggaatatagacaaccaggacagacttggaatgttttttaatgtattggcccagcaaagctagaaatcctccactttacctaacagaagataattagaattaaaaatggcactaactgaaaacgtaaaa

SEQ ID NO: 90784 - DNA, 472 bp, Homo Sapiens
  misc_feature (25)..(25): n is a, c, g, or t
tgagtagaggtgggaaagttaaggnagttctagctagcttggttagggaggctggtccccccagcacttccctttactaggtgcatctgaaaacccacaaaccaccttctttaccagttttcccatccccaccccttagaactctcaggtcccttttcctgcccccatgtccccatttgagttaaattcagatccacagcttgcaggagaaagtcagtggccccagacacacgtaacagggtgagcactgaaataagagcacgctggggcgtccacaccaagggactacgccccagtctgcccacctatcttttctccatcattaacccagcgctctttctccctggacttccaagtaccaatgaccttggggcttctttgcagtttaaagggaaaatgctctacaaaataatttcactttcaaacatttcagcagaagaataaaatcttttttctgaatatctagtaaaaa

SEQ ID NO: 90785 - DNA, 445 bp, Homo Sapiens
caaagagcacttgccctgcctaatgacggccaacaagctttggcagacagggccagatctagcgcagaagaaaccaaatcagtatttttatggcaatgcactgaattttccaacttcactatgtgaactttcactttcatatcgctgcgagagccaaataagacagagagagaaatgggcctcacacattagagtgaatttgagaagtcccatccaggtctcctctgaggaaagcaaactgcttccttcttcctctagggtttaaggaagatggaccatctgcccagttccagcacaaggagcctgggtggaagaaaagcgcttcaagaggacatcgtaggccatgtctgagtaaatgcgcctctgtccccaaactagaacatgattaacatacttggcatgtaatataatactaatagcttttaaaataataccttatatcgat

SEQ ID NO: 90786 - DNA, 568 bp, Homo Sapiens
gataattatattgggaaaaattattttcactaactttaagactccagagacacttttctcagccatgaccagtaatgtttttaaaagattttggaaggaatagctcctcactataccaccagttcgtgattttaagggaggagacaacccctcatactgtcttatgcccaatttctgcctccaaagaaagaagtaaaatctaaaaggcagaaatgaaatccacaagcagacagcctggccccacatcctgggcctggtagttaaagattgacccatgacctaatcggttatgttatctatagattacagacattgtatagaaaagtaccatgaaaatccctgtcctgtcctgttccattctaattaccggtgcaggcagccccgagtcacgtaccccctgtttgctccatcgatcacgaccctctcatgcggacccccttagagttgtgagcccttaaagggacaggaattgctcactcggggagctcggtttttggagacatgagtcttgctgaagctcctggctgaataaagccctttcttctttaacttggcacaccttatggag

SEQ ID NO: 90787 - DNA, 463 bp, Homo Sapiens
tagctgggactataataggctttgtgccaccatgcccagcttacttttttctatttctgctttattttatcctcatgtctggaccatagatagatcattgttatccaccagcaagaatgtgtcatggcataaaacagtcaagaaatctaagtgaaaccttgactgggctgtctttggggcttgtgcggtaaatgcctcacatgcagtgaactctcaacaaatggcttttaaattgaattggaatcttccatttctatattagcacattttgtacctttaggaaaaacttgattttaatgtgttgttttcgtatgtgtttgcttgtttcttgagtagctgatggatttacaactgagtgacagtaactttcgtcgacacatcctgttgcagtatctcattttattccaatatctcaaggggcaggtcaaattcaaaaggtaagataatatgggtagtaaacaat

SEQ ID NO: 90788 - DNA, 452 bp, Homo Sapiens
  misc_feature (60)..(60): n is a, c, g, or t
ctgacgctggacaacaggctcgactcccagggcgtcctcagcaccccgtacttccccagntactactcaccccaaacccactgctcctggcacctcacggtgccctctctggactacggcttggccctctggtttgatgcctatgcactgaggaggcagaagtatgatttgccgtgcacccagggccagtggacgatccagaacaggagagtttgaatatctaagatgccagtcttggaagatgccaaaattggaaggctctggggctctagaattcttggatttctggggtgtgtgttcccaatcaccaacacttgtaatttgcttgttggctgatcctattcaaaaggatcatccagacaaaaggtgacgaagaatgacaaggtttgcttgactcctttttgcaatttatctgggactaggattaaaagaaaggagaagaaataaaaaaa

SEQ ID NO: 90789 - DNA, 885 bp, Homo Sapiens
aaatgtgattggggaactccagacacataaaaaggggcagcagaatagttccagagaattgggggatctcaaaaatgaggggacagatgtgacaacacagccatagatggccgaagagatctgagatgataacagctcccagagggcccccagacataactaggaaatctcagatctgacaagagggaaccttggacagggctcagggttgccagcagggcccccaccccaaatgaaattcagggtttacagacacacagcgatcttaaaaacgtcccaggcctcactggggaatcagatatcacaagaaaatcccagagaagctcttgggattctggaagaactgctaccctgcctccccgagtatagtggtccataggtcctgtcacccaaaacatgaggatcccagggagtctgtacatgacaaagaaatcccagagggaccccaggcacaagtggggaatcccagacaggcccgggctgggcttggggattatggcagggcagcactccccttaccccaaaaggtggggatgcgtaagtcctatcacctagagtgtggggacgccctttttcttccagggggatcctggctgggacgtgaggtcccccagcggctccgcaggtgggagcctcgggtgtgctcaggcccggcggactgcaggcagcagcgcgctgtcgaactggtaggtgagcttgcgcttgaccttgcggatctcgccggtcttggcgtagtttcggagggcgcgcgccagcttctggtaggtcatgcgcttgcggttccccttctgctggccccagcggcgcgccaggagttccttgtgcttggaggagaactggaagacgccggcgcctggctccacccaccacacgcactcacgcatg

SEQ ID NO: 90790 - DNA, 416 bp, Homo Sapiens
caaaagacatcagtgaagaggcaggtaactggttaatcttacttgacaaaacctattactaatgtgctactgatgctgttaaagaaagacttggccaacttcaagaaaacacatcgaatttcctgagtgacaccaagtccatcagatcatcctggggcataattggaaatggtgcctgcactttaaagaagcgaaccagtgcaacgactggttgcaaagaagagtttctccttagctttgggtgccaactagagacctgaactcagaatatcatcagatttggtctacttccttcctttgttgtctatctggtcctttcaagtactacatggagctaccagccaaacttgtgcttgagtgatgtggctctttcctcccaggcaggcaaataaattcagctttgtttcagaaaaaaa

SEQ ID NO: 90791 - DNA, 607 bp, Homo Sapiens
agaccaatattagcaacaagaagcctctgccaccatggaagaaggatctggaaagaaggatgggatctcagcctgatggcaggtcttacccaagagggaatttttttctcaggagagtgaagaaagcctggctttcctcatcagctctctttgtgttgaattcatcagtcatgacaatcatttgagaaaccttagaagatcatcccaaacctggaaaaagtcagttacattaggaaaggagtgagcataaagagcacctactagagagagggtcctttcacacacatgacctcatgtaaccttcacaatcatgccatgagagtatttacagcctctgctgttgctctgcttctatctggtggattaaggaaagtcacaactcacagccctagtggaaagttacaactgggatttgagctaacgaagagttgaagactcagcaacaggcgcttggcttcactattaacctggacaaggccattaactcgcctgtacttaattggcttgttctgtgacacactgttgccccagaaacacccatatgggtgtaccccacattaaagaagcccgctctatgaaaaccgagacttgttgaaaagcataaaaa

SEQ ID NO: 90792 - DNA, 526 bp, Homo Sapiens
gcccccgtcttaggccaaccacttgcctatctactaaatcttcccaatgtagcttaaagcctgattttaggagccgaagaacaaagccctaagattcaggtaagaccatctttttttcacaatgcagctctacaaaaatattcccagtagctgacaccctgcttctaagaatagaactctattagcattgcttgggaagaaattttctttcaaactaaaatattagaaaaaagtcaaattattaaacttctgcaggccacttcttttagtaggaactatctgtagatgtttcaagctgttaaattgctgtctgatatgctgcagttttcattctcctacttattctgaatagcaggaagagttattactagagttattattctttaaaacatgagttttaaaggtttactacattttcacatggatttttctgatatccaggaggcaaaatcatttctttgtctcttgtagaaatcaaggagaaatcatggttgacttaaaggaaattcccttatggtaaactact

SEQ ID NO: 90793 - DNA, 324 bp, Homo Sapiens
gtacaaatcgctttgagatgcctctggtgtgttgctgtgtgacatctctctggtaacattttatttcttgctatttgtttttctacattaagagtcaaagttgacctggctggcgtgggggtgggggaggcacccgtcggccccttggtgttgtccctctgtctttggttagccatacgatgtttgttctcagcactgtacaacggtccctatataatacggagaagcaatatcactgtatgagactcacaccatgtattattattcactagcaccctaggtgtgataattgaagtaaatatcttttatacaaacacaaaaaaa

SEQ ID NO: 90794 - DNA, 526 bp, Homo Sapiens
  misc_feature (11)..(11): n is a, c, g, or t
attacaaaagnagtcagaaagttaagacaaaatatgaaagtttataaagtaaaaagagttacagtgagctaagtataacttattgaaaacatttttttaatttagtatagcctaactgtgtttatacagtctacagtagtatacagtaatatcctagacctccacattccctcgccactcactcactcactcaccgactcactcagagcaacatccagtcctggaagctccattcacagaagctattggaagagatgctcaaagaagaaaaaattaccataatccaataaagaagaagacctgagatccaggaagcagatgatctgaactgcagagaaagttcaggaaagttccctcattcatgatgatgggaaataacagtaaattctgtacagcagtcttggacaacaaccaatctaaactggcacagtgcagaggcaatcaacagagaacataatattgatagaatgcctgacgcttttgattgtattcacaggaaacataaacaattggaagacagtttaaa

SEQ ID NO: 90795 - DNA, 694 bp, Homo Sapiens
  misc_feature (449)..(449): n is a, c, g, or t
  misc_feature (489)..(489): n is a, c, g, or t
  misc_feature (494)..(494): n is a, c, g, or t
  misc_feature (512)..(512): n is a, c, g, or t
ccaaagaatagttccttaaaatggatgctcctgggatgtgaataaagaaaatacgtctgaaaggtgaggatttcaaacagtagatttcttcatccttcaaatttctgacccatgatggcaggcattgtacctcatgcctcctgctcacccgcttttcccagaggtgagcacacatgggcccttcacttggagaagctgctggtgaggcccatctcctcctccccctgcagtagtgcttcaatgggaatcagattggacgggggtgtccaggctctggagggatagaaactctgacacatccatggcacttaatgtttctgtctgagggtctgaaggagtctctgcttgtcggctttgctcacaggaggagggcaaggtagaggatgatgacccgggaacaggggctgaagagaaagtctgcgctgggagctgcaggctgggcccatcangagcctgggggctcggctctggaaggggtgggaggagcanccctntctcctgctggatgcccnctcctttgcagagtcccggcatgcacactgacactgacatgcctcttcttgtttcatgatgatcacaggaacactgaaggccaatctgctggacagaactccctgggctacttggctactggtactggagtggtaaaaaacaccttcttcaccttaaaatcctggttaaattgttcttggtt

SEQ ID NO: 90796 - DNA, 533 bp, Homo Sapiens
tttgagaacaatatggatgaggaatatatgactagaccaataaaaggaagtcactgtcttttttatgctagctgtcttgaaagtatctgaaaatattcatgggtggcaacaaagaacatgagctatgcagacagagagactcaaccagactcctgtcagctgggtgaccttgggctggtcatttcacctctctgagccttagtttctcctcttgggatgggactgtgccttcctacagggatttttgtgtctgaataaggacagaatgagataaatgtacataaaaacccccgttctgcttccctttcttagatcctacaatgcctggagaacagagatgaggccaaggaattcagagcccagtagccccacctatctttaattaactagaggacatcactccagcatcttctgctctccaggcttccatggtcctggaccatgagaatacatgctcctcatcattgaagatgcaggatgagatcttactctgtagagtacaaacagtatatacatcccttttctgggcaaaa

SEQ ID NO: 90797 - DNA, 869 bp, Homo Sapiens
  misc_feature (661)..(686): n is a, c, g, or t
cgagcggttgctgatgctgaagccgagcgtcacttcggctcccacggcagacatggcgacattgacagtggtccagccgctcaccctggacagagatgttgcaagagcaattgaattactggaaaaactacaggaatctggagaagtaccagtgcacaagctacaatccctcaaaaaagtgcttcagagtgagttttgtacagctattcgagaggtgtatcaatatatgcatgaaacgataactgttaatggctgtcccgaattccgtgcgagggcaacagcaaaggcaacagttgcagcttttgcagctagtgaaggccactcccaccctcgagtagttgaactgcaaagactgatgaaggccttggttttaatgtgatgggaggaaaggagcaaaattcccccatttatatctctcgcataattcctggaggggtggctgaaagacacgaaggcctcaaaagaggagaccagctgctatcagtgaacggagtgagtgtggaaggagaacaccatgagaaagctgtggaactactcaaggctgctaaagacagcgtcaagctggtggtgcgatacaccccaaaagttctggaagaaatggaggctcgctttgaaaagctacgaacagccaggcgtcggcagcagcagcaattgctaattnnnnnnnnnnnnnnnnnnnnnnnnnnacaaacacaacaaaaccacatgtcataggcccttgagggaaagctacttgatcaaacatccgatagtcacaaatttgaaaccgtgcttcagaatcccagcacatagtaaaagacaacactgataattatacctgtcaagaagctgtgaacacatggtgtataaattctttaccaaggcaaaaa

SEQ ID NO: 90798 - DNA, 837 bp, Homo Sapiens
tcttgctcggaatagttggttctattgttctccactgaggacacattgaagcggaaaacccttggaggtaattcctttaggcagacagccagttcgtttgtgctccgccagccccctggatcatgtcgaatttatggattcctttggcatagtattccgactcggtgttttcctgggtgcagccttcctccctctccccatgcatctcctccagcagctcccgggtgctgttgtaaagggccaggacctgataggggacgtgggtcatcaccgttggctcaggggggctggtgagcctgagcttgctcaagatctgtcccctaatggcttccaccctcttcttcttgatgtggccgaagtccaaggtggtgcaagtggacagagagaggctgaccgtggcaaagttcagcagggccaggaccaccagagccctttgcaagtgcatcttcatgtgtgagctgggaagagaggccagggggacggcaaggcctggagaggaagagaccccagcagacgtgcagaaggagggaggaaaaccaggcggcctccccagatcccaaagactgaggcttggcaagaaggtgcatgaactcactgcactgcgagagcttcaggacttccaggaagcgctggcaaccctgaggacgaagaagcggactgtgtgccttgtagcgctgggattcttgtccatgtgtctaaacaggttttgctgggctctgactcccagcaggccaggtggagggcaagcagagggctgggaggggtggcaaggcagctgggagtgggaagggagctggagtttttccttaggtaaaaataaatagagtggatatctga

SEQ ID NO: 90799 - DNA, 224 bp, Homo Sapiens
tttctttccgaattaatagtgacgagtgtcttgacaccagatgctgaggaaaatcttgccgatcacgctgagttaatttcggaaatgcagaggtacacgctttctcaagcctagccgattagaaggggctgccgggcttccaccacacctcatcgaggcaatgttttctggtagagatgctcatggaaatcactgagccaatgccactcacgttgcaaagaacc

SEQ ID NO: 90800 - DNA, 449 bp, Homo Sapiens
  misc_feature (52)..(52): n is a, c, g, or t
  misc_feature (60)..(60): n is a, c, g, or t
tcgctgcaagtgtgtttgagccttggagccaggcagtgtttgcgtgtccccntgggaccntggaccaccatgaggagagcttgcagtcctcacaagtgcagcctctcaaaggtcaagggtcaggagggtcagggacaccgcctgcaaggacacacatggctcctgtagccaagtggccctgtgtggcctacaaagatctgctgagtggagaccagccaggagcagcttccccagggctgctgaggaggaagccattgtggggaacagggtcagaacatgaccctggaccgaggtcgagggggcacatccagacgcacacgaaactgaaacctgtgaaacccaggaaaatggcacctccttcatgctttccagaagaaggggtgcatggagcagggatcccggttaggtcttaaaaatctcgccacaaagcgtattttctcagaaaaaaa

SEQ ID NO: 90801 - DNA, 454 bp, Homo Sapiens
ttttttgtgcaatttatttatttctcaactttaaggttcaaaaatctctgtcctgtaacaaggtatctgttaccggagtctgattattctgcactgtgtaggtcatgtttgttatgaggacacttagcaaacaaagaaggtttttctccgccctcaatagcgtggtaacggatgacaggacaccactttcaacgaaggagacagacatttccctggcctttctgaagagcgctttttggagagacaaacctgttgctcaggggctgagcattcccgtgtgttctccctgtacttcacctaaaaatatgcctgttttccacactgtgcacacccgggggtgggtgctgggcatactccacctgcttgtttgcctcccgttttctcatcagggagtaaacacagtaaacctaacgttccaggggaaggaaaaaacaaatcattcagggcccatctc

SEQ ID NO: 90802 - DNA, 593 bp, Homo Sapiens
gcggccgcgctccccgtggaacacgtagtccacgaactccagcttatgcacacatcggaacagctcccagtggaaggcagttaggtggttggcaacgtcctcaggctccactcggtggatctctgtgtctccaggggagacctggatctcctcggggaggggcaccagagcctcatagctgtcccgagtacaggcaaacaggtggctgttgatgcccagtgcggtgaaaacacagtcctcagtgggctggagaaggaccttctctccagaggaggacacagctaccaggatgagggaatcctcacgccccgcgggctcctctgaatattgaagtttctccgtcacagagcccagaatgtcctgcacagatgctgaaaggcggctgcgtatggtcacataagagtggtcaggcatgtatacacggcagaagatctcatcagagccccggaaggccacccgggtctgcagacaggagtctatccggcggaagtggcggaagagtggcttcacctgcttgctgggtggctggttctcctctggaatctatagttccaccgtctccaccagctggtgcagcctcagagtgtcctctc

SEQ ID NO: 90803 - DNA, 493 bp, Homo Sapiens
gagagacttacataatacacatgtgagacagtcacaagtgcgagaagccatgtctgctcatttgtgcttgtcaagataatttcacacagtccctgaatctgtgaggccatgcagctctttgggaagatgctttgaagacaaaacaggatggaccacatggctcccacaccacttgcctgagtcactatgctccttaaaagatgaatgaccctagccttgacttttcctacacagaagataacgtttgacagggttagtgactatgcctctgtaattcattactaaatgcattttagtcatctataaccagatatactctggcacccagactttgacgtgattttgcacgtactgaaccttcaccacccgtccataaactgtgagctgaaacaccacattggagcctctgatggaactgctcccgggctgtagacctccatctacagtcttcggtaaggcttctgaataaaactaactttaattctttaaaaaa

SEQ ID NO: 90804 - DNA, 474 bp, Homo Sapiens
catttggctgccttggtctagactcagtgtgctaatcaccatttgtctaattagtactgtgggaccatcacaggataaatggcacagcactcaccattgcagacttgtgcccaggcccccagacacctgagttgggtgtcctttactgccttacatagaagcctgggctccgaggttcagggacctcccaaggacctaggtgtcactacatgtgctgctgctgactgaaagtgctgacggagttcataagctagtcaggggccgcagctttaaggctgggttctggtcacaggctgccttccaggtacccaggaggaagctgggggcttgtgtgtgctgaggaagggacctgaggcagaggagaggggttgccttgacagtgctgtggcacacatggcggagtccgaggcagatcttatggatgttgcatttattgcaaaattctacaataaagacttttaaaaagttaaaaaa

SEQ ID NO: 90805 - DNA, 483 bp, Homo Sapiens
ctgcggaagctggggctgctcagggagagttcgtgagggccgcgcgggctccagtccaccctgtttctccccaccctgaagagagggtgaaagagtcgctgcacccaggagctgtttggtctaaaatggaagtgacagcgggagcccctgccctctgtggcacatcggagtctagaggtgcctggctggggcctcctggctgagcacgcaccgcaagctccagccaccggcacagagaactcttccctaaaggaatctggccgagggcttgtctcccttttcccaagaactgagagagagagaataacctgttagacccataggtttccgtgatgtgtaaatgccatcttttgggggttgggaggagtaggactggtctgattatcattcttgagtctcatctaccctcttctcgaagtacatgacatgaaagttcagatcccttccactcaggattctcgccgccttttctaagaaaataat

SEQ ID NO: 90806 - DNA, 512 bp, Homo Sapiens
ccttcacacatttgaggggtcttcgtctctttttaaagcttagaggtacaagctcaggacagtcttcagtaaggaaatttgtggatttccctttggatctttcttcctctccagcccacaagtggctctagtgagacgagcatttaagctgcaggtggtggcactcgggtctcagagccaccagacgtgcaggtgggacagtggttccagctccggctgcctgtcagcgtccctcccaggtgctagccctggcaggcacagccctcccctcatgccagcaaaggaaatgctcttgatgagaggctcgctttaaagaagcccaaagcgtgtgcttatccaaggggttcagctattcctgacttcacggcttgcatgtttgatttttctaagagaaaagaggctgcctgctgggtgtctgtggaaatgagattaaaaactgtacaatctcagattttactaaaatgcaaaaatgtagtttcagtttcttaaattataagcacgagtcttcaaaa

SEQ ID NO: 90807 - DNA, 595 bp, Homo Sapiens
  misc_feature (11)..(11): n is a, c, g, or t
atgcacaattntgagcaagagttaacctgtcccatatgttatagtatttttgaagatcctcgtgtactgccatgctctcatacattttgtagaaattgtttggaaaacattcttcaggcatctggtaacttttatatatggagacctttacgaattccactcaagtgccctaattgcagaagtattactgaaattgctccaactggcattgaatctttacctgttaattttgcactaagggctattattgaaaagtaccagcaagaagaccatccagatattgtcacctgccctgaacattacaggcaaccattaaatgtttactgtctattagataaaaaattagtttgtggtcattgccttaccataggtcaacatcatggtcatcctatagatgaccttcaaagtgcctatttgaaagaaaaggacactcctcaaaaactgcttgaacagttgactgacacacactggacagatcttacccatcttattgaaaagctgaaagaacaaaaatctcattctgagaaaatgatccaaggcgataaggaagctgttctccagtattttaaggagcttaatgatacattagaacaga

SEQ ID NO: 90808 - DNA, 537 bp, Homo Sapiens
  misc_feature (319)..(345): n is a, c, g, or t
ccaaggggagggctggcggcctgcaacaaattaggagagagagagggagaaaatgccaagtcccgatttctctccacctctgctccacccaccccggtcctgtccaaaaaataaaagaagatgagaattggaagaagtcggcagaaaggcgagagcccgcggtccccggctgctgcccaggcgacgcgtccggggcgggcccgcacccgttgctcggtccgaggtccgtctgtctgcccgcggcttctcaagggaggggagggcgcttcgggcagggtctccgcagccgctgtcgcctcagagctttatcctcagatcnnnnnnnnnnnnnnnnnnnnnnnnnnntcccaaccccaacactctcatcacagccaccttcagccatcttgcgcgtattattatttcaggaataatctgtttaataaaaatacctgcgtatccagcccctcccccgcgtcctggggtccccgcccccttttaataataatctcgataataaaaacgatcggcgggccgggcagtccgtggcggcccttt

SEQ ID NO: 90809 - DNA, 1343 bp, Homo Sapiens
  misc_feature (424)..(480): n is a, c, g, or t
ggtccggaattcccgggatatcgtcgacccacgcgtccgttcttgtcctggctggaaccagccactgtgggaccaacacccctcccacactcccccagactgctcgtctatcaccaggatcgctttgtactttgtgcaaaagggtctggctgtcccttgctgttttcatctctgccaagcctattgtgcctctggctgctgtatgtgtgcgcgtgcacgtgtgtgtggttcatctgttcattcactgcacaagatatttattgagtgcccactacgtgccaggcactgttgctgagttcctgtgggtgtgtctctcgatgccactcctgcttctctgtgggcctctttctgtgcttctctttgtccccaaattgctacctctttgtcagtctgggtgtctcaggttctgtgtgtccttgtgtgnnnnnnnnnnnnnnnnnnnnnnnnnnnnnnnnnnnnnnnnnnnnnnnnnnnnnnnnntggtgtctgtcctttgccccctgtgccctctggattctctgggtctatgtaggcccctggtctgccctgggctcatcagccttcctgacctcctcctgccctccccttcactccctccctggctctgccagtcggttcccacggagccatttttagctctgatcagcatggggaatgttggcctcggcctccaaggggctttgtcctggtgcccccgcccctggtcccaacctgatcccacgagggagttgggacacaggaggattgatggtgctccccttcctgccagcgtcagaggccctggagaggggctgtccatggcagctggtctttattcctccctcatgaggcaccacgggtcgggggggtccccattcttggaagaggttgagaagactcctgggcttcagccttctcccacccagccctgcccctcacctgcctgccctcccctcccccactctatactagggactggatctcagcctctgatcagtttcacaaagtttgttccctaaggaaatcaaatcccattgtcacctaactctgaagatctaaatagcccttggatcagtacgggaaccccaaatcccacagggccagatgtggagtctgtgtctgcccccgtcttctctccatcctcaaagcccccacttctctccaggctgtttctttttttatgactgtaaacatagatagtgctttattttgttaataataagataatgatgagtaacttaaccagcacatttctcccgtttacaactcgggggattttttgttttctgatgacataattcagaccgatcctttcagatcaacaataaaataactcgagcattaatgtcggtcgagaagagtac

SEQ ID NO: 90810 - DNA, 435 bp, Homo Sapiens
gcggccgcgacagttacagcagcagttatggccggagcgaccgctactcgaggggccgacaccgggtgggcagaccagatcgtgggctctctctgtccatggaaaggggctgccctccccagcgtgattcttacagccggtcaggctgcagggtgcccaggggcggaggccgtctaggaggccgcttggagagaggaggaggccggagcagatactaagcaggaacagacttgggaccaaaaatcccttttcaacgaaactaacaaaaagaagaacctgttgtatggtaactacccaaggactagtacaaggaagagttgtttttaccttttaagaatttcctgttaagatcgtctccatttttatgcttttgggagaaaaaacttaaaattcgtttagtttagttttggaattgctaacgtttctttcaacaag

SEQ ID NO: 90811 - DNA, 543 bp, Homo Sapiens
aaaaattaatattatcctttactaaaccccactgagcacgtaaatggctccttttgggccaatggggattgcaaactactcccaggagtcacatcacaggttcatcaatttccattactgattcagctacagctcccctttcccctccaaaaaccaaacgtgtcagctgtaggaagaagtgcggctctcctagcctgggcatagggactcgcctgggcataaataatgtacttgtggctctgtggttgggagtggagacaaggaactccccaacaccggtgggggagaagagacaaggaagttgccccaaacaaggggctgggggaggggcatttcccaaaagttccattcgcgtttagggggaggcaccgcgccccggagtactcagaaacctgctccccttcttcagacagggggaagataagtttgcttcagattctaaaagttctaagaatacgaaggcctcagccgcccgtcgccgggcgacagcccgaggctctcgttttctcccacagccccgcactccgcctttgaggcgcggaa

SEQ ID NO: 90812 - DNA, 407 bp, Homo Sapiens
  misc_feature (260)..(260): n is a, c, g, or t
ccacgcgtccgcccacgcgtccgaactaaagtaagagagtattactttgctgaggcccagatagctgacttctcagaccctgccttcatatcaaaaaccaacaaccacatcatgaagctcaccaagggcctcataaaagatgctctggagaatatagaccctgctacccagatgatgattctcaactgcatctacttcaaaggatcctgggtgaataaattcccagtggaaatgacacacaaccacaacttccggctgantgagagagaggtagttaaggtttccatgatgcagaccaaggggaacttcctcgcagcaaatgaccaggagctggactgcggacatcctccagctggaatacgtggggggcatcagcatgctaattgtgggtcccacacaagatgtct

SEQ ID NO: 90813 - DNA, 462 bp, Homo Sapiens
ctgtaagctcatagaagtcactgtaactgtagtgtgtctgctgttacctagagggtctcacctccccactcttcacagcaaacctgagcagcgcgtcctaagcacctcccgctccggtgaccccatccttgcacacctgactctgtcactcaagcctttctccaccaggcccctcatctgaataccaagcacagaaatgagtggtgtgactaattccttacctctcccaaggagggtacacaactagcaccattcttgatgtccagggaagaagccacctcaagacatatgaggggtgccctgggctaatgttagggcttaattttctcaaagcctgacctttcaaatccatgatgaatgccatcagtccctcctgctgttgcctccctgtgacctggaggacagtgtgtgccatgtctcccatactagagataaataaatgtagccacatttactgtgaaa

SEQ ID NO: 90814 - DNA, 414 bp, Homo Sapiens
atatctcagtctctagtcaagcgtggtttatggtgccaaataagtgccaggtgaactcactacatctgacaaaatctcaaggaacaaagtttaccagataatatttatgattatgtgaaaaagactgaggaaatcactcaagtgatccatcatacagcacctccagttccaaagaatactgacttacttcagctgtactggtctggagctgcacattcttttcagacaactcttgttccataagttcaggtgactcttctcctgtaacagagcctccttcttagaaactatggcctcccgtttctttaagtctgcttccagctcctctaattcttggcgttggttcagaactttctctacttcttcatctaaccatttcttttgctcatccaatttctacattaaaattaaaaa

SEQ ID NO: 90815 - DNA, 909 bp, Homo Sapiens
  misc_feature (523)..(523): n is a, c, g, or t
  misc_feature (738)..(738): n is a, c, g, or t
  misc_feature (877)..(877): n is a, c, g, or t
  misc_feature (899)..(899): n is a, c, g, or t
tttgtcatgaccatctttaataaaaaataaattagttctggggtgggaaccatttcaggaggcagggagtggggctaggggctgggcggggtgatgggggagcggatgctcacatttctctttttcaccctctgcccagctgggccttgctctggagaggcagtctctttcctcctgccttcctgagtaaggcaggattggcagtggctgaccccagccctagctaattagggaggcaggggcagagatactaggcaaatgagaaggggtcaaagacacagggcggcttaaaagatgtgaggtctgaacatgagaaatgaggcttagggcacaaaactggagttggtggggagaccacactctaagtagctcaaattagcaaggaactgcagacttgctttcctttccacctaggaaagtctcaaggaaacaggtcttgtccttctcagtctgtgtaacctctttgtgaaaagtgatacacgtttgagcacacacatatccatgcagtcccaaaagcacaccntgaggcatatgtgcacacacccatcacaccaccacatgggcctgaccacagccctgaaagtcactttgtgtcagtcaccttgccaccctctgtcacctggaggaatccctgctgagactgggacaggctggagagccaggggttcagagtgggcgatcaatgggtgacgatggtggacagaaacgtgaagtgcccggacctttcagaggatctgnggaacgctccagaatgtgccagacggcacaggggtgttatagggtaaccaagcggctgacacagggcattggaagtgtctgatgtcacagcctgtgaggtggtgtcaggcctcctgagccattagagcacgtgtgagcnggtgtgcagatggtccttcgcntcctggagaa

SEQ ID NO: 90816 - DNA, 127 bp, Homo Sapiens
attgatttcattggaaacagaacaagaaatggtcagagccaaaagactgctcttaaaactgtcaaaaacattttaacagaaaaaaataaacatgactgcattatgaatgtttttagaagagttgcac

SEQ ID NO: 90817 - DNA, 1084 bp, Homo Sapiens
  misc_feature (84)..(118): n is a, c, g, or t
gcgcacgtctatcgactcactatagggcgctactctttgcagccgaacgacgagcgcagcgagtagtgagcgaggaagcggcgnnnnnnnnnnnnnnnnnnnnnnnnnnnnnnnnnnncagtcgacggtaccggacatatgcccgggaattcggccattacggccggggaccgctagtggaagaagatggcggaaggcggagcggcggatctggacacccagcggtctgacatcgcgacgctgctcaaaacctcgctccggaaaggggacacctggtacctagtcgatagtcgctggttcaaacagtggaaaaaatatgttggctttgacagttgggacaaataccagatgggagatcaaaatgtgtatcctggacccattgataactctggacttctcaaagatggtgatgcccagtcacttaaggaacaccttattgatgaattggattacatactgttgccaactgaaggttggaataaacttgtcagctggtacacattgatggaaggtcaagagccaatagcacgaaaggtggttgaacagggtatgtttgtaaagcactgcaaagtagaagtatatctcacagaattgaagctatgtgaaaatggaaacatgaataatgttgtaactcgaagatttagcaaagctgacacaatagatacaattgaaaaggaaataagaaaaatcttcagtattccagatgaaaaggagaccagattgtggaacaaatacatgagtaacacatttgaaccactgaataaaccagacagcaccattcaggatgctggtttataccaaggacaggtattagtgatagaacagaaaaatgaagatggaacatggccaaggggtccttctactcctaaaaagccactagagcagagttgctagtgaacagtttaatttccacatacgtcacagaaagagagctaaagggctctggttatcatccacagactgaccagtcaacccctaaataacctgatattaactccacaaatgttagctagattggaccatgtgtaatctgagtcagaagtcggaatcagaagagataaatgatgcgttatcactcaaaaaa

SEQ ID NO: 90818 - DNA, 925 bp, Homo Sapiens
cagtcgacggtaccggacatatgcccgggaattcggccattacggccggggatggcggaaggcggagcggcggatctggacacccagcggtctgacattcgcgacgctgctcaaaacctcgctccggaaaggggacacctggtaagagaaaggggttgagatgcccgcggttgcccgaggatagtggagaagtgggcgggagccgcgagctggttctttcgctagtgacaggtgcgggcaggtccggcggcggccgccggggcagcgggattttggccgcttctgaaatgttggggcaaaggttggactctagatgcagggtcagggttctttggcttgccagggcatgctgaaaggtatccggggagcggcggcggcggcggttctgactcgtgcggttctctttcgtcctccttccttccgtagtgccgctcccacctcaggccttcccgaatgataggttatagtggttctggttcgagtcttatatacgccgttttgacaggtcccggtgccgcggttatcacgatctcaccggctttacttctctgttcatttcctttcctagaattgtcggcgtccaagttcccttttattctgattcttggtcttccgggaggcaggctgcaggatggttggcggttctgtactacacaggtggcattgtccagggctcccacataagagaaagaaacccgtaggtatcagttccttggtcaacggacgcgacaggaggtagggaaacctgggccttatgagaaaccacgtggccttgtgctttagggtggcctgaaagaagccggacgcggatcctgtagacgtgcagccttccctctgttgaagatacgtcggcctgcaaaggacattagtccacttaggtaaataactgtatattcaactgtaatacccaagggtcacctttaat

SEQ ID NO: 90819 - DNA, 338 bp, Homo Sapiens
atagtgtgagccactgcgcccggccatggctccttaatcttgatccaaattattgttacatccagaatgtgatgaatcaaaatctcgagatgggggtccagcaatctgaaatttcagtatgccagggcttttctgtatgtcaaagtgggtttgaaatagttaatttttcttctagtctgaaatgtatcgggaaaatttggaaatcctgaaggctggaaattgaaataagtttttctaggatttgtgtctcttgctattggaaaactgatggtgaccaattcatgtttacaaataagatcctcatagatctcggtaaattataatttgctacagttaaa

SEQ ID NO: 90820 - DNA, 415 bp, Homo Sapiens
cctttagaagaagtagatgaacgagacgatgcagcagactgggctcctgatgaatgctgggaggtaacatccacagaggaaggatcataggcagactttctgttagaatggtcctcctgagggcttaaagtgctatgaggttcaagagttgattttttttctgtcgaagtcccagtccctggagaggagacaaaatcatcttcatatgaaacaccacttagaggagttgcggtggcattcaaaggccgtgatgttgatgttcctctgtccaacttgtcttcaaacccttttccatataactgataggattttgtaaaaatattaatgacactatgtggacttccctttgccaattcttcccatggtcctttgctttgtgtaccacctatgtgcccaaaaagtggcaagaattttt

SEQ ID NO: 90821 - DNA, 446 bp, Homo Sapiens
ccaataatatgcttcttaattatcaaattatagtttcccaattgggaaactaattgggggtgggttacaaaacatttgatccttgtaaatacattgtacagaatatttattttttctcaaaatgcattttaactactacattggctgtgcccaaatgagtcctctttgaatagaaagtgaacccagggcaatgacagccattcttgtcttagggattatggatcggggcatgaagtgtgcacacgcagcccaacaacgggcagtggtctctgtgctcctaggcatccagcacaggttctggcagggcacccctgctggggttgggggctggtctgtgcataatcctggactgtgatgggaacagcccagtgcagtctaaacttcaattgtgttgaaactactttaatagacaaagtaataaatcatgtttatctattgatttaaaa

SEQ ID NO: 90822 - DNA, 571 bp, Homo Sapiens
caacgacagttttggtcttcagttaagctgttaggcaattttcttcagtggtatggcattttctcaaataaaactctgcaagagttatcaatagatggtttattaaatcgatatattctcatggcttttcagaattcagaatatggagatgacagcatcaaaaaagcccaaaatgtaatcaattgtttccccaaacaatggttcatgaatctgaaaggagaaaggactatttctcagttagaaaacttttgccgataccttgtacacttagcggatacaatttatagaaatagtatcgggtgttctgatgtggaaaaaagaaatgcaagggaaaacataaaacagatagtaaaactccttgcaagtgttcgagctttggatcatgctatgtctgttgcaagtgaccacaatgtgaaagaatttaagtctttgatcgaaggaaaatagatctatgagactgaaaaacctatttgcttgattaccattcccaatgtgtaaattttgtatatatgtaaagtttcttaaactgtaaaataacaattcttgttttaatacaaaaaacattatattc

SEQ ID NO: 90823 - DNA, 582 bp, Homo Sapiens
ttttaaagacaagagatacaattcttcattactactgataaatcaatgtagctaattaaaatcatcatcctagtttttgccaggacaacataaaggtcttaattcacccaagatgcttaagacagaaacctaagaagcatcctgaacttgttctctctcacccatcacttttaattaatgaccaagttgtatccattctattgctgaatatctcttgaatccacttttctctatccttccgccccagttagggcggcctacacctgaggccaacaaacttattctgtaaagagtcaagtagtaaatcttttaggtgctgtgacaaaattgaagatgtaatatacgtacttacataatgagagaaagcaaatttccacaaaaaaattttattgaagaaatgttaaatatgctaatactaataattagatataatcttttataagtttaccactaagaatataattattttggagggagataacagttcatttaattggggttcaaagttagtgttccctatcattaaaactgagagcaactgttcatctataaatgctgatctgcaatgacattttatgtatt

SEQ ID NO: 90824 - DNA, 478 bp, Homo Sapiens
tttactgatgaaaaatcatttatactaaatgtgggcacagcacaaaaataagatgttttgtggaaccagtgcatccctaagttcagatgatgatgattgctcttgatgcgcgtagaaatgccggcgctgtctccattcggccagcgtggagccacctaccacggcagccgtggagggagaaaggggccctgcgggtattaaatggtcttcttccccggactggtttcacacgacgggattttctcacggtgaccctttttgctggggatttattagggaagcgctggccaactatctccttcggctggtcgtgagcacacctttagcgatgtggctttactaggaatcctaatattttactagggagccgggaggtggggagggccccagaagtcgggatcctggataagggtcttctagacggtgcacaaacgggtccccggtggcgcgggctccttcacaatgaagaagaatcaga

SEQ ID NO: 90825 - DNA, 636 bp, Homo Sapiens
  misc_feature (35)..(35): n is a, c, g, or t
  misc_feature (91)..(91): n is a, c, g, or t
  misc_feature (220)..(220): n is a, c, g, or t
ctggaacaaagtttccagcggtcccaggagatacnccagggcctgaggaaggagcggcaacgcgagctgagggagaaggcccagaaggagnaagagcagttgcagcaggccaggtggcgcgcaggggagtcagaggaacagaggaagatgcgcaaaagaattctggtggagctggcggatgagaagatccgacaggccaggagtcacgtgcacaagaccnctagggacaaggtgcagcacctccgggagctcaaccacctgagggagaaaaaccaccacatcctgaaactgaaagccgagaaggaggaaaagtgtcacattgagggcatcaaggaggccattaagaaaaaggagcagagggtgcagcacatttcccaagggaaagacccaaacttccaggagttccagaagctccctcaggcctccaggagagaggagagagcgcctcccaacagctcccttgatcagatggtactagaggcccagctccgtgcctgtcagcagaacaggggttactgagaaccaaggacgcctggcttacagtgcgcagccagaaggagatgtggcaatgtgattccttttgtaatctgattataattgaacattgattttaaaaaagcatgtaaaatagctgcc

SEQ ID NO: 90826 - DNA, 638 bp, Homo Sapiens
gggccgccgagttcgacgggaggtggcccaggcaaatagtgtcatcgattggcctatgtcgttatggtgggaggattgactgctgctggggctgggctcgccagtcttggggacagtgtcagcctgtgtgccaaccacgatgcaaacatggtgaatgtatcgggccaaacaagtgcaagtgtcatcctggttatgctggaaaaacctgtaatcaagatctaaatgagtgtggcctgaagccccggccctgtaagcacaggtgcatgaacacttacggcagctacaagtgctactgtctcaacggatatatgctcatgccggatggttcctgctcaagtgccctgacctgctccatggcaaactgtcagtatggctgtgatgttgttaaaggacaaatacggtgccagtgcccatcccctggcctgcagctggctcctgatgggaggacctgtgtagatgttgatgaatgtgctacaggaagagcctcctgccctagatgtaagcaatgtgtcaacacttttgggagctacatctgcaagtgtcataaatgcttcgatctcatgtatattggaggcaaatatcaatgtcatgacatagacgaatgctcactcggtcagtatcagtgcagcagctttgct

SEQ ID NO: 90827 - DNA, 460 bp, Homo Sapiens
  misc_feature (267)..(279): n is a, c, g, or t
ctacctgcaaacttatgctggggaagaaaaatcaagtggagttttttaaggagcaaactgagataataagagcatcacttatttaaaaagattatgcaggtttttccagcataaccaggatgacacttgcacttgtttggcccgatacattcaccatgtttgcatcgtggttggcacacagctgtgaaaagaagatggcatgcattatttctaggtcaacgaaacaccaatcatatagcattgatgtcgtgcactagtttaataatnnnnnnnnnnnnnctagaacttacaacaaagtagccaaagtatacaaaatcagtttcctataaacactctgtaagctacacacacacacatgtgttatgtatgtatatgtgtgtgtatcagttggggctgaaaaaaattttaaattcaaggacaatactcaaatagacaaataaaactaggtattactatgaaa

SEQ ID NO: 90828 - DNA, 914 bp, Homo Sapiens
caaagctcaagtctatttaaccactatattactctctgtgcacagaacaaaatgtcaataagaaattttacttggttttacctatgttttaaagatctaagcagataattttttcaaaatttatccagattttctgaatcttcttctaaaggaaaaatatcttatgcctgcataaatgaaaggagaccaagattattgacttactcatttagcaaatacatagcgagcccctatcctccactaggcattgtgctaaatactaaggatatagtaatgataagatacataatcctttacctcatcaggctctgctcctagtgggtagacaaaagaaaagcagaaaaagatgacaacacaacgggctgaaatgaccataataccggtatgtgccaggtactgagagaggacgaaggcttcacgaacgtgtttgaaaccaagacttgataggaattttactttaacggaagatagcggtgagggcttgaacactaaggaattaatgagagatcagcccctttagcgactcaaagcatattataactccagctggtcaaaaagagaggaaataaataatataacaggaacaactggaagagcaagtgcagcatcaggttggtgcatttcttctgatcaaaaaggtcgaattgcaactggtcattgaagagtgtgctggtgacagtgtgcaacctttgcagtagctcctggactggccctagactgctgtcaaattaaaccagcactgtaaagaagagagcaagttgaatgaagttgaatgaaggggcatcttaattccaatcctggctctaatgctgactgtaagcatgaccccggatgagttattcactctctcagtctcagtctcctcatccacaaagcagggatcacaataaatgaatagcacctttcacagaaaa

SEQ ID NO: 90829 - DNA, 424 bp, Homo Sapiens
attgcaattctgctgttccagaaacccacagtaaccgaacaacttaagaagtgctggaataactatgtacaaagacattgcaggaaaatctgcagagtaaatgaagtgcctgaggcactatgtgaaaatgggagatactgttgcctcaatatcaaggaactggaagcatgtaaaaaaattacaaagccacctagtccaaagccagcaacacttgcactgactcttcaagactatgttacaataatagaaaatttcccaagcctgaagacacagtctacataaatcaaatacaatttcgttttcacttgcttctcaacctagtctaataaactaaggtgatgagatatacatcttcttccttctggtttcttgatccttaaaatgaccttcgagcatattctaataaagagcattgccagttaaa

SEQ ID NO: 90830 - DNA, 499 bp, Homo Sapiens
acattgacagaaactgctggaatagtctgaactagaaaacgtgtaggctactttagagacttctgaaggcattctgaaaccccaagtcaggcacggtcagcaagagcattcaagatcctaggcaaaattgaaaagtaacagtttaacaccttcctcctcttccctgaacccaagaacttcttccctacaacctgccctgtcagaatctcccaccttaccaagaatgcctccctctcaaggatctgaggttccctcataaaaatttcccattttctggggaagaagtaaatttatgttgatttagcattaaaatatatcatcataaggtgtgaatgactgcttaacaaccatgcatccccaaagagacaagttaacccaaatgatctctctaactgggggatctgtgaggacaacttgggaagaaggggaatggagattctcttttggtactccttccctacaccaggcaaacatataactaaatactagatactttaaa

SEQ ID NO: 90831 - DNA, 402 bp, Homo Sapiens
agatttggagccaggccaggcaggggccacgtgtgggccagtcagccactacaagatttttgctaagctttgggctgttggcagcatcttggacctcatgcctgggcctgaatgaggctctttcttaagtgtttttacaagtttgtgttttatttatggagtgacttaccccttccattcagagcagccccacccagccagcccttcagcctctgggctcctgctgcttaaaggcagagccgcctggttggtctccaccctgtgcattgggagcccagccaccatgctgacgggtatttttcctcataaagtttataaccagttatttatatgaatctttgttatgtccatttgtttgtattgcgtattttgattataaaataaagtatcttaacagaaaaa

SEQ ID NO: 90832 - DNA, 661 bp, Homo Sapiens
ggggaccaacagcctggaagagaagagtcgccttgtgagtgccttcaaggagaggcaatcctccaagaacctgctttcctgtgaaaacagcgaccgggatgcccgcttccggcgcacagagactgacttctctaatctgtatgctaaagatctgcttcaggctaagaacggtaaggagcaaaccgtgcaattcctcctggaagtggtggacatactcatcaactatgtccgcaagacatttgatcgctccaccaaggtgctggactttcatcacccacaccagttgctggaaggcatggagggcttcaacttggagctctctgaccacccagagtccctggagcagatcctggttgactgcagagacaccttgaagtatggggttcgcacaggtcatcctcgatttttcaaccagctctccactggattggatataattggcctagctggagaatgcctgacatcaacggccaataccaacatgccatcaaacatgagggagtggtggttgctacggggaagggggctcataacaaaaccccagcctggattgggacctccaaaggcggagggaaactgcccaccggggttcccagggggcctccttcttaaattttcagggggcctccccagggaaaatgggacattattcctttttggg

SEQ ID NO: 90833 - DNA, 722 bp, Homo Sapiens
aaggtaagctcgcaccgtatagaaggctatatggaactgcttatcgatgtccgtcgactcatcaactacattgttgtccgacatcagcagcacttgtagcatgtgtcacacatgtgggcttgtggccactcccaccctcatgccggtctgaccacagcagcagtggtttaactcaagcttgacacaggtgcgctccatgatctgaccacctgcccagccgtggagcctggcacagaccatgattggtggctccgtggccaggtttcatctgagcttgtggggcccgggagctggctggcggtgaggcctcgaggctgcggtcgtgtccctgatcactcaggagtggacgagtggaaagtggaatctgtcgctttgagcttgacaggcaaacatccgaccagcccttcctccgcccggctgctccagaaccacctgcggcgagcagggctttgagaacatcgggccgtggtttccgcacgtcaggccgcctgtggcctccgccaagcgtctgagagtgaagcattgctgacgcactccacgaggtcctggccagaccccactcaggacatcccgctgcacaggcccctggttgctgggtcagcgctgccaccaggctcagactcaccccagggccctccttgggccacctttctctgcctccttggtcaaggcccagacccaggccccaccaggccctgcctcctcacactcgcggcggccgc

SEQ ID NO: 90834 - DNA, 932 bp, Homo Sapiens
tttttgaaagcttagctaaatatttattttatcttgtgtgactgggccttccaaatgtatccagtcttaagtggttccccaaattccagctcttcgtgcgatccaaccctaggtctggctgcggaggtggctctccattgttcttggaacgctgcatttttgtctgagtgatgggtgggcaggaagttgttaagcaggtgttctactagactttgagaaaagaagattaaagcagacaagcctacataatcaccagttataacctggagaaaagcaggaataattttcttaccctcattgggattacgtcacccggcctgtagaccatcaggggcctgagaggcattagagtctctatcgtagaagaacgaggaaatcatccactgccagagacagtgcattcacagcccagtggcccctcgctcactctccgggagttggcagggacccagctccaggactgcaattctgtgacctttggagctgtgcttcctccactcctgccggtggctgagccctgggtggctgccctctgcagccctggtcggcagaggcaatgcagaggctggctgttttgtgacggtcctaggttccccactctccagcagctttcaggggatgttaaacattcatttacccaaaagattttaaaattcccccttggcccctgataagcaagaaacttccatgcctctcaagttgttgactgtggaaaacgtttgcagacctttgaaaatgtggtttttaagagagaagaatatgaaaaaaggtggtgggccttaaacactcatccgcttgacaagaaactctcaaatcagtaccagtaaccagtcattataaatttgaatactactactttttgtctttttggttagagaaatatacaaacagctcaagaaaatggtaaattataaagatggaagtgactattg

SEQ ID NO: 90835 - DNA, 326 bp, Homo Sapiens
tgagccaccacactcggctacctgggagctttcaaatatccagatgttgctaagaaccgtggttggcaatgtttaaatgtgggatttaaccattttaaatgtgggatttaaacattttaaaaaatccacaactttaaaatgtggacacctactttttaaaaattataacagggtacgagctagatacaacatatctttgggctgaatttggcctggtgagttcattgacaacagccacaccctccctttgtcatggtggcttaagatccctcaaagaagtacccgatcccaacccaggctggaaactacgtgttcactctccaggg

SEQ ID NO: 90836 - DNA, 738 bp, Homo Sapiens
ttaaacgttagcttgtaaagtttaaaggacctttccttttcctttacggatttgatcagtatgaagtcataaatcaaagaaaacagaattggatttgcattcccaggcgggatggatgctgccaggagatcacattgcaaatagtgaaaacagaggcattcggtctatgcctgagtcctgtgtataggatcaatcttcctttaattccgcagtctcctcaggcaatgtgacacgggatgcagtttgcagctttagtgcctttcttcgccttttaaattgccacgaatcacagatggctatttagtggccctacaatgctgcaacacatcagcttgcattttagtcttaattatttgtttcttggataatgggcagagttttctgtatttgtatcagctgttagtggtgaaatagggctctagttaaccttttatttatgaagtctaatttagtgttcccgtggctagttgcaagcattttacagtgatcacccagtttaatcttttgtatactttttagaaatgccaagagccttactaaactgaagcagatttatgatatagtgataatttaggtagatgttagtcttgaagctcttattttgtgtgcaactgattataaaaacaccttaaccaagtattattacacacatgatatctataactaggactttgataactgttatataaagtgtgtaaaatttgtatgaataaatttttgtaaacaatgcaaaaaaaa

SEQ ID NO: 90837 - DNA, 450 bp, Homo Sapiens
ccttttttagtccgatctggttttcctccagatgggtcagagccctaggccccctccctcctctgcctgctgccggcagtatccttcagcatcacaaagcagctcagtagctcaagggaaaggccctctcgccctggctagggctaggaggccaggcgcacaaggcctggtaccccctggccatgtcggagaaggactggcatgcacccttcttgcttcaagtattaatattctctttgggtttgcagggtttgtgctgtgagttagggggtgagggggcgaggtgcgaagactggggcatggcaatccctgttcactgcccaaatctacatgctgtcaccagatggcagcattccccacttttcctggatgcctgagcaactcccagccatccttggggctggatgtcacaatgtaaacatgaccacacaataaactataatggcagtg

SEQ ID NO: 90838 - DNA, 341 bp, Homo Sapiens
taattcttgtacttatttaaggaatgtactatgataaggagttgtgtcccatcttacaactcagacaggatgataagcatcttcctttatgcatctgcaatggttttagtaccacaaactggaaggaagcttaaaaagatgctatgcccactggcccattagtagcgtaaaaaaaatttctgaaactgttgaatagctccattcaaaagctgaactagtcctcctaactggcttctagttattttgtttcctttaatagcctgttgcacatgttttaatagtttaagccttatcaaattcttttctggatgtagccaaaaataaacaaaatgtcataaaaa

SEQ ID NO: 90839 - DNA, 559 bp, Homo Sapiens
caggtctactatttttcctctggctcaatccctccatctaacactgacccagacctctgcagtggcaggatcctagcccagttcccttctccatgcctgcttctctcggctctaccatggacagcaccactggggtgcttttcaaatgcaaacctgggctccagctctctccaacacagtcctccctccttacctggaggagccacgccctccctaaccgagctctcagctccctgttagcctctcgacactccatgccacttgtcacaaccctgcatctgctcatgtcatcatcccctttgcccagaatgctctctcccctccttgtcacgtgcttccctcaggcacatccttgaaggttttgcaacaggctccccaggcttgggaagtgggccctgacacggccctcctcagcgcgcccactgccctgaccgccctgactagttgcctgcttgggggtcttgactctcccattaaccaacacctttctagagttacagcctgaaacttactcacctggcatatagggatttaataaaggtttacagaaagaatcaaa

SEQ ID NO: 90840 - DNA, 764 bp, Homo Sapiens
aacggcagtactcataacggtttaaggtagcgaggcctgggtggcgaattcggcacgagggggcagcgcccccttggccaacgccccgccctcctctccatcttccgacgctgggctctcgcccttcggcgtccgagagcccctattgctgcccagctggccccaaaagcgtccgaaagtcccctcttggcttatttcagagatgccacgcaataaagaaaaggcggctactttgcattccgcagctgctgggacgcccgggctgcgagcgcggctcctggattccagcctcccgcccttcccaggcgctggaatggacacggacgcccacagtggcgggccaggtagtgccggagtcgggggcccaggccgcggcgccccgcgcctcatcacttaccttgcctttagctatcaattccatgatgtagccaaattcactcatctccccagactccgacatgtttacaccccttcacaaactctggaggaccgacgcgggtgtatcgaatttgtcctttcttttctctttttctgtttttagtctgagttttgccgagctccccgcccataagctgttaaccaggaaaagaggggaagcgccggggaaagcaagaagcgggcttgggtgaacctgaaggccatcgagggctcccgggcagcctcgcccggcttgctaggatccgggtgcagcggtcggggctgcgcgatctaacggaacaaacgagggcggcggcggcggcagcagaggccgtgaaagcctcagc

SEQ ID NO: 90841 - DNA, 497 bp, Homo Sapiens
tgtcctctcagtgctttccaggggccttcctgtgcccagcttctgggcccactcctgtgaggtcactgctgcagggccttcctgcctggacagagttggagctaggccactagaccaccccacagggcatagccagggggaccagcacaggaggggacggagaggagctgcaggagggctggggggaggctgcagtctcggaggggggcctcgccgggtctggaggggacagcagaaacagcccgttccccctgccgcctgagggcaccagggagagggctgtatgtccctcacgccacactgtgtgtgcagtcagcagtgtggccacagatgggggccactctctcaacctcaggtgtcctcagggcccagaccgctgctgggcacagccaggctggctgccagctggttccctgccccgtggctgggggacagagcagcacgtatcagctgggctagggtcagggggccactggtgcgcagcctgacacagcctg

SEQ ID NO: 90842 - DNA, 426 bp, Homo Sapiens
aaataggtaagcttttcatttcaattattgtttaatactttaaagctagtttaaacaaagataaaaccaaggagaaaagtaaagcattccttactttacatacagtgcctcaagtgccacatacataataacatatcacaaaaaaatgtttttggtttagcagattacagagcaaacctaaaagtttatacaaagctaaacactgcctcccttctgttccatttattggcttttaatttgatcttggctctgtattatccttctataataccactgtgtgacatctatcagtcttctaagtgttccgattacttatatatacctttttctttaaacagctttgtaacatttgagaacattcatccaatcttttccattagatatgatatattcatttttatcacaaaatgctcactttcctgagct

SEQ ID NO: 90843 - DNA, 549 bp, Homo Sapiens
  misc_feature (43)..(43): n is a, c, g, or t
ctaacaggagtgctgtctgatttcccaacgctctgcaaaacanacagcctggaagggtggctggtggaaggtggtttttagagagagacttgtagataacaggaaagtgaaggctgtaaggaaggttgtaattaaacagcacatggaaacacaatcacattattgtcccattccatagggataatgatgaccacttcagtgggaaaaggagaggttttaagtcattagggactatgggccaccttttaggaagatttattttcaaaggttaaaatagtgttttggcaattcaagtttcattttcagaaaatgtaattgatgggaacctcagtgactctggatgaataagatgctgttgagtggctctgacttgggccagccgtgcttctcacaggaccttggagaccaaggtcactgtgatctcaggttcagggggcaagtcctctccacacagccctagttggcctcacagctgaaaatgtctcccttactgttggactcctttgttcacccacatgagtttgtgaataaatcctttccagtctgaaa

SEQ ID NO: 90844 - DNA, 455 bp, Homo Sapiens
agtcagagaaggaagaccaaaagcaccagggcccttcatattattaagctgctaaattaactaatcttggaaacttctagactctacaattcttgttgtatgagagtggattgacaattattctctggactttttggtaaccaagaacttctagcaactaaccctggcatgaccaccagaatctgcagggctgagagaagaaagaaaggcaaaagtggatgaatgcagctgaagatgctgtggaactcctatcacattccaagtgctgtgttgatatctggagatatagacaagatcgaagcagatgcagtctttcacatgaatatttgaatcaggcacaggatgcaggtgatgggtattggcctcagctttagagaccagaggttaaatctcagtgctgcctgccacaaaacgatccatgtaagtcaataaacaatgctttttaaaatataaaa

SEQ ID NO: 90845 - DNA, 654 bp, Homo Sapiens
  misc_feature (42)..(42): n is a, c, g, or t
gcatggaggctgggagatacaccccggtctcaggctattttntagattgcctgccagaaagcaggttgttgttcagtccattgaaggtctctttcaattcagcagacgtgtcctgagcactcactgaggcaaggctgaagaatgcacccggggtccccaaaccagttctgctgccagaaggctttctccaaggtgactgaatttctggaactgacagatggagcctgagggaccttggtaatactgtgtcagctcccgtggccagtcagggagagcagagtcttcagggctgtatctccgcaccctgcccaccatcttccctctgacgcagaccaagcctgcagaccagtgagaggagaagaaatgaagtcagctgacccacagttggcactgccaggactggatgctgctggctgttggccaggatctgatccactcctttgagagtgtcaggagctgtggaaggtatggggtggggggcggggttcctcccaaggcaaagttcctgtggaggtcagatgagactgagcttgagaactgagttatgaaaaaaacctcaaggaacatccttcacctgccctctatggctccttagcttcttgaggttctgctgctcagagcctagtgtgataaataacctctttctctttaaaa

SEQ ID NO: 90846 - DNA, 330 bp, Homo Sapiens
ggtagcaggggagaccctaaggcgatgggagctttatggtgctgagtgctggggagacaggatgtgagtttcatacagatcagggtgcagcggtggagggagggccgcctgcatcagtatccccagcaaggtcacccggcactgctgcagacaccttgaaacgtccagcacattcctcactgtcgaacccaacttcaggacatgcttgttcacggaagagcctaagatcagcggcacttcagtcttctacggggttttgttgggagctacctatacaaaggaggccacaccacacgtgcgtggtccggcagatccggcaagatcaactct

SEQ ID NO: 90847 - DNA, 590 bp, Homo Sapiens
ttcttctcttcagaagataattttcaaaagggagcaatgctgtgaatgcagcttgcttctctctacagattgagaagtccagcttcaaaagttacttgccacttaagcaaggaacttgtcaagagatcatggttcatgttactgaaaagactttaaggatttgtaaggttaatccatagattgctgagaaaaatggaaatatttttatttttacagattttgcacttctgaattcaggttaaaaactaacttgtatttagtctgcttagaggactgtgacttgaaaatttttatataccaatgagctttttggtagcgtccacaatgtttaaaatatttaataggcgagatccgtgttctccatttattaatgcattgtagaccaatttaactgctgtgtttcaggaaaattcttcctagtttaataagcaagctaaaagttttattttttatatttagtgcttaatctttgcctcatgttatgtaaaattagcctgcagatattttctctcaattctgtagactctcgcaagataaacattcaaacagtgaaacaaacaataaaataaataaacctaaggatgtaaaaa

SEQ ID NO: 90848 - DNA, 699 bp, Homo Sapiens
  misc_feature (17)..(17): n is a, c, g, or t
  misc_feature (55)..(55): n is a, c, g, or t
  misc_feature (89)..(89): n is a, c, g, or t
  misc_feature (101)..(101): n is a, c, g, or t
tttatgtctgaagatanaatgaagtttatatcttctccacatttatctggtccanacataatgatataggatgttttatcataaaagtnttccagaatcanatcatcagtgtctgctaggagtttaatgtatgcacctccacaatcaataccatcttgaaaatttacttaatattgaactatcaagggtttatcagcaaaaatgaatggttctgctaatacagcagatattgcatgatgctttgctctagattttaataccagtcctctgtcaccaggtacctggttttctttcaactcttcaatttcccatcttccatcgtatattgaaatttcctcatccatgtcatctttctttgcttttgataagacccatccagccaaccttccactatcaaaagtttctgcaaaatatacttctcctataggttgaggtgtcttatatttaatctctgaggaaagttcactttcattaacatcaatttcttctgaattttcttcaaagtcttccgtctcaacatcatcatccataaattctgcattaattgagatgaacagaagacccaaacatagccaaaaggcttggaaatgcatattgattatctctcttgcggcctgttttcggcagtgacagctcagatgtccaagtcgttgccacttggtccccgcgtctcttcagaccagtcccgccggcggccgc

SEQ ID NO: 90849 - DNA, 318 bp, Homo Sapiens
acagagctgtcaatgtcctctttcccttccttctcatttgctgtttcaatagggcttcatcagcctgagttctttattagaattgacctgcatcaatccagtgcccccctcataccacctactagggaaggctgcattctacattacggtcttcagggatcctctctggggccccacatgcttccctttttgtttacctgtgtctcggggcaattttaatcttagtcttatacttttcatttaagcaggttaggctacactatacacttacagattttgccagtagaagctttgagacttcacatcttgtaaaataaa

SEQ ID NO: 90850 - DNA, 542 bp, Homo Sapiens
ggggcctgccaaaggctccaaacagcatctccatctgcctctgacacatcgagcaccgtggagtctgctgggtcatatggccagaaggggaaagcagcttgcacagcagcctggacctgttgcagagccttcccttgttatgggcaccactcaaaaatagcagctttttggatcactaaattaatgagccggagtcacacacccaaatgttaggggctgcctcccacaaaatcatatattgaagtcctaacccgcagcctctcagaatgtgactgcatttggagattggggatttaaagggtaattaggataaaatgagattaggatggaccctaatccagtatgcctgttgtcctaataagaagaggagattaggacacagacaggcacggaggtaagaccatgtgaagacccagggagaggacgccatccgcaagccagggaaagagacctcagaagagactaactctgctgacaccctggccttgaacttctaagctccaaaattgtgagaaaataaatttctgttgttaaagcaaaaa

SEQ ID NO: 90851 - DNA, 759 bp, Homo Sapiens
gcggccgcccaggacccgcagcagagacgacgcctgcagcaaggagaccaggaaggggtgagacaaggaagaggatgtctgagctggagaaggccatggtggccctcatcgacgttttccaccaatattctggaagggagggagacaagcacaagctgaagaaatccgaactcaaggagctcatcaacaatgagctttcccatttcttagaggaaatcaaagagcaggaggttgtggacaaagtcatggaaacactggacaatgatggagacggcgaatgtgacttccaggaattcatggcctttgttgccatggttactactgcctgccacgagttctttgaacatgagtgagattagaaagcagccaaacctttcctgtaacagagacggtcatgcaagaaagcagacagcaagggcttgcagcctagtaggagctgagctttccagccgtgttgtagctaattaggaagcttgatttgctttgtgattgaaaaattgaaaacctctttccaaaggctgttttaacggcctgcatcattctttctgctatattaggcctgtgtgtaagctgactggccccagggactcttgttaacagtaacttaggagtcaggtctcagtgataaagcgtgcaccgtgcagcccgccatggccgtgtagaccctaacccggagggaaccctgactacagaaattaccccggggcacccttaaaacttccactacctttaaaaaacaaagccttatccagcattaaa

SEQ ID NO: 90852 - DNA, 385 bp, Homo Sapiens
gcggccgcctacacccggacctgcagtccaacctcctgcaggtggacagtgagttcacagaggaagagattgagttcctggaagccaggggtcaccacgtggagaaagtagatgtcttatcctgggtccatggcagccgaaggaccaacaacttcatcatcgctgttaaggaccctcggagcccagatgcagctggagccaccatcctgtagagcagcggggtggggcggggtctctgctcccccactttgcatgttcccagagtccctccttctcccaggtttggtctcagggggaccccagggatgccccagatcaggggccagaggggatgcttagcaaacccaatcccagagtaactggaaaattctccatcaggaggcct

SEQ ID NO: 90853 - DNA, 479 bp, Homo Sapiens
atggggccgaagtctggggctagctgggcctccggggcaaccttagaaatggtagtcagaggggacagttactctgagagtttacttgtctctccagtccccacaaaacaaggtaaatgaatccaaattctcttcaggccttgggttcactgggtctgagttgcgatttggcctgagcctcagtccctgcacctcctaggttgtaggctgggggagttccaggagggcagttccagcccagctgagctgcgctcctgagaggaggagaaccagaaaatcccaaatcagccatttccgtacaatagagcacaatttcatcttatccacaaaagtggcaagagaaaggtcagggaatcctttctcttgaagtcctataatctcgggcaccacctggggtgtctcaggagtggggtggggtgaatgggagggatgtcagttattatagcaacctataaccatccctctagcatgaatgtgtc

SEQ ID NO: 90854 - DNA, 484 bp, Homo Sapiens
cagtatccggtagtggtaaaacctcacagtttcctaattgcaggtatgtaaataccaaaaaagtcctgttgtcagccctaggtttatctttgaaagcagttaaatgtgcaccttggtcttcctccgtgtgttcagattccttctggttaaagttcttattcagagtcatctaaaagaaatttctaacatgatgtatggtttcttgaatgtcatgagtggctgcgtatattgctttgtagcaacagattgtattaataattaatagaatacctaatttttttggcctatcctctttgaactagaaatgactacttgagggctatttcagagaaccaatatgaaatgtttttgttagtacaaaataccattgccttaaaaggtttcaagcacattttcttttctatttgagaacttaaattgctgacttgtattcgttaagcaaccttagaaataaaccactgcttatatctgcatgaatattatg

SEQ ID NO: 90855 - DNA, 533 bp, Homo Sapiens
  misc_feature (26)..(26): n is a, c, g, or t
  misc_feature (35)..(35): n is a, c, g, or t
agagacatctgtaatgatgttgcccntgttggtcntagttctctctggccaccagaactcatctgcttcctcctcccacgagaaactggggagagatggagacagcacccaaagcctgctcttctttaagctgtttcctctcaactgggctttccatcgtgccattgatgggctaccttggcttggccaagccccatctcctattgtcgcagtgtgaataccagaagaagcaaacagcctgcagatgggacacctattcacccctgatgcaagtgtgactggagctattgaatgactgatgagatccgttgtaacaatcattctggcaaaggtgtggagatggctcagaggattgagctgggagcagggtggcctcagccacatgtgctaccatggctctgagcaggcagactgagcttgttgagggagggactgtctgattcagttacaattaccagatgagaatggccaattatgagagaattcagagtacaatcaagtccaataaatgccatagtaatgcaaaggacaaa

SEQ ID NO: 90856 - DNA, 557 bp, Homo Sapiens
gcggccgcgtgcgcggacgcgctgcgccctactgcgtggcggaggtcgccgcaggccccagcgcgctgccggggccgtgccggcgaggatggctcagggacgcggtcacctcccgccgcttgcagcagcgccgatggacccaagccggggcacgcgccggcgacgacgacccgcatcggctcctccagcagctcgtgctctcgggaaacctcatcaaggaagccgtgcggagactccaacgagccgtcgccgcggttgcagccacgggccccgcaagcgcccctgggcccgggggaggccgcagcggacctgaccgcattgccctgcagccctcaggctccttgctctgacgcaggcctcctggaggaggaagtggaggccgctgcgtagacccaacagcgtccagttcctactaactctgagctgaagccgacgtcgccagcctgggagcgaccactttggctgcggggaggcgcgtggggagagatctcaaccagagaagttaccagccgcggcgaggcgtcgggagaaaacttaagcgtggagaaatgtatgcg

SEQ ID NO: 90857 - DNA, 559 bp, Homo Sapiens
taggcttcaaacttgtacgacatgtcactgtactgaatactgtaggcaattataacacagtggtaagtatattgtgtatctaaacaaacatagaaaaggtaatgcactgtactatgatgttacaacagctaggatgttgctatcaatagaaatttttcagcttcattttatttttatgggaccacctttgtatatgtggttcattgttggccgaaacacccattctgtggcacatgactatgtatttattcctcattattcctttaatattcatctcttccaggagggcatgtcatggacaatctctttttcttaccacaggtcttaggacctggcctagcacctggccaagaactactggcatacctccttttattgtgcttcaatttattgtgctttgcaaatactgaattttttacaagttgaagatttgtggcacctctgtaaccagcaagtctattggtgccattttttcaacatcatgtgcctgtttcctgtctcgctcatgtcacattttggtaattttcacaatattaaaaactttttcattattattaaa

SEQ ID NO: 90858 - DNA, 141 bp, Homo Sapiens
gcttcttaatctgctgcagagtatctagatcagggtgtccaatcttttggcttccctgggccgtattggaagaagaattgccttgggccatatataaaatacactaacactaatgatagctgatgagattaaaaaaattac

SEQ ID NO: 90859 - DNA, 207 bp, Homo Sapiens
atgctggttctttaacactctaagattgaggaccatgaatatttccaggaattgattatacaagaagtaattagaacttagcacagatattttcttcaactgctgatagtcattagggtggaatattcactaattgaaaactatttttaaaagtgagtagaaaataaaaccttcagaagaggagaaaaatggcataaaattttaact

SEQ ID NO: 90860 - DNA, 1089 bp, Homo Sapiens
tggaaggccattccccgtcttgccggaccttcgtgccactgcctcccatctgctccaactccactgtgcatagtgaagagaccctgtcccacctgagtgacacaactgtccgcctcagcccagagcgcccatcagatgaggactccaagagcacagagtccatcttcctgacccaggtgagtgaactgccttcctccgtcatccataaggatgatttagagttaaaggagaaagaccaaaagaaaccaccaacggcacccagagaggtgaaagggactcggaggaaactcccaactgccttccttcccagcaagtaccacggctatgaagaactgctgacagccaagcctgatccagccttcattgagccaaagggaatccagaagaatgcacaagccctgcaacaaatgctgaagcacccactcctgtgccactcctccaagcccaagctggacactcttcagaaaccctatgttcacaaagagaaacgggcccagagaatcccgattccacccccaaagaagactagagcccaacttctggatgacatcttcattcgcttgcgggatccccggaacattacagaggctccactaggtgctgtcctgcaccagtggacagaacggcggctggtgaaccacaagcagtacctggaggccaagaggctgttgaaggagttccaggcacgttaccggcagctggtgagtggctctctgcgcacagtgttcgggactaccccgctccccatggcctgcccagcgctgagtgagagccagcccaagttcggccacttcctcgagttcatggatgagttctgccaggagcccacagccagtgactcacaaggctagagctgtgcatgggggctgtgtgcaccacccggcctgtgccccagctctccccgagggctctgtgccctggaccgcacctcaaggttgaccagccggccacaggcctcagagctcagctgggccccacttgctggccacaaggtggcatccccttgtcaggatctcccctccttggcccaggcatgacctggtgcctggcccagcggcaataaagagtgggtgcacagggcaaaaaaaa

SEQ ID NO: 90861 - DNA, 706 bp, Homo Sapiens
gaatcccagtccccccagggggcctgggaggtggcccctcgaggatgactccctaagcgcctgggaccccaaagtatgaagccaaagagggacctcggccggtgtgagggccaactgtagctcaggagcctcgttctcaggccggacgctgtgtcacccctcattctggccgctgtatgaagcagcctcgggcaggggtctcaggcccgtggcccctgccacagggcactggaatggacagcaggcgcccccagatgcagggttcccggtggtgtgctgtgaagatgtcttcctctcggaccctctgctgccccgggggcagcgtgttcccctgtacctgtccaaggccccccagcagatgatgggctccctgaaactgctgccgccgccccccatcatgtctgccagggtgctcccccgcccatcaccctcccggggcccctccactgcctggctcagcgggccggagctgatcgctctcactggcctgctgcagatgagccagggggagcctaggcccagctcctccgcggttggccccccagaccatacctctgacccacccagcccctgtggtagccccagcagttctcagggtgctgacctctctctcccacagaccccagacacccattgtccatagccttctcagggcagagtgggctggttgtgttgacaataaaacagtgttggtttgcaaaaaaaa

SEQ ID NO: 90862 - DNA, 498 bp, Homo Sapiens
gagctattcgcaagattcccttaaagagtgtgctgtgttctgagacttccccagaccacatcaatgtggtttatccacccactaaagatttgttgtagttattgaactgctttttatttgcttcagttatcttaatgaatcattgtgtcttctctacataaccagttttccctaggagagttataattcctacggggatgctgctttgctagccaggcatggtttttgagaacggggagttgccagaatctgctgtcctaatccatgaggctgaaattggatttttcatctccctgggagaaagattacattttaaaatcaactataggtgtgtctccccaacattagaagtagactattttccaccctggaaacgctggggattcttatccaaaggctaaaagatcattaatagtacggcatttgattccatttgaagtcagagcaacatcctctttagcactgtggttaaatttcagaatcacctttatcttggtg

SEQ ID NO: 90863 - DNA, 867 bp, Homo Sapiens
tgggatcttgggcaacctgcggctcttgctatggcagacgtggacgggcacaacttcatcatgaggatgaatcaggcccataccgtggctttgagcaggatgttggcagccgacccacccacccatttcatgtaccctgagagttccaagaacctgccccgccaaacgtcagcttcgagctggtgcccttcaaggtcctggaccttccggtggatcgccagcgcctttgtcacgaggcagatccgattcacctacgccccaagtgaagtccttccttagagtggataaagaaaagggtccagatctacaacccagcctttcttcaagtatatccacgacaggtggacagagcatcacgggcggtacccttccacggggatgctggtgcttttctttgccctgcatgtgtgtgatgaggtgaacgtgtacgggttcggggccgacacccggggcaactggcaccactactgggagaacaaccggtacgcggggcgagttccggaagactggcgtgcacgacgcggacttcgaggcccacatcatcgacatgctgccaaaggccagcaagatcgaagtctaccggggcaactgagccgggccatcgccgcgacccttccggcccatctatcgggcaccggggctccggcccgggacccaggaccagcaacccgcgaccaatcatgctgcagcccaggggcgtctgctgtgccccgccaatcacgagactgggggaccgaccgggcctaggcaccaatctgcgccacggtcgggcggagcttctgtttctcccagccaatcatgtgactcaacggaaaacttccggcgctgtgtccagtctcctccaatcaatggccttcggggacggcc

SEQ ID NO: 90864 - DNA, 491 bp, Homo Sapiens
  misc_feature (118)..(118): n is a, c, g, or t
tgagctccctagacctcatccacccagataggtttagctgtcccatggggcctggccccgtggacctctccctccgagcccagatggtggccaggacagccaggcggtgggaggcgcncccacaggcccctagaagaatgagagaccccaatggggaggagataccttacccccctgggggcacggggagtgctgcagacaggatttcctaggacgagagcttttccaccggctccctctgggcctggggagccttcatcctcagtcctgaaatgaggtggtcacccctgaccagggggctttggctcctggtatttcccggtctgtcacgaaggtccttttcctttaagtgccggccagagcctgagcgctccgagggagccccgtctggccgccttgccttcagcaaaccgagtggttttatctggatacacacgtgcatcttgtatccaagtatgtagaattgtaaaaatgaaagaacgatctgtaaa

SEQ ID NO: 90865 - DNA, 1273 bp, Homo Sapiens
aacttagtgctaggtacgaggctgggtgttaatcggcacgaggctaacatggcggcgccctttgtctgctctggagtgccgtccccggccttctcgcggccgtgatgcacctccctctgcggtggggtccgggacatggcaggtaatgagccggacgaggggagccaagctggagtttacacaggcaaactgtcagaaaagagtagcctgggctgtctggaaatctgagccatggactttccccagcacagccagcatgtcttggaacagctgaaccagcagcggcagctggggcttctctgtgactgcacctttgtggtggacggtgttcactttaaggctcataaagcagtgctggcggcctgcagcgagtacttcaagatgctcttcgtggaccagaaggacgtggtgcacctggacatcagtaacgcggcaggcctggggcaggtgctggagtttatgtacacggccaagctgagcctgagccctgagaacgtggatgatgtgctggccgtggccactttcctccaaatgcaggacatcatcacggcctgccatgccctcaagtcacttgctgagccggctaccagccctgggggaaatgcggaggccttggccacagaaggaggggacaagagagccaaagaggagaaggtggccaccagcacgctgagcaggctggagcaggcaggacgcagcacacccataggccccagcagggacctcaaggaggagcgcggcggtcaggcccagagtgcggccagcggtgcagagcagacagagaaagccgatgcgccccgggagccgccgcctgtggagctcaagccagaccccacgagtggcatggctgccgcagaagctgaggccgctttgtccgagagctcggagcaagaaatggaggtggagcccgcccggaaaggggaagaggagcaaaaggagcaagaggagcaagaggaggagggcgcagggccagctgaggtcaaggaggagggttcccagctggagaacggagaggcccccgaggagaacgagaatgaggagtcagcgggcacagactcggggcaggagctcggctccgaggccccgggcctgcgctcaggcacctacggcgaccgcacggagtccaaggcctacggctccgtcatccacaagtgccaggaccggggggaaaggagttcacgcacacgggggaacttcaagcgggacatccgcatccacaacggggggagaaaaccccttttccgtgcccggaaaggcaaccaaggcccttttt

SEQ ID NO: 90866 - DNA, 575 bp, Homo Sapiens
aaagacaaataataggaagtgttccttcctagtggacaaacagatatagcacactaacgccaagcatgccaagagaagaagacgccgagggtctccaggtgctggcggccgggggcggacctgctctcgcaccgtccgagcggagctttcgttttcagtgagccaggtggagcgcagtctacgggagggccactacgctcagcgcctgagtcgcacggcgccggtctacctcgctgcggttattgagtacctgacggccaaggtcctggagctggcgggcaacgaggcccagaacagcggagagcggaacatcactcccctgctgctggacatggtggttcacaacgacaggctactgagcacccttttcaacacgaccaccatctctcaagtggcccctggcgaggactagcttctgacacccggcccctgggacctgacaggtccactcgtccacccacccggccccaaatcccccggcctgaacccccggccttaaacaccctccccccacaaaccaaggccccaaagtcttgggccttcattaattctgtcaataaaatgtttcaaggaaa

SEQ ID NO: 90867 - DNA, 771 bp, Homo Sapiens
taggtagcgaggcctgggtggcgatttcggcacgaggataaaatgacctatcccacgtttttgcatgaatttatagcaggaaaaatcaagggatttcctatggaagtcctgctttattccaggtgaagggaaggaagtgtatatacttttggcaagtcatacagctcaaatgtgatgagatttctgatgttagagggagatggagaggcttcctgatgcctcatctgcagggtcctgtgcctctgaagttctagccatgaggtttccaggtaggacagctgctccccaagcctcctgaggacacaggaagagacggaaggagcaccttgacagacttgtgtgagtcttctcgaaggagggttgactcagaacccagagacaatacaaaacccctcacttcctctgagagggccaaatgctgtgagtctgaagtatgtgcctggtgtgaaatgatctatggcctgtttcttacacaggaagccccctgaacctcctgtacatgtgttcatgttcccagccagctctgagacccaggaaccaaatattccattttggcttctgctagagcagtcatggttcctctcctaaaagccatgggcagcagtttccgagggcctgcatgatccacctgctgcacgatcctatgagggcttcctgtggcacacagccctctgggtgcttggggaactagcttcaggcacagccctgattcttggtgatcccagtgatctatgggaaatccttgtctttactcccaggtggaaagggggg

SEQ ID NO: 90868 - DNA, 935 bp, Homo Sapiens
  misc_feature (597)..(615): n is a, c, g, or t
  misc_feature (732)..(743): n is a, c, g, or t
cgaagtgtgaggggaggagcccgagccgtcgctgctgccgccgctaagggagaggagcatgtctgcaactcgagccaagaaagtgaagatggccaccaaatcatgccccgagtgcgaccaacaggttcctgttgcatgtaaatcatgtccttgtggttacatatttattagcagaaaacttttaaatgcaaaacactcagagaaatcaccaccttctacagagaaacaggaaaaggaaattgacatctatgctaacctgtctgatgaaaaggctttcgtgttttcagtcgccttggcagaaataaatagaaaaattatcaatcaaagacttattctctgatacttgtttgcaaaatctgctgaaacttctgtcaggataacatcagcaaattctcaaacagttatggactctcaggagaattctgactgcatcaataagggccatcgattgtttctttctcgcctgtcgtttagcctgtgccacacttcgggagcaaagctgtgtaggcttggactgttctgggatttccttgtttaccaaggagtattgtcagtgttttgtgtttgggatataagtaagtgtatttgccaacaacnnnnnnnnnnnnnnnnnnntgctggatggatgttaaaggataaaaagtgatggggtatggggtaggtatgaaaactagggtaataagatgcttgattgttttcaggtttgccaccagagatgcaatattttaaatnnnnnnnnnnnncaaactgctctcaagatggtgcctgttaacctaaacatgaaatatatttattacatgcaaaatatttcttagccacttttaagcagtaatgttttatctgaatggatatttgtttctatatcctgataattatttaaattgttactttcaatctggaagaaaaaataaaccttaatattgaaactaagtaaa

SEQ ID NO: 90869 - DNA, 1168 bp, Homo Sapiens; identical to SEQ ID NO: 5953
  misc_feature (733)..(741): n is a, c, g, or t
  misc_feature (757)..(820): n is a, c, g, or t
  misc_feature (834)..(834): n is a, c, g, or t
  misc_feature (859)..(859): n is a, c, g, or t
  misc_feature (1049)..(1049): n is a, c, g, or t
  misc_feature (1074)..(1086): n is a, c, g, or t

SEQ ID NO: 90870 - DNA, 459 bp, Homo Sapiens
agggtaatgctgagcagacagaacaacagatggacattagacaggtccattagtgctgactctataggagagaggaagcattttgaactcccttcagttttgccaactgaataggccacagatcctgctatagttacaggcctccactagctcattcattagtgccaggtccatcttattatttgctaaaatatcccttcacctctgtgtagatagaattggtatctcacttgcagacactcttgtgtttacaaactgtgggttacaacacattagtgagtgatgaagttggtttagtgagttacaaacaacatcaaaaaaatagaacagcagataattgaagagaaagtatcatctgtaaggggaagtactattacttcataaagttgtttataaagttgtaaaaagtttacttcataaagttgtaaaactaaatatagtatatatatgataaaaaaa

SEQ ID NO: 90871 - DNA, 487 bp, Homo Sapiens
  misc_feature (127)..(127): n is a, c, g, or t
atgcttaccacaacatctggcatatggcaatggctcaataaatggtagctattagtatccaaaaggcccacccagaagacccataagtggagtgtcctaagaagccacttggacaccttctccaggnagacctcttgttcctccaagtaacttttgttctgtctttgctatctctccatttatgtctcctgcactcctccactagctacatccactggacttcagctcttttcccctccaatataggcagagttttcagtatcagttaagctgggagcattggtgtttcagggagagaaagtcatgtatgtgtttagattataaatgggttgcacaacacagattttctttaatcctagaatcaaattggatgagaagacagctctgattagtcaattatctactgaacttcctcctacttaggtctttgcctcttggtgatttgatttgagttccataaataaaataatgtctggtgctgtttaaa

SEQ ID NO: 90872 - DNA, 523 bp, Homo Sapiens
aaaggtccaattcaagaataaaccatcttgcagagaccattgcataaccgcacgacacagacgtcttctcacaaccagggcacacgaaggcgggaggcaccaggcgacggtggggctcggtcccgggacgagacctaccctgggtgcatcccaggcccgggggtgaccggcaacaaagtgtatcgaaaggctgcggcggccgggctcggggctgcgggcgtctcaaccaaaaggctgcacaccggcgccggaactcgctcctcgccgcgcccgcctcctcctcctccttggccggcgacggccctcttccccttctcccctcaggctggggctctcgctgagctcagacgggctccgggcggtgcgtttctcctgcgtcacctcctcctgctcctcctcctgcagcgacggcttcaccttcccctagtcgccgcctctgtccccgctccaggcctggtggctttgaagtagctcgctcctcgctcccggcgccgacccaagcaccgggcgctaaggcggccgc

SEQ ID NO: 90873 - DNA, 511 bp, Homo Sapiens
ccgggagcgaggagcgagctacttcaaagccaccaggcctggagcggggacagaggcggcgactaggggaaggtgaagccgtcgctgcaggaggaggagcaggaggaggtgacgcaggagaaacgcaccgcccggagcccgtctgagctcagcgagagccccagatgagcaaggtcaaggtgatgccccaccacagcttgaagatgaggaacctgcatttccacatactgacttggccaagttggatgacatgatcaacaggcctcgatgggtggttccagttttgccgaaaggggaattagaagtgcttttagaagctgctattgatcttagtataaagggccttgatgttaaaagtgaagcatgtcagcgatttttccgtgatgggctaacaatatcattcactaaaattcttacagatgaagcagtgagtggctggaagtttgaaattcataggtgtattattaacaatactcattgtctggtggagctatgtgtggccaagttgtcc

SEQ ID NO: 90874 - DNA, 786 bp, Homo Sapiens
  misc_feature (241)..(286): n is a, c, g, or t
gggagattgcgcgagggggagcgagcgagcgggcgctgccaggagcccgcagccctggcgcccgccgccgcccggagccccgcaatatgccgccgcggccctctggctctaggccatggcgaggctctgccggcgtgtcccctgcaccctgcttctcggcctggccgtggtgctgctgaaagcgcggctggtccccgcggccgccagagcggaactcagccgctccgacctcagcctcatnnnnnnnnnnnnnnnnnnnnnnnnnnnnnnnnnnnnnnnnnnnnnnaagcagctggaggaggctgaggaggagaggacagaggtgcctggggcaacctccaccttgacggttccagtgtctgtatttatgttgaaagtccaggtgaatgacatcatcagtcgtcagtacctgagccaagcagttgtagaagtgtttgtaaactacacgaagacaaattccacagtaactaaaagcaatggagcagtgctgataaaagtaccctacaaattaggacttagtttaactattattgcttacaaagatggctacgtgttgacccctctgccttggaaaaccagaagaatgccaatatattcatcagttacactttcactgttcccgcaaagccaagcaaatatatggctatttgaagacactgttttaattactggaaaattagctgatgccaagtctcaaccaagtgttcagttttcaaaagccttaattaaacttcctgacaaccatcatattagcaacgttactggctatcttacagttctacaaca

SEQ ID NO: 90875 - DNA, 410 bp, Homo Sapiens
cctatgacagacaaggcaagctctactctcagaagcaaaaattatatatctaggagtcagagtatgaatcaagaagaatggacttctgcttcttatctacctaatgccagataatgatgacagcaatgcattttctacattcatatcctcaatcatatgtttttgaatgcttactggaaaaccggtttaaaagaaaggtgactagttattggtcttgctctgacagccgtggaaaccatttgctgatgaaagcacaagcaacaacaacaaaaaagatgaataaactggatttcaacaaaaacacatttgtgcttcagagaacatagtcaagaaagtgaaaaggcaacccaccaatgggagaacacagtttcaaaacatatatctaataaaatatttgagtccagattaaa

SEQ ID NO: 90876 - DNA, 492 bp, Homo Sapiens
ttaacggcacagaaggaagtcctgtcttctgggattgagtttggtaatccaccccttggagctaaacacagtaagaggagcccacccttttcttactatacagagaagagtaaaacacagtcacctttacacagcatctgagtggacctaacacagggcagtgaaagtgatgcagaacaaacttcaaagcctccaggagcacacgtgacctcaggaaatgaacagaaacaacctagctctccaaagaggagtatttcattcaactccgaactgctcacacattatgcaactgtgaacaaggctcatttaaaaatccatgaagcttctaatgttttcaccacaaaatatattaagtattgaggtgctggatatgttgactagtttgatttaattattccacattatatgcataaatagtaacatcaccttgttccccataaaattatacaattataaattgtcaatttgcaattaaaacaataaaatccaaaa

SEQ ID NO: 90877 - DNA, 504 bp, Homo Sapiens
agtttcagaccacagactcaagattggctcttcccagagggcagcagacagtcaccccaaggcaggtgtagggagcccagggaggccaatcagccccctgaagactctggtcccagtcagcctgtggcttgtggcctgtgacctgtgaccttctgccagaattgtcatgcctctgaggccccctcttaccacactttaccagttaaccactgaagcccccaattcccacagcttttccattaaaatgcaaatggtggtggttcaatctaatctgatattgacatattagaaggcaattagggtgtttccttaaacaactcctttccaaggatcagccctgagagcaggttggtgactttgaggagggcagtcctctgtccagattggggtgggagcaagggacagggagcagggcaggggctgaaaggggcactgattcagaccagggaggcaactacacaccaacctgctggctttagaataaaagcaccaactgaactgaaa

SEQ ID NO: 90878 - DNA, 559 bp, Homo Sapiens
cctccacaatgtagcaaattctcaggaaatacagtttatatcttcctcctatgctcttccagtcaccaactacttatgcggctactttgtccagggcacaaaatgccgtggcagtatctaactaaacccccacaaaactgcttaataacagttttgaatgtgagaaatttagataatttaaatataaggtacaggttttaatttctgagtttcttcttttctatttttattaaaaagaaaataattttcagatttaattgaattggaaaaaaacaatacttcccaccagaattatatatcctgaaaattgtatttttgttatataaacaacttttaagaaagatcattatccttttctctacctaaatatgaggagtcttagcataatgacaaatatttataatttttcaattaatggtacttgctggatccacactaacatctttgctaataatctcattgtttcttccaactgattcctaacactatatcccacatcttctttctagtcttttatctagaatatgcaacctaaaataaaaatggtggcgtctccaaa

SEQ ID NO: 90879 - DNA, 411 bp, Homo Sapiens
aatacaatagagacttttcatttaactttaactttgtaaatattgaagtgtgtaataaagccaataaaatatgggtttgaatattgttttagcttattatttttgatatgttttggtatcaaattacaaggaattgaaaactaataacttagccctagaagcccattcacttgtaagcaaagtgctaaaacaaagcaaaggtgattgttagtttgagccagtctactcactttgtaagccctttgtactcctgttgtacaagggccatccccatgataaaggttccattctgttatttgagcattgcttattaaaatgatggcactacccagagatggggaaggagaatgtgattatcctagtttatgaatttccaagtttttaaaaataataaattaatcaatcaatcac

SEQ ID NO: 90880 - DNA, 961 bp, Homo Sapiens
cagtcgacggtaccggacatatgcccgggaattcggccattacggccggggcactcatttgtggacgtccaattgtaaagccagaatattttactgaattcctgaaagcagttgagtccaagaagcagcctccacaaattgaaagtttttacccacctcttgatgaaccatctattggaagtaaaaatgttgatctgtcaggacggcaggaaagaaaacaaatcttcaaagggaaaacatttatatttttgaatgccaaacagcataagaaattgagttccgcagttgtctttggaggtggggaagctaggttgataacagaagagaatgaagaagaacataatttctttttggctccgggaacgtgtgttgttgatacaggaataacaaactcacagaccttaattcctgactgtcagaagaaatggattcagtcaataatggatatgctccaaaggcaaggtcttagacctattcctgaagcagaaattggattggcggtgattttcatgactacaaagaattactgtgatcctcagggccatcccagtacaggattaaagacaacaactccaggaccaagcctttcacaaggcgtgtcagttgatgaaaaactaatgccaagcgccccagtgaacactacaacatacgtagctgacacagaatcagagcaagcagatacatgggatttgagtgaaaggccaaaagaaatcaaagtctccaaaatggaacaaaaattcagaatggctttcacaagacgcacccacttgtaaaggagtcctgcaaaacaagctctaataataatagtatggaatcaaataccttggctaagatgaaaatcccaaactatcagctgtcaccaactaaattgccaagtataaataaaagtaaagatagggcttctcagcagcagcagaccaactccatcatatactactctcagccgtctaccaaaaaatgg

SEQ ID NO: 90881 - DNA, 411 bp, Homo Sapiens
ctgttttgaagcttctctgcgttcacacacagcagcctggtttcctggaagggcattttccacattgtgcgttatggatgatcatcccaggcatcaggtgtgaagccctgcatccacatccaggggctatcaaatctctctgcaaaaggagaagctggactcaggcacgtttacagtgatgtgtatgcagggtatgcacagatgtggaaacaggaactgatgtgtccattacaccactaggacagaggccagaacaatgaagaaaccaaatacttggaagagggtagagataatgaatggagtccaagagccctgattgtgccataaatgtccagataattccatacctgaggattatgtggtttgtaaacttggcacttagaagaaccaataaaatcatgttatagtttc

SEQ ID NO: 90882 - DNA, 358 bp, Homo Sapiens
gggcccgcgtgacctcaccgctgcggggcgatggagcgaaaagtgaggaaactgaagtcccgggagagacagtggcaaggtcaagtagcaaagtgcactcagccctcccagcaaggagtctgccactcgcgcttgaaggacgtgtttgaagagctgctttcccagtgggatgctgccttaaagtcttgattccctggcactctttcctattactacattttatcggtgctgtttgtgttatgcaacggtagcatcgtgtctccggaagataaaaaaggtctcgatacaaacatccataaccttccacccactccgtcaggaacaacccaatcaaaataaagtcatgagaatttagaaa

SEQ ID NO: 90883 - DNA, 543 bp, Homo Sapiens
cgcacagcccagacaaaaacaggacacagcagtgtgtgaatgagccgggctttctccttccctccacgtaatagaaggtgcctgaggttgttgaaacacagtccatttctcctgggaatgacaagaatttgagggatgctgactttcaaggaatactgcatgacaggcatcaagataaacctgatgaagaaaacataggccagaatctgggaatcgggagcaaagtaatacagcttcggggacaggcacgtaatgaggtcatgatgtaggagactccctgcaggactggcggcccctgttccctgggttgttctggctctttcagaacctgaccctggaacaggactgagcaggtgcctgtgtgcacagaagaccttgtgtgagtcctttggtaccacgtttgctgcacgaatgtctgagacacctcacagtcgcttggttcagcctctccctccaaaatccgctggggaacatcatccctcatcactggaagaaattacaaggattgtgtaaacaattacaagtattctacaaacagtgaaa

SEQ ID NO: 90884 - DNA, 504 bp, Homo Sapiens
actaggggtttaaaataaataaatataaacaaatacaaaattcagaagaacatttacttcccaagatgccagaataacaatctagttggaatctaaatataaaaccaccagcaacacaaacagcttataaagtagtgtcaactagcacagttttaggcacttcactcagtacttgatatatgacaatacagctttacattcaagtgctgaagaaactgaagattcaagtgtacgtatgactgcttcttggagaattagtcctagaaatgatctggatgtgaggacaagcagaatgtgctacgtgcttattcgaatatctacctatatctaaatgtaactcaacaggattgatactaaaaatccaatgctacaaacatactatttcttatttccttgacccctatctgaaacaacaccttcttcaacttagggtctctgttttatcacttcctttccacatatactttatctactttaaggtatcctccccatctcttccttgct

SEQ ID NO: 90885 - DNA, 624 bp, Homo Sapiens
tgagaaattacaagtggaaggaaataagatctgtatacaagtacagatgtgaagagtggcttccaggtctttgttcttctctgtcaattcattgatgttatctgtcttcaggatttcattttacgcctatatcagaaataaataaccttgaggaaaccatggatgggtttcaaaaggtctatgaaagaaactatgtgcatgcttttttcttagaggtttttttcatgatattttcaaaatgtcttctgatcttagagagttttaaaattatccacatatttggacttttctctccactctaggtccttatttccaaatgtctactggaaatctacttttatatcctacagattgctcaccttgtcaaatattgaacttttactatccttttcccaaagttgcttactgttgctgctgtattgcctttcttgatgaatggtgtgctaccaccctttgtcttgggacctcccacttctttagtgtctccccctcctcctatctagttatttgcctcattgtgttagttggatttagtacagtttaataaatatggattacatgctactgtgaggctgatactgtggttggttctaacagttcaaaaattaaaaatgaaaacacaaa

SEQ ID NO: 90886 - DNA, 811 bp, Homo Sapiens
  misc_feature (48)..(48): n is a, c, g, or t
  misc_feature (53)..(53): n is a, c, g, or t
tgagcctttcccttgccaatccaggtagacagaggccctgcctttggntgagntgagacacctcctgtttcccttccccttgaaccagtcccagtgtccccttgctccaggctaccttctgtctcttagtctaagtttgcccacctgtaaagtagattcaggatatctgtagagggctgtgacaacagacttggaaggtttgctactgtatatactgccattgagaaggggaaatttttcaatatgtagaagcttcagaattagaggtccctctttaccccagacctgggagggaagtagatgttttgccaaaatacttcttcattcctttaaaaactacatctttcctatgcaagagtgtctcacatgtgcttaaccgaggtgcttctagttggtgagcagtgttgagcttagaagtggtgtgtgctctgtctgtctgtctttgtctgtctgttgtatacagtgggtgccatataaagctgatcaatggtggtgcttcctgcctgcttctgtgagatgggcaaaagattcagcttagaacaccatgactcaccttgccttggtcagcctttcctgggcctgtagggccttgcacatatttttcccaggaggatttcccctccaccccacaggcatggatcagcttggtctgaggccccagctgtgtggggtccctctaatccccagatgttgctgaggctgaaggcctctgatctgataacatgtcagatagtaaaagatgtgggggtgggggtggagggctcctccttcataacagtttctaagaaaacttgttcccacctgtaaaaaa

SEQ ID NO: 90887 - DNA, 530 bp, Homo Sapiens
  misc_feature (42)..(42): n is a, c, g, or t
ccaggagattcaggagctcattgaggcacagacacgtgctcntggtccatgtgcagaagtaagagcactgccagcaccagccggtggagccagagccagcatgggaagaggcccctcaagagagagcactggagctggagggagctccagccaaggaccagaccaacgaggagctgcctgaaatcacggaggtgccggagagcattaaaagaaggctgggaagaagagttccagcagctacgcctgctcccagaggcaacctcctcctccaggcatggatgcgggtccacagctgggcatccaggctgtttgcccctaatgtgctgcccgggacaggcccttaacaggcgggcagtgggtgaggggaccaggaggtggctccaaagggtaaagcaaacaaagcttttaaagacagccgttgtgccccaggctctccatgccaccacctgccctaccatttattaatagtgttagaattacaagttgatgaaacgagattacaataaagtttgatttctgaaacttcaaaa

SEQ ID NO: 90888 - DNA, 506 bp, Homo Sapiens
  misc_feature (57)..(57): n is a, c, g, or t
  misc_feature (105)..(105): n is a, c, g, or t
tgggcatggtggcaaacatggaaggcgaagagcagggcattcagactgggattcttnggacctcggcggagagaggcttctctcattcggtagaaccaaccagcntgtgctgcagggcctgtttattgtgctaatgctggtggggtatatctctgtgaaggtgatgctcaagagcattaaaacaaggctgggaagaagagttccagcagctcctcctgctctcagacgcaatcttctcctccaggcatggaagtgtgtctgcaactgggcatccaggctgtttgccccctaatgtgctgccccgaacgggctcttaacaggtgggcaggggttgaggggaccaggaggtggctccaaagggtacagcaaggaaagcttttaaagacagctgttgtgctccaggctctccatgccaccacctgccctagcatttattaatagtgttagaattacaagtttatgaaatgaaatataaataaagtttgatttctgaaacttcaaaaaaa

SEQ ID NO: 90889 - DNA, 201 bp, Homo Sapiens
gaaaagacagtaaaaactatttaagggggaataaaaataattacatcttcacttaatagttaaataagcaaacaagataatataaatgaaaacacctaccaatttaaaatgtctgaccaaatgtttaaatcagtgctttcctagttctgatgaaggaccagattttctttatttcgaatccattgcataaggatatttcgt

SEQ ID NO: 90890 - DNA, 521 bp, Homo Sapiens
taaggcaactttgtaaagcacacttgagctggtagaagaatcgtcagatgtgatgacaagctacagggaaaactgcctgctgccttgttcacctgccgcaaagatagagcatatttgtcatatgcttcaactggctggctagaagtgaaatggggagttggactggaaaactcgcagcacaaacctcacaaatgcagtgagtgcagtcttctttcatccagcgctcctcggccttccttggaacccctctaacatctgtacaccctgcctgcctcaggcgtgcctccagcttgtttatctgaaaggggaggcaaaggaaagaagagtggaaattgaagcggatagcaacaaagccaatcaataacatggtttgatgaaatgctctattctgtaagcacacacctagaaggcaaaagaaacttcaaagcctacataatttttcattttcccccaggacttaatgagcttgaatcatccagtatccaaacaaataaacagttctgtaggtgttaaaaaataaa

SEQ ID NO: 90891 - DNA, 555 bp, Homo Sapiens
aaagagctgtcagccagttactacagacactcaatgcagacaccttcagagtattgggaaaagacttgccttctgccagaacttaacccaaatacacacagagagcaccatgaagccctggattcttctactcgtcatgttcatctctggagttgtgatgcttctgcctgtgctgggaagcttctggaacaaagatccctttctagatatgataagagaaactgagcagtgctgggtacagcctccatataagtactgtgagaaaaggtgtactaaaataatgacttgtgtacgtccaaatcatacatgctgctggacctactgtggaaacatctgcttagacaacgaagagccccttaaatcaatgctaaacccctagattctattggccgatcactactgtgggctgaaggatgaccatctggtctaagaagagtgctgcctacttccttcttgggacacccactggctctagctggtaacctttctgctatttccttgacctctttaccctgaagcttttgtcaaataaactgctacatcaacctgaaaaaa

SEQ ID NO: 90892 - DNA, 359 bp, Homo Sapiens
gtctgcagcattcattccttctgggtatggaacaggaccctctggaatgggggctgtggcctacaacagttaaacaagtgaactaaagggctcccaaaatctctcctgcagcattttccttgagaaggaggaaggtttgcatctctgtgagaagaaacatcagaagcagttgaaagaccaggatgtgggtcctctggggctgaggaggcattctgaatcaactgtgtgttctacacctgtgttttaactgtgacctgtcacatgaggacaagtgtggaatttcccacttttgtgccatgtcagtgctaaaaaagttttggattttggagcatttttaatttcagatttttcagactaaa

SEQ ID NO: 90893 - DNA, 523 bp, Homo Sapiens
ccatcacaacctgacacacacaaaaaatacttctatgaggacatttgcccagcaactccctgtccaatgtccaactggcaacatccttgttattgatccttgtagccaaggataattctctcaaaacaatcatttttgctttaaaaaccgttgtcttccttgacctccctgtatatgcacatagtttactgtggcacttgtattcttattgcaatgcctactcctgaataaacatcattttctttcagagagtctccctctctgttatttaggctgacaaggatatgccaagaagtagcttggatatagcagttaactctgcctttaggatatgtgtatggggatataagagttaactaaaagctgacctttgagttggtccttgaataaaagaagaatagattccaaaaataagaggaataaataatgatcctgagctaggagagtacattttgcagacctttggtttccatattaagaaattcagatttttatgtacaataaagaagttctggaattcaaa

SEQ ID NO: 90894 - DNA, 537 bp, Homo Sapiens
tcctctgatcccaaatttctctgttgattccatcatcccacatagcctcctaaacattgccagttggcagcaggatggcccagtgacctgtcagttcttgtcagtctggctccatggaactggagaagcttgtgtaacaaaatggagatatttggcttgtgtaacaaaattctgacattctgtcagaattccaaggtttgtgaaaaacaaagcaatgtggtggggctacagagtcatatatcagatcacaggcttcagagagctacatgacagagccgctctagagaaggagaggggaaatggttggagaaaaggaagctggcaggtggccacaccctccttggaaattgtcatcggtctcccccgccgtattggaagctccagaaagacagggattatgtatgtcttgttcactaccatatctattgcaattagaatagtaattaaaacatagtgggtactcaataaatgaatggatgtgaccaacccctgccctttgaccccacaaatattcaataaaactgcaaaagttataaa

SEQ ID NO: 90895 - DNA, 506 bp, Homo Sapiens
ctgtcttctaaataatcagtgacgggaagatggaagggcatgatgaactctgccatagaaaacttcctccagcctgaagagaaggatgcactggaggaagccggaccctcacgagtggagagaagtccttggtgattgtaaagagggcccctggagctcatttctgaatcgcactctccatttccagagactaaaggatgtcctttgaaatggctggactcagagagttggagtcgttttgagatgagcattagccccagctttgtaaccaatgaggaacacttacttatttttaagtatcttgacagaagcaatttgaacacagtgtcccgtcatttctagaaacagaatggtctcttctagagagcttggataaggaccttgctgggttgagttaggttttaatccttgctttggtttggaactgccttcgggctccagaacttaaattgcttggtccgtggcatctgatgtaccaacagagattaaaagtgtaaagcaacaaa

SEQ ID NO: 90896 - DNA, 384 bp, Homo Sapiens
tttttagtaacataaatcattttttaatttcaaacaattattttataaaaacattaaaacatcttttaatcctacagaacattttcctttgaattaatagcaccaacaaaaaaactatgttatgcaaatagaagatatgtgttatctacaaattaatgctagaatttttaaataggactgtaatattaaagagaagtagctaacaaaattattataatgaggacataaaatatattaggtattattttctatcttaaatatcttgaaagggaacatttttgccagaaaatgcaactgcaaagaatattaaaataaatgctacaaggaaggaagcaattaagcatattttaacccataaataacagcgcatcattgtaatatact

SEQ ID NO: 90897 - DNA, 320 bp, Homo Sapiens
cagctagggcctttgaccctgcattaccacggcattttatccaggtgaagtccagggaaagaactcagccaaatggactaaggaacacacgagtttggaacgcgagactctgacatttttgtgttcttggaaatccaattaccttcccatgcccagatttccttcctgcctcttggaccaggctctggcactgaggttctcactgttcccaacacagacaaagcttcctgagggctggaggggcagcaaggggagaggagaatggggaagaagcgcttgatgtagttgtgtggaataaacagtattttttcttttgtaaa

SEQ ID NO: 90898 - DNA, 946 bp, Homo Sapiens
  misc_feature (323)..(323): n is a, c, g, or t
  misc_feature (918)..(918): n is a, c, g, or t
  misc_feature (935)..(935): n is a, c, g, or t
ccaaaaatttggcatctggcttggttgcctccagggatgtggaacccttgggtctggagggacagctggtctctcaattggtgaaaatattcccttaacctggaaaatacttttgccacttttgctcagtctgctcccggatccggtctgtgtcattttgcccggatcctgggcccgctcccaaggagggctcccccagctgcaggggtgagggcctgtgctgtgtgggcgcatggctcatctgccagcgacccatgattgttccctggggctctgccacccccagctgactcctctacacagctcctgatgccttgggcagngccgtgttgggggggtgtatcccagaaaggcattgtgtggggggctggtatcgctaggggcctggggtccccggacaactctgtgactttcatgagcagaatggaggtacccagtctctcctcatgtcaccacaccccgctatcaggaagggacagggtctcaggttcctagtgttcccaggacctgcctgccggagggctgcagctgaactgctgttagcgtgggtggctctgaatcaatggcccatttttctgtgcagtgtgttgggggcagcctgagcctctcactcaggttgaacaggagcttggggaaccctcttccagaccctgaaggggtcctgctctgtgtcctgaccaacactcatagggtctgctctgtggtcctgacctcactcaggccctgctctatagcaaagaagcaagctagacctttctcctttgatgtggagacgggaaaaaacaagttttagaataacatgcccagaatgaccccaactaggaacaatcgactgtaggactgggaggatttgaacatgtgcaagcaaaaggaggcaccagagggctgttcagatggataactgtgcaggtgggcatnccgtgcgggtgggcatnccatgcaggtg

SEQ ID NO: 90899 - DNA, 438 bp, Homo Sapiens
actgattgcattgaagctttggttgggcttgaacagttttaaaaacaaccaaaacattacattgctattacttctgctgcttatattaatattttaaaaaggaatggcctcgtatatcaagggtcatgtaagtattttaccttgttaatagctcttttggaaacttatccaaagtaagaatacaaaagaaagaagttataagcacaaagcttcccctgcccagatttgttttaaaataacaaaaagtttgacgcaacctaaatgtctaacaagaagggaaaagcatagcttctaaatgaaaactaatttgatcatttaaaatgttcattacaaagattatatagaatcatggggaaattcttaagatataatgagagcaggatgtaaaattatatgttaaaatgtatgtgtgatagggaaaagtagaagggaaaattc

SEQ ID NO: 90900 - DNA, 286 bp, Homo Sapiens
ggccagccaaacggaccccaggatgctggagatgatcagtaggatgacgactccagcagagaccagctgcacggggaatgctccatacacgtagatgctaaagatggtctccagttgacagtagctgtagtacggatccacgatcgaaatgtagaagacataaaagccattgtggccgaaaatgatctggtttgctgtccggccgcccaagatctgatactggacgtctggccacctcaaaggggcattgttgttggggtcgtggcagctcacatagttctctctg

SEQ ID NO: 90901 - DNA, 357 bp, Homo Sapiens
ttttgctttgtggattcctttaatgattgatttaaagtagaagtaaaattttaaaagtgaagaattattactggatgttagttgtgcagggaagataatcagagtggttgaaaatatggggaaggcgggggtgggagttgaaccacataagacctattttagcccaggttactgttgagggacccagttataccataagttgaattatgccaacttaaaaactataaatcacatgatttaaatttaaggcaggtgttggacttgaccttttactccagcactaagaaagtttaaaacagtgttacttcaggatgtatcaggatgggagttaaggtctccagcatgattaaaatcagt

SEQ ID NO: 90902 - DNA, 353 bp, Homo Sapiens
  misc_feature (181)..(181): n is a, c, g, or t
ggggccgctgtctgccccatcaatgatacgtggatccaggccggcattgtgagctggggattcgctgtgccccgctttccggcctggtgtctacacccaggtgctaagctacacagactggattcagagaaccctggctgaatctcactcaggcatgtctgggcccgcccaggtgccccanggatcccactcaggcacctcccagatcccacccagtgctgctgcttgagctgttgaccgtatgcttgcttgggtccctgtgaaccatgagccatggagtccgggatcccctttctggtaggattgatggaatctaataataaaaactgtaggttttttatgtgtattttaaa

SEQ ID NO: 90903 - DNA, 456 bp, Homo Sapiens
caattaaatctatgtctgaggatgaaagtgaaatgattacgactgttagtgaaattgagagtaaagcaccaacggttgagtcaggaacaattgccagcaaagagagaacgttatcctctgggcaggaacaagttgttgaaagtgatacactaacaattgagtctggaccacttgctagtgaagataaaccactttcgtgtggtacaaactctggaaaagaacaagaaataaatgagactctgcctatcacaactgtagctcagagttcagttctacttcatcctcaagaagaagcagccaggattagaatgtcagcaaggcagaaacagtattttgttacctagataatggaaatagaagagcagaagcaaaagcaattggaattacttgaacaaattgaacagcagaaattaagattagaaactgactgcttcagggctcagctggaagaagaaa

SEQ ID NO: 90904 - DNA, 603 bp, Homo Sapiens
  misc_feature (418)..(436): n is a, c, g, or t
ggactcgtgcgcctaccagacagtggcggaggacggcgctcgctagtctcccaggtcgcggtacacggcgagaacgggcggggcggtctcggctgcgtccgggcgatccagtgcttagttccgtcatatccctctccacgacctcggtcgagcatgttcaccagggcccaggtgagacggattctgcagcgggtgcccgggaagcagcgatttggcatctaccggttcctgcccttcttttttgtcctgggaggaacgatggagtggatcatgattaaagtgcgcgtgggccaggagaccttctatgatgtctaccgtagaaaagcctcagaaagacagtatcagagaaggctggaagatgaatgagactgaacttcagcagtcaataaagtcaatatgaatttttaaaaagaacggnnnnnnnnnnnnnnnnnnncatgtccggcccgccttcggcccttcgaaaaggctttctaaaccatttcgttttggcggcgcgggcccccataaggtaaagggaaacatggcccaataacctggtttcccaagggagatccctgggtccattgacataggggccttgggaattcctcccccacaagt

SEQ ID NO: 90905 - DNA, 333 bp, Homo Sapiens
aacagtgaaatcttaaaagtaactgtttcactaaagcctccagtatttactgaagactgtcagaatcatcctccatcactagatcttctccaccagtcatgttccctgagcagtggggtggcttgaaggtataaaccaaagaggcccaagggagggatagttagcagacttctggtctttttctagtttgtgctcttctgttccaaggaccacaggtatgtcttcttctgtgtagttgttcactattgtttcaatgtgattcgtttcccacatttgaaaatagggggggattttactttaaaattcagatatctggctcctctttaggggaaa

SEQ ID NO: 90906 - DNA, 443 bp, Homo Sapiens
ctgattcaattgctgttggccaagcttgatttgggaattcttctaggtgaaagaaacacaaaccagttaaatattttcagtctccagcaccaatctaacaaagtgcctttattgtgagactagatgacctctgaaatgtcagggcccacagcccaccagcaagaacctgaacaggcacagagatagaggaagccacccagattgtttacaacacaccccaaagcttcccactctctatttccttacccagctttattttacgttatggaatcttccaccaagctgaaagcatgttccatgtctgtaacggtgtgtgatgtttatttattctgcctctcacgtaggtgccatgacagggaactcatttcattcacactgtggccccaacatttaggacaatgccctgtaaatactggaacccaataaacatttattgaatcaac

SEQ ID NO: 90907 - DNA, 896 bp, Homo Sapiens
  misc_feature (14)..(14): n is a, c, g, or t
  misc_feature (77)..(111): n is a, c, g, or t
aaaatatatacctnatatgggcgcctcgtagtaagcgaacgacgagcgcagcgagtcattgagcgaggaagcggcgnnnnnnnnnnnnnnnnnnnnnnnnnnnnnnnnnnncagtcgacggtaccggacatatgcccgggaattcggccattacggccggggggaatgccctaacaacacccatgcttgtgttgctgggagctgacattcaagaaaagtgcattaaaaattccttgagaaggcatattcttttgagagccgtaaatgaaaagtgcattcacggagaacatgctcctttgttgtgagaggaaagaaaggactgttgttgcctttaaggaacaggtttcccagttccccggaatgtcagggtcacatgaggaatgggtgagcacttagggccaagattgtcgtgtgcttggcccggcagcttctctctaagtgacctctccagcatcactctgtgccagtgctcatatctgaggccacttgagtgtcacgaggcagagcctggaaacattagctttggaaaccgttccttcctttttatgtggaggaagtaaggtttcacaagacacctaagctggacatggtgatgtgccacttggatagttcccaaagcagaaagcagccaggacatcccagtaccccacttctccgtgccgtgtacttttagggaggttttcgaaagctagcttcttaccgatgatttgtctatgtactggttatggtggaaaaccttgcatttattacctggtcctatctcagagtcttctattcagcattcaatatgacttctaatgcttctaattggactgtatggacagagaaccggtttgtcattcacgggccgcggatataatcagagcctggaatccgccaaaaggtcggtgccggat

SEQ ID NO: 90908 - DNA, 824 bp, Homo Sapiens
  misc_feature (37)..(37): n is a, c, g, or t
  misc_feature (67)..(67): n is a, c, g, or t
catcaaggagaagaacattccacccacgtttggattntggaatatcatccttgcttccatcagattnttgtaagtacctcacttggcacaaggtagacatgacgttcaaggaagtcaactgcgttgcccaagagtaagagaaggcaaaaacatgctaactgacaagaaaatcatgggttttatacaaggataacaagtgctgggttgcttagctatgaggaaggctaggctcactgcataccagaagatgtacagcgttggagaattcagggatttttatcaacaatcaaactatatttgtggaaattttgtgcataagtgccaaagatggctgacatcggaccacattctatttaactcaactgaatgacaccaagctctcatcctaaaacttatagttacatccacccttctgaaatatttaattattctccaatacactggaggtaataggtataaaaagaatgagcatgtgcaacttagtatctcatatctaattttgtgtcccaagttcattcttcccctgaatgtcccatgtctaccaggtgcaggattatctggatgggtcagttcaaaacaatttcagggaataaattgtgtaggggactcaattttctgagacagaaacataatgtgaataactcctttgttagaaaataatttcagtgacagaaagcctttcagttcataaagaaaacttacatatcaacaagcctagctcctcactagtcccagtgaatgcttacatcaatcagctctacaatatccagtaaaggactttccaattcgcctttgaataaactgaggtattggaaacatctaaa

SEQ ID NO: 90909 - DNA, 633 bp, Homo Sapiens
cagattcttagtggacagctctcatatcccctccagggaaaatgatgaaaaatgtcttcagaaaaatagctttatgaaggcaagaggactttttgcacctgcaagacatgtctgaaagctcctcaggtcaaaacacaagtagtcaagagatttgtccatctaattcatcatactactctgatccaagtgagacccacactgggtcagctccatcaaggagaagaacattccacccacgtttggattctggaatatcatccttgcttccatcagattcttgtaagtacctcacttggcacaaggtagacatgacgttcaaggaagtcaactgcgttgcccaagagtaagagaaggaatctctgaagaagagcaacttttcagacaggtagagtgtgccttgctcccaaggaaaggagttcttgaaaaaaacaaatgggaaacatggctacaagaaaactgggaagactgcaagaaattgatggcaaaatatggaaataaaaaaattaagttgacttttaggaatgcagtttacaagagcaatgcgaccactgagagtggtagcaatgtattttacaccaaagttgcctgatattaaaagtgaaaataaaatattcagtatctttgacgcaaaaa

SEQ ID NO: 90910 - DNA, 449 bp, Homo Sapiens
  misc_feature (326)..(326): n is a, c, g, or t
  misc_feature (408)..(409): n is a, c, g, or t
ttttttaatcatgcatgtcctgtgtttattagcttttagcaacaatgatgattgctttctttctatacagactgcattaggacacaaggcatatttttgaaaaaatattggtttctggtgataagcaatcttctggtagcttcaagattccatccagcatttttaagtttggcaaacaggagaatactctttcctttttgtggatgctcaatttccttcatctaattcactcctgaggagcctctgttggcccctctcattgccaccaaagctcactccacctacgcattctgcctgctgaagcaaatagcagctccctgtaaaanggggttctctagcaatcccagaagggtttcaacttcgaaattagtcttctaagaatttcttgttaaaattttcaacttggtnnaaaggaatcccccaaacccctgaatggaaaatgttcaaat

SEQ ID NO: 90911 - DNA, 633 bp, Homo Sapiens
  misc_feature (372)..(386): n is a, c, g, or t
aaagcaagagccgtttttgttactagtggataccttagtaaacatgagggaattatcagatagatgtctttggagcccagccttccctgtgtagtgagctggaaactcctttagattgtattcattggtgtgtatgtatatgtacatatatgtataaatagttaaatacataaacataaaacttaacatcgcattgttgtgatgacaagaagtagtaaggtgctaggtggttacattaaaaagcacagcacagtgtataatcagtcactatgactggtggttttgtaagctgggttcagtttttgaaccacccagaatacctcatgtgtaaatacagtgttcatgacttaattgaaatacagttattgtttnnnnnnnnnnnnnnngaatgtgaagccactggttggcttatgccttctgatctatcattcttgcctctttttttgtaaaggggttttcttcttgttgttctgttttttaatagggtttacagctagaattttgaatgccaaagttctatttattaaattaagaaaaaagttttcaatgttaatggctagtatttttccactggactattgtttgttgatgttggaatttgtatttacagagaaataaattttttataaaaag

SEQ ID NO: 90912 - DNA, 288 bp, Homo Sapiens
tttttaataagcctgcaccatttgtatgtcaattcttcctgctcttcttatccatcaaaaatcactttaacttttcttgttcctttactcttccatataaattgtttattcaaccatcaggttccaggaaaaagcctgttagtattttcattggacttacatggaatttgtagattttgaaaaaacagatatttttatgagtcttcctattcataaaaatagtatgtctccatttacttatgtctttaagtgtatttcagtaaagctttctatcttttccaaaaaaaa

SEQ ID NO: 90913 - DNA, 428 bp, Homo Sapiens
aagagcactgcaaaggaattggaagcagtgttgtcaagactgggtgccaacatgctcatttcagtccttgctgatccaaaattaacgggacaggctcttattccaggatcagtaatataccacaaacagtcacaaatactattggtttattgcaaggatggttggattggtgttcgatcagtgatgctcaagaaatcactaacagctactgacttctacaatggatatttgcacccctggtaccagaaaaattcccaagctcaaccaagccaatgcagatttcagactctcagacttccaacaaagaagaagcagaaaaaaactgttgctatgcaacaatgcattgagtagttaggaagaagatggataaaaacctattacatatttgtaatttattaaaaaccttatttacaaggaattatctggac

SEQ ID NO: 90914 - DNA, 755 bp, Homo Sapiens
tagagcagtacgaggccgggtgttgaattcggcacgaggggaaaccaatgacaatcatttctgagatctacgctcctgccaccctgccagtcatgcaagaagagcacggctccagaagtgcctctggggtcccctaccgagtcctagagcacaccaagaaggaatgagactcgcctccctctatttataactgtcccctccaggctgacagtggttcaaccctgaatcctaaaacttgcctttcaagtctcattttgtttctaactgagaactctatggatgatgatctcaaaaagcctttgtctctgggaaaggatgcgttatcttggtcttggaaatttcaaatgatgagggtgggggatggaagcattattccaggtggacgggatagaatccagcctctgcctggattagcccagggggatttggaaagcctttctaccatccttgaggatggtaactgagcttcctctgacagtgaccaaaggatgctgtatccttcagagctaaggcaagacagagagtctgctgttaattctcaaatccagcgaaaggctggacatctctaaatctcgtcttcctccacctcatgtgcatgcctgatctcaccctgacactcctgatgccgcatctgtgatagcactcgtgttgccttcacatggcaggctgggccaaccctgggtggaaggttctgacatttgtgttttcagaaatgtacatctgccttccagtcatctgtgcccttctagggaaga

SEQ ID NO: 90915 - DNA, 371 bp, Homo Sapiens
aatgagacagttacagaggggtctgaagggctgtccacacatttctggctgacttagaagcctctgcacacatgcaggtaaaactagagagatcccatggtacccatttgtccctggttggctgggaatctgcatgaacgtatgaaggaaatgtgacagggctgatccgaaaggaaaagtgggatagacctgaaaactgcttgaacttttgctccctaaccctgcacagacccatgggcagaggttggaagcctagtaggctcaagagatgcaaacacaacctgtaaccaatcattgcctgatcactaagctgtgtgtcagcaagtcaggcttaaaaataaaaacaagaatttgaaaagaaaaactggaaa

SEQ ID NO: 90916 - DNA, 467 bp, Homo Sapiens
  misc_feature (79)..(79): n is a, c, g, or t
  misc_feature (221)..(221): n is a, c, g, or t
aacaaagagaagcaagacttgcctttgtctaagaaatcgctctcctcccgcctccattgcactttccgtcacgctcttncagggaatgtcgccaagctgaacctcagacagcgcttggaaacagtcttttgccccacaacctttgtagacggcctagtgaataagcctttccagaggctcagacttgctggctcaaaaatctgcctgggctctcaaccgcntggtttaccacactggatccgtgcgtcaccgagcatgcacaatgcctgtggtttaattcgccttcttagtcaacagcgccaccatgcgttcgcttgcagttacaaaatcttggagaaggtgtttttattttgctttatcgattattcttatcaaccctagttgacgctactggaggagtttctcatgttatatgaattaaataaatgcaatctagggaaataaaatgcacttctatctacgaaaaa

SEQ ID NO: 90917 - DNA, 342 bp, Homo Sapiens
ttttaaagtttggcacattggatgtttcctcaggctcagcacaaccagctccacctgcccaacatcacacgaagagagtcaacactgcaggacctgacacaggcaggggccagccaccctggtgttggcaagcagcccacccaggagacagaactccaggtctgcctgatggttcacatcatgtgcagggccagcggggggcagtggcagcagagcatacaaacacactgactttggggaggtgcagacttagcaccaagtctgatttggtcattgctgcgggcaggttgtcaaatctctgggagcctccattttcttacctttacagcaccaaggcagctc

SEQ ID NO: 90918 - DNA, 480 bp, Homo Sapiens
tgcggccgcagcgctggtggccatgctcttggagcactacggcctggcgggccagccctcgccgctgccgcgccccgcgccccccaggaggccgcaccctgcgccagggcccggagacagcaacatcttctggggcctgcagatatccgacattcacctgagcaggtttcgagatccaggcagagcggtagacttagagaaattctgttctgaaactattgacatcattcaaccagctctcgtcctagcaacaggagacctgacagatgccaaaacaaaggaacagttgggatccaggcagcatgaggtagaatggcaaacctaccagggtattctgaagaagacaagagtcatggaaaaaaccaagtggctggatatcaaaggaaatcatgatgcattcaatattccaagtctggacagcatcaagaattattacaggaaatattctgctgtacgtagagatggctctttccattatgt

SEQ ID NO: 90919 - DNA, 470 bp, Homo Sapiens
gcattatctataatagccaaatgctggaaacaacataaatgtccatcaactaagtggatgaacaaatgttgtatatccatacaagaattattattcagcaataaaaaggaatgaaatgttgacacaatactacaacatgcatgaactttgaaagcattacactaaggtaaagatgtcagttacaaaaacaccacatatggtataattatatttatataaaatgtctgaaataggtaaatctatagggacagaaagtaggttagtggttgccttgggctggagggataggaggatggagggtcaccataacggtatgagatttcttttggaggtgataaaaatgttctaaaatttactatggggatggctgcatgactttgtggatatactaaaaaagtattgaattgtacttaaacagttgatttttatggtgtgaattatatttcaataaagctaccaccaaaataaaa

SEQ ID NO: 90920 - DNA, 514 bp, Homo Sapiens
aaagcacaaatgcccacacaactttgacttacaaggtagttctatatagaataaattaaaatgttagtaaaatctgtattaaaaactatgtacaattaaatgtggtttacagggtacataattatgcttctcacatcaattatagttgaggacaattatagttgaggttatctaaaagaaagtgtaatacggacatgaccattcataagtaaaaggctggaagtctccctggagtttatgcagatgatttttacttgttattgcacagtgtgaattggtaggggaaaaaataatacactaacccttgggtcccatacaggcaaattaagattgcattcttcaggctgtttcaatagcactggatttggccattccctgtttaaaaagattgtagcacttgataagactattggatattaccatctaaacgtattttgttaaacatacagcatttgtgaacgtgatccttcttcattctgccttcttggtacatacaacgttttaatcctttctg

SEQ ID NO: 90921 - DNA, 519 bp, Homo Sapiens
tctatggggagtgataggtgggccagttggacctttcccggcgttcctaggaggcagagggggagcctccgtggttggtgatgtgggcgagtctgtgcttgtggaaacgaagatctggttggtgaaggctccataggagagccgctgtttgtcccttggagtgctgaatcctggcagtgccaccttgtcctggggggaagatgctggaaagagtggcaaaagctcttgaggtctagggtgagcgctctttcttgatagggctagggattgtcatcccaaatcatctatcgctctcatctatctcctactgtccaagattccactcatattctacgtggacgtgtggattgaactttccagatttagcctgggaaagcagatcttcacactgggtagcttttagtctctttgctatgtctagggcagtttctccagcctgttaactatatccacagtgggcatgctcctgagcaaaaggctcaaacaatcaggtttactgtgcatactacagtagtgtag

SEQ ID NO: 90922 - DNA, 938 bp, Homo Sapiens
cagtcgacggtaccggacatatgcccgggaattcggccattacggccgggagaatgcaagggacaagtggccacactccctcagggtgcagaagctggatacctaccaggagtacaaggaggctgcgtcctcttaccaggaagcctggagcacactccggaagcaggtgtgtggatcctggatcagaaacccaccggattatcaccagttcaagtgagaaggaaatgttcgctctggtagcaggaccctttcatcctgaactgccttcctccacgcaggacaagtcttagcttgataggtagttaaatcagggaacattctttctgagctttgcatctctgtagtgtaatacagatggaatctggaacttagagcaagctatacttgattgaagtagctctctgctaaaatggcatctcactaatgacctcactatctgacttccattgtgtttggattgcttctctaaaatatgaaatcagagtttggaacatgatgctttgaacagtactctgcagacagctcgtgttttatgggttcctacattgattgcagcaaaatatttatggagctggaaagtgatgtttggacgctctgcaagtttgacagctttgcctaggatagcgaatatatatgtggtattcccagactttgctttcttcaggggagccattcttttacccattcttcagtgatcctgctctgtgcctcagactttggtgaagctaaccttacgtccctggctctaggaatagcctgtgcagcaaggcctgggactgccctggatttgtctcagaggtatcaggaaaggttactgtgggacaggagatgtagggtcaaataatcttgggattccggtggcatctttctaatactaagcaagcagaaagatgaggcaaaaggaaaggcaaaaaataagatttagtaaggttaaatga

SEQ ID NO: 90923 - DNA, 388 bp, Homo Sapiens
tcagtgtcaaaagatttgggaagatgaattgggtcggggggtcccggtccagggttctgatcaagcaggaaagaagaaagcaaaaggaatattttgaaaaacacaggttaaaatcaaaaatgaaatcactgggagttttatctcctgtcaaaaattctgctgtcagcttagacattcttaacctatatatggtaaatcagatatcttgcaagaagaaaattcctgggtatgtctgaaaggaagatctgcaaagatttttgcttcaatgactagtttcctatgtcatcacttgaattatttattacactttcctgggatgttaatcatagaagtctaatactgcaaaataaagtccattttgtcatataaaaaaatttacagtgaaaaa

SEQ ID NO: 90924 - DNA, 482 bp, Homo Sapiens
tttaccagtgaaagtgtttaatagttaaattatttaaatagacttttcaatttccatgggaaatcataatcgtatctgtttttgcaagagtaggaataaaaagagtgcacaccctttagagggaacgaagagctagcactgcacctgcacactgtcaccagtcactgctgggatgggagaggggtccccatggggccgggaagccatgaccatgggagaacatgggatgaactcagcacacacactttactcaggttggaagcagaacgaaaacccaacaccactggcgggcgatgtggaggggcagggaacttgagaacaacagctggaagaaagcaggcctcctgtggccgacgtcaggatggcaatgcagaactcaaaggatggagcagcagaagcacgggacagactcaggcttggcagttttgggtccacacactttgcttctcagagctgtgttcagttggtgtgcggggagggga

SEQ ID NO: 90925 - DNA, 392 bp, Homo Sapiens
gggcagaggaaaaagatacaaataaaaccaggtttagggtcgaatgaaaataatatatgtgctatgttatgaatgtgtttcccaaaattcatacggtgggaactttattccccaagcagcagtgttgggaggtggagcctctgaagagatcttcaggcacaagggctctgccctcatgaatgaattagttccctttcaaaatgggctttcagtagtgggttcattccttcctgctcttctgctatgtgaggacacaggtccctctcctccagaggacacagcaagtgccatctgggcagcagagagaagccctggccaaatgctggacccttgattctgggacttcccagccctccaggaactgagaaataaatgtctcttctttataaatt

SEQ ID NO: 90926 - DNA, 305 bp, Homo Sapiens
  misc_feature (293)..(293): n is a, c, g, or t
cagaaacttaaatgtgagttcccattgtctttaaattcatgtccaagctccctggagtaccaagcttccaaaattagacccaaagtaatcttgttaggcatgactccaaataagcatgctgtatagaaactcttcatttcagacaagatactttactcctaatcacccacacaccccttagagcctccttccttcagccttggatttacgttaaggtcgctctttgcctccttttacctccatctactgaaactgaacctgttttccaaggcccaaatcaaagtctgaaattntcccatcacctg

SEQ ID NO: 90927 - DNA, 454 bp, Homo Sapiens
agagcctttccatacctgtactcacaactagcgggtgaggagtcaaggcaaataggtgtctcatagctccccatatctcggcagtcgaccacctcctcctttgattctctgatgtcactgccagttctcctcctattgctctgacctgtctttctctgtgtcctttgcaaactcattctcaactccttagactcagtcaagtcccccagttacacacttccatggtactatatatcattccttcagagcacttaacacagttatttcctatgtatttgtccagtcatttgaataatgatcctagtttcattggatggaaagttccacaaggtcagtgaccatttctatctgtgttcaccaatgtgttcccagtgcccagaaacaatgcctagcataaagcagctgttttgtaaatacttgttcaatgaatgaataaatgacaccaggacaccaa

SEQ ID NO: 90928 - DNA, 618 bp, Homo Sapiens
tgctttcatataaaaatgtactgtagtaatcagtaagaaaaagaaacaacattggctaagtcacgaataggcatttcaccatatgtacatgataaatggccaatcaaaataaggaatggggctcattctgctggaaattaaatacattcaaacaagaacagagatccattagcaaaatgtttaaaaataatatcacagggttaccaggggtatgacaaaaatggacacttccatacacactaggtgaatatattggtgaaaatagttcagataaacatacaaccatgtatgtaaaagtatttatcatcaatgcattatttgtagtagcaaaaacaacaagcagccttggaaaccagttaatgtcctcagcagggaattaataatattattgtatattcatgaaattgacaccatgtggccacacaaatgcattacacaggcctctatgtaacataggatattcattagagaattgtttttcaagaggacaaagtactttcatttttgcctagaaaatgggggaagacaaaaatgcgcttctctctaggttgtgtgattttaggttatcctaagtttcatccttacgtgctcctgaattagctgaaatatcgtatcttt

SEQ ID NO: 90929 - DNA, 376 bp, Homo Sapiens
tattctggtcagcagaggtccttgagtcacagtgttactgaaatggttctgagcctgagaatctctttggcctctgaaagggcagggcaggtgggcaccgacttcctgccagtcctttcaggtttcctgttcaaagccagtcctgttggtggaggggatcaccgagagtgtctgtatcattttgtagcccttttctctgacgttttctggtagaaaatgtcccttgtcaaaatgctaataattatcataataatctgctttccaaccaactcccacaagtgacaacctgtgtagaactgtgataaaggtttgcataatgtagggtttgtaccaagtgtgtgtaagtttctgttaaataaaaagtctgtttccaatg

SEQ ID NO: 90930 - DNA, 467 bp, Homo Sapiens
gtaatctttagcttctagaaacaatcagaattccttaagatttttgcaaataggtttaaaggagctcacttgctttttcaaatatgggttggatatgtccaaaaaaagagttttgcctctacaatgaaaaatgatttttaccagattatggaaaggaagattcataaaaatgtgcctttaaaaagcttttttaaagtgcaagttcaccaatttgacttttgaaaatacgttcattttaggaattgattttttaaggaaagttgtaaacacagcaaagcacagaattacactggttcagacttgcatcttagcaccaaaatccactatacaaatgcagacagcataaagtaacctagtttcgctttaaatttgttgcttattttattctcccttataaatgtcattggtcttttgttagaacataatttactactttattttgaaataaagtctaagatttagcatgt

SEQ ID NO: 90931 - DNA, 215 bp, Homo Sapiens
ttcaggactggtaagcgactgtcatcaagtaaggcccccgtgctgggcaccccccgtgctggccgcgtccccgcctttgcgccctgcgtggaccccgccctgccccgctacaaaagccagactgggtcccgcggacgccagcaggggcaaccccagcctaggctgcgctccagcactgcggggcttttctgcaataaagtcacgagcgttcgaaa

SEQ ID NO: 90932 - DNA, 430 bp, Homo Sapiens
aaatgaggaacagtatagccagctccagtgacagtgacgacggcttgcaccagtttcttcggggtacctccagcatgtcctctcttcatgtgtcatccccacaccagcgagcctctgccaagatgaaaccgatagaagaaggagcagaagatgatgatgacgtttttgaaccggcatctccaaatacattgaaagtccatcagctgccttgatcagagagagaattcaggttaccaagacggaaggtgtcttgaagagatcctgaaaaataccagcactttttcatggcttttaggttattctgctttagtgcatccagactggtagagtcggagggaggaagtgaggaagggtcaaggatggaagagttctttcacttaccctttttattagtcagcttttaaagtaattgttttactgagaaaaaaaa

SEQ ID NO: 90933 - DNA, 694 bp, Homo Sapiens
tgcggccgcaccacctaaggcctattcagagcagcaagattgccagtgaccaccgagctgaattcgcgcgctgtctggagccactgctgctgctggggccacgtcgggtggcagctgctgcaagtggtgctaacacgctggcagggggcttaggccccaaggcgctgacggggccccactgcccctccccagtaggaaagatgtcggggtcacccgtccaaaagcccacgctgcaccggtccatcagcaccaaggtgctgctggcggagggcgagaacacgcccttcgcagagcactgccgccactatgaggactcctaccggcacctgcaggcagagatgcagagcctaaaggaccaggtacaggagctgcaccgagacctcaccaagcaccactcgctcatcaaggcggagatcatgggagacgtcctgcacaagtccctgcaactggacgtgcacatcgccttggagcacgccttctttagagggcatgacggttcgctttccaggagatttgggaggaagcctatcagcgagtggctaatgagcaggagatttatgaagcccagctccatgaccttctccagctgaggcaggagaatgcctacctgaccaccatcaccaagcagatcacgccctacgtacgctccattgccaaggtgaaggagcgggtggagcccagattcaggcacccg

SEQ ID NO: 90934 - DNA, 544 bp, Homo Sapiens
gcactacacttatggaaaaaccttacaaagctggagacatatgtatgttgaaatcctgaagaacattatcttaatgatgttatataattttatactggccgtgttaaataataagacaccacataccataccacaaccgtgtcatctgtagtataatacctcttactcctcctttagaatagttcactattcaaagcactttttgtgcacattaacactactgattactgtttaagcaataagttttctcatcattgtcaatgtttattattttcttagaacttctctgtctttaaaaatacctgagcctatgaataaatcggtacatgagttaatgtggaacatactgactttttctgattgcctttacgacactacttcttttcttttagcatgatgaaagataatcaatatgtctttacatctcctaaaatgcattaacagaggccctgtcaaatacaaccttgattctttcacaaagaaagccaagttgctcacgaacattgctgtaacattaactaaatagaactctgagtgatcttac

SEQ ID NO: 90935 - DNA, 349 bp, Homo Sapiens
atctgggatggggtgaagacaagggggactgtctctcaggggtgccctgcctcaaaagctgggtgcctggtgtcaaagccatctctggtcttctgggtttgctgctatcagtgtgaaacccaccagcaagctgggtcagggccacctgcctaggaagctcagccctcagcctgggaggagcttctgccctacaaagcggggctggctgagggaaagagctgcatcctgcgatggaagtcgcctgggacttagctcagggacatccagccagggggagtaaggaagctggtgccctgctcctcccagaaaatcaccaggacccgaaagaccatgaggagagggagcctcc

SEQ ID NO: 90936 - DNA, 454 bp, Homo Sapiens
  misc_feature (346)..(380): n is a, c, g, or t
atttatataagaaagatataagccaaaacaattttgaaaaagaacaaagctgaaggactcactacctgattttgagaattactacaaagctaaagtagtcaagacaaggtggtaatgatacaaagaaaatgcatatagatcaatggaacagaatagagtccagataacagattttcaatattgccagtataattccattgagaaagaatatctttgcaataaatgctgctacagaacaactaaaatggaggaaaaaaacatgaacctcaaacctctaccttaaaccataaaatttaactcaaaatgaatcacagacctaaacataaaaactataactatttggctnnnnnnnnnnnnnnnnnnnnnnnnnnnnnnnnnnngtacttgactatggggtacataaagttttcatagggcacaaaattagtgacctagaaaaatataatcatcagac

SEQ ID NO: 90937 - DNA, 487 bp, Homo Sapiens
tttggcacgttgtcggatgaattctgacactaaagcagaatgaaattgcaagagatctgcaatcacatttctgtaaagctctgaccagatgagtcagttccactgttttctcaaagactgagaaaatactttcaggcaagacactgcattctaagcaccacagcagttccttctcccctaagcttcttaggaacttggcagtgtggtagatggagggaggcggagcagaaggcagggtgctgtttgttgtgatctgcccatggcttactggctgtgttctgagcagagagggcgtctcaggggacccatcaacccacatcgacgtggctcccagaacttggccgcacgtgcttggaggagctgaagcagggttccagccagcccgctgggggccttgaagtaaggctctgttgcactcctgctaacaccctcagaaaagcggtgggaggagcagtcattctcaaataccacagcttcgaagaggatc

SEQ ID NO: 90938 - DNA, 463 bp, Homo Sapiens
  misc_feature (13)..(13): n is a, c, g, or t
cctgctccccacncaatgccagcccctcctctggggaggctctgggactggagcaactgggactctcctggctgctgaccccggagccaggctctctgcttgtcctgcactacctcgccacgtctgcacaggggcctgacaagcgctactgtctccgggctacagaggacactggagctcagagctggacaaccggcccaggcccaggccgcacacggcgcagcaggccgtctgccgcactctgggggaggtcaccctggggctgctgacctgctctgtccctcgccccagcaccgtggcaatctaacaggaaggggcagggccagctccctctggaactcgggcagcgtcaaagataaggtgtcttcaaaaagctcatggaaaacgtgcgttgtgacgaaacttgcatggctttcaagtttttttgccccaaaataaactgatactaacttgtcaaaaaaaa

SEQ ID NO: 90939 - DNA, 550 bp, Homo Sapiens
tttggtgggggtaggaatgcagtagagaaacaaaaacactgcacaaagggtgcagtgttctactattcatctaaataatggagaactggcattttacaattaagatataaaaaatattcatactttcagaatttccaagtcagaggtggcttacaacagctttcattagaaaagggtgagacgcccaaataaaatgctccctggtggaacaaagtcccctttaaacctttaccaagctctttctcagaagctcacaaaacttaagacaatgtgaacatgatgagaaagcaaagctctccaacataaggctgaaaatgacaataaaagactgcaataaaagactagtgggatgaacatgaatgcttgtcagtgacaaacacattatgcctacaaagaataaatactgcacttctctttaggtctatttacagacaggaccccatgacctttcaggcataaacctccactggcagaagtaagaatttaatcacaaaacttctatggtaaattaaaaaaataagaaatttggatttaggccttctgccatttc

SEQ ID NO: 90940 - DNA, 343 bp, Homo Sapiens
tttagtgacactgaattctttatttaaaaaaatttttgtaacacacagtacctcctcttctcttctatttttaggaagaagttataacaagttttaaatatctcaattctgaaaaacaataggcttttaaaaaataagacttgattaccagaaacaagtaatatgtagttacataaccattttcatatcactactcatttccattatttaccaattcatctttgatgcaacttggaaacaattaagcagtcactagacacctgttttagaatctgaagaaattattatccaccacaggaatctaatgatatatatatttgcatatatttaaaatttcataggg

SEQ ID NO: 90941 - DNA, 353 bp, Homo Sapiens
  misc_feature (258)..(274): n is a, c, g, or t
tttttcttaattaatgtaaaacaacacaggaaagaaaatattccccggaaataggctttatcttaaaactcaaacaaaactaaagcaacttacaataaagtggacatgctgctgctgctgctaattttctgaaaaactgatgtatcatctctcagtggcaaggcttaagagggaaaaatgggaggggagaaagagagcaatcagaaatatgcaggtcacttggatattagataatgagggaaaatgccaggaagaggnnnnnnnnnnnnnnnnnaagtttgttttatgtgtttagacaaggtgctgtttagctttgggtctaataatttttggtttgaaaaagaatgagttgc

SEQ ID NO: 90942 - DNA, 671 bp, Homo Sapiens
tgcggccgcagtccgtgcacacgtggcgccgctggccggcctgagcatccatgctgggtatgggtgccgggggctgtgctcctgtggtcgggtcccaggcagcatttttgggtggctgtgcccgtgccggggccacgctaatagctgggtcagggttgcgttccaccagcacttcaggactctccttcacaggagcctttctaggccctttggctcttgggacttcctccggttcctcttccttcctgtttgggacatctcctctccgagctcctcccagtctttcccccttctcaggatcctgggcggcggggctccaagcctcactctcctgttccatccaagagatgagggctggtttggggcctgggaatccgagcgcgcccaggtggccgtaggtctcctgcatcacgtcccggtacagagccctctgcgcgggccgcagacagccccactcctccggggagaagtacacggccacgtccgcgaagctcacagtcccgggcttcctgcaaccaggccgggtctccccgggcctcggcgccaggagcggggctgggggcggcgccatggggcctcgcagccccgatcggcgccgccaggtcctggagccgccgcctccccggccgtaatggccgaattcccgggcatatgtccggtaccgtcgactg

SEQ ID NO: 90943 - DNA, 413 bp, Homo Sapiens
  misc_feature (16)..(16): n is a, c, g, or t
aaaagaagagttaganagcacattccaaaagaacttgtggatccatcggattgtccgaagaacaatttaaaagagattccatacactaaaatagagacacaaggtgacccaatccgcatcaggcattctcattcgccacgaagttaccgccagtatcgcaggtcccagtgttcagatggggagcgatcagttctctcggaagtgaattcaaaaacagatcttgtaccaccacttccggtgacccattcttcggatgctcagggttctggggatgctacagttcatcagagaagaaatgggtctaaagatagcctgatggaagaaaaacctcagacatctacaaacaacctggctggaaaacacacagcaaaaacaataaaaactatacaagcttcccgcctcaagacagaaaa

SEQ ID NO: 90944 - DNA, 462 bp, Homo Sapiens
  misc_feature (193)..(195): n is a, c, g, or t
  misc_feature (199)..(199): n is a, c, g, or t
  misc_feature (201)..(202): n is a, c, g, or t
  misc_feature (206)..(206): n is a, c, g, or t
  misc_feature (208)..(208): n is a, c, g, or t
  misc_feature (215)..(215): n is a, c, g, or t
  misc_feature (217)..(218): n is a, c, g, or t
  misc_feature (220)..(220): n is a, c, g, or t
  misc_feature (222)..(222): n is a, c, g, or t
  misc_feature (225)..(227): n is a, c, g, or t
  misc_feature (229)..(231): n is a, c, g, or t
  misc_feature (233)..(233): n is a, c, g, or t
ccagcaaattagctgcccacctgggaaggttctggatgggacttggcagaagcttgagcgggcccctcctggcagtcctggctgagcgggcaccgagcgccttatgctggtccagtcagttggagtgactaaattcacatctgcccagacctcaccctgggctccggacctcaccccgggctccagcctcacnnngggntnnagcntnagggatntnngnangtnnnannnanaaacccccacccccacccgcaccctccccggcagtcactgggggtatttctggcagatggaaggggactcacagtgggagggagggtcatttctctgaatccagggccaggggtggggagggacagagtcaaggccctgccttggcttggagctttaaaaacactcatttcttctggaacgcagcctctccccagtaaatccttctcaccagagaaaaccatagtcaaa

SEQ ID NO: 90945 - DNA, 943 bp, Homo Sapiens
  misc_feature (111)..(171): n is a, c, g, or t
tcggctgacagccctagtacgaggcgggtggttctcccgacgagcgggggtgtgaccccgctggcggaatacgaggatgtgagctcccagtccgagcaggggctgctgctnnnnnnnnnnnnnnnnnnnnnnnnnnnnnnnnnnnnnnnnnnnnnnnnnnnnnnnnnnnnnagtccggcctcctcctccggcacccagcggcgcggggaggggtcggagcgcaggccccgccgggaccgccgcagcagcagtggccgcagcaaggagcgccaccgcgagcaccggcggcgggatgggcagcgcggtggcagcgaggcctccaagtcccgcagccgccacagccacagcggcgaggaacgggccgaggtcgccaagagcggcagcagcagcagcagcggcggccgccggaaaagcgcttcggccacatccagcagcagtagcagccgcaaggaccgggactcgaaggcccaccgcagccggactaagtcgtccaaggagccgccttcggcctacaaggaaccgcccaaggcctaccgggaggacaagaccgagcctaaggcctacaggcggcggcggtccctcagcccactgggaggccgggacgacagcccggtgtcccacagggcctctcagagcctgaggagccgcaagtcccccagcccggcaggaggtggcagcagcccctattctcggcggctgccgcgctccccgagcccctacagtcgccgccgctcccccagctacagccgccacagctcctacgagcggggcggcgacgtgtcccctagtccctacagcagcagcagctggcgccgctctcgcagtccctacagccctgtgctcagacggtctggaaaatcccgaagcagaagcccgtattcatctaggcattcaagatctcgtagcaggcacagattgtctagatcagaagtcgtcattctag

SEQ ID NO: 90946 - DNA, 471 bp, Homo Sapiens
tattccacaatgtcttacctaactctagctttctatactcaacagcaatgcctcctgagagcctcctgggtgtcaagtactctgttgtgtgcttttgaggactagggtgttagcaaggcacagtctctgactttgcagggctcacagattcatggggaaaattgatgttccagttacagtgaggcaaggcaatctggcagtaactccatagagaggaatgacaggctgggcctaggaatggaggggagcgggtaatagaggatcctaaggaaactgagagaagaggggctggagtgcggctggtctgcgctcctgtgcattgccttggctaacattttacttgtccttctgaatcaccctggcattgtcaacaaagaataatgtatgatccttcttggagtaaaaagccttcagcagtgcttcacaaaaaattctattgtatattttgtgtcctacctcaaattaattaaa

SEQ ID NO: 90947 - DNA, 685 bp, Homo Sapiens
tctttgatatgatgaacctataagtctattcatctctgttatttcatttctcaaatgtgagccttgttgaggtccattatcaaatctacactttggttgattatatgatgtttaggacaaggcagaatttaaaacctgcatgtttagtgcatcacatgtcaagtcaccatccttctgacagtgtaacttccataacgttattttgagagccatttaataatcatatttgaaaaagtggatttcttgagtctgttgtagtttagtacttacagcagtgcctaaaacagcaactaatatgaactgcctgagtcctacaacataaatgcataaagcttttttatgtaaaagccacaggaggggttcaaaattgaacttttccaaagtttatttctcttgcgttagatgaaaaactatttaaaaggactgaaaaccctgagctttttgctcgtcttggtagcagatatctgtaaaaacctacccagaattgtgattttacttcattgttcttgcatccttgaggctacagtataaatcatctccaaacttgactactattgggaagatgtgtataaaagcatcgctttgggaattttttaaaaaatatgcaaaaataaatattgaataaaatctacattaccataaaacacccaaaaatgcagttctaaaataaaattggtcacaatta

SEQ ID NO: 90948 - DNA, 465 bp, Homo Sapiens
gcattattggattattaaggctatgaagattaattgatttctctggttaactgagtgtcagaggatgatttgtttccattctgatgatgacatcttttaaacatgcctgatccattctttatactgattaaaattgaaactttttgtcatttgcaggcctaaggtgcctctctttgattacaagagattgaaactgcatgcatgctctttctggaaagtttagttttgtttttaataagccaattatgtcaatgttttctaataatttgctccttttttcataataaagtgctaaaactcaagttagctttaaggttctagacaattggacagacccaatgtgttagtattctttactttccatgagcacattttgtaaaatagtcttacatattgctgtacactgtaagaactcaaacttgtttctgaaactttaatcataataaaaaatatgaaaattgctaa

SEQ ID NO: 90949 - DNA, 616 bp, Homo Sapiens
  misc_feature (539)..(539): n is a, c, g, or t
  misc_feature (549)..(549): n is a, c, g, or t
tttggttttcaaagctttctttaatttggtggaaagacatttttttctaatcccagctgaacccccaaaatacgggagaaaaaagcaagactctgctttggagtacagcctttcaaccctttccatccctaagggcacccagtgaggcccttctgcaaaacctggggtcagtgggacacaatgaggcagctcctggagcagaccatgtggcctgagcccctttgggtggcagggcgggcagggcctctgctgtctggcatggctgacagaggggcgtggctcacgagctgccccttgctgccctaggggatgagtcattccaggtcggcatcctccggcaatggcagctgaccctatatggctctgtgtggagtgcagtagacatcagggacagacaaaggtgggtaaagccgcatgtgtcagagggaaggccagtcacaggggaagggccgcctagggagcccatcgccctctgaaccccagctgtgcttcccagttccagcgtcaagccggtagatggagccccgggctgggaactnacagtctggncctctcctttttgctgtggggcttccctgtcttcacctgtaaggcaggaaaatgggtgagggcagat

SEQ ID NO: 90950 - DNA, 969 bp, Homo Sapiens
  misc_feature (889)..(889): n is a, c, g, or t
  misc_feature (946)..(946): n is a, c, g, or t
cagggacctcagctgcagcgcctctggcagctggcatgatagccttaatgctgcaggtgcggccctgcctcacgtggcgtgacgtccagcacatcattgtcttcacagccacccggtatgaggatcgccgtgcagagtgggtcaccaacgaggcaggcttcagccatagccaccagcacggtttcggcctcctcaacgcctggaggctcgtgaatgcagccaagatctggacatctgtcccttacttagcatcctacgtcagtcccgtgttaaaagaaaacaaggcgattccgcagtccccccgttccctggaggtcctgtggaatggatggacctggagatgtcagggctgaagaccctggagcatgtggcagtgacagtctccatcactcacccacggcgcggcagcttggagctgaagctgttctgccccagtggcatgatgtccctcatcggcgccccccgcagcatggactcggatcccaacggcttcaatgactggaccttctccactgtgcgatgctggggggagagagcccgagggacctacaggctggtcatcagggatgtcggggatgagtcattccaggtcggcatcctccggcaatggcagctgaccctatatggctctgtgtggagtgcagtagacatcagggacagacaaaggctgttagagagtgccatgagtgggaaatacctgcacgatgacttcgccctgccctgcccaccgggggctgaaaattcctggaggaagatggttacaccatcacccccaacaccctcaagaccctggtggctgggtagctgtttcaccgttcttctggaccgtttactaacaatgctggaaagtatattttgacccaaagggaatgtgggcttccaatcaaanttttgtaaggaattggaaccccggcccactgggcccccatcgggagccggaaaaggnccaaggaagggaagggaaccgaa

SEQ ID NO: 90951 - DNA, 583 bp, Homo Sapiens
tggctggccagagggcaccatccaagtggccggcagttctaggagggcattcagttccccgtaccatgcttgcccccagctctgctcatgcacctggtggtggggaggcgacctgtgggatgcgggtcggttgcctctctctcacttgctctgcatttgtgaaacaaaaggtatgccctccactctgtgttatcagatgcccgccctccactctgtgttatcagtcttggttgagctgtttgggcggcaggtggccctgcagcctgctgagtgcacatagtgtcatctctttgggcatccaggaagcatgtcacacacagccattcaagcccctttgttttcctgagaatacagggtgttttgagtaggaaactaataaactcatactgcactctgtctatgttttacacttcagtggttatttaaaactttgattttgatagaatttcacagaatagtataaagacacatcctgtggcaccagtttcttttctcaacttctccccttttacacacgttttttttctgaatgtcctttttagacatgtgcctttattcatggtgggtatattcttagaacaag

SEQ ID NO: 90952 - DNA, 384 bp, Homo Sapiens
gctgcttcccaggcctcatggtactagtgtggacctcctggctgtgattaatgcagttttttagattaagtactgcacgactactcgcttctgaaactgtcataagaaactgcctcagctccctccagggtggacacacaagagcagaatctccgtgggacatctctttggagcatcaatattactacagtatttggaagacacaaatttaaataatttctaaggtaaagaatggaacatttaagacaaggctggaaagtcatctgcctttaataactcatctgtgcctcacatgtcagactttctccaagaaaaaaactaaggagaacttatttccattcttataaatagtaaaaataataaatcatatcaagtcaattgaaa

SEQ ID NO: 90953 - DNA, 445 bp, Homo Sapiens
  misc_feature (358)..(395): n is a, c, g, or t
tctgaatgagtcactgaaccatggctctgaggtcaaagatagtgagacaaaaaggaattgctcaaatactgagatgcatgtcaactcttccaacaacctccagaatttactgagcctgtaacacagcttttgtaatccttttctgtgaaatccagtactgtgtcagcttcgttagggtctaaagtgtacctttcataaaggacctcaagatttattttcctgagctttaaatgagtgaaaatgtgttttgttgaaacttcccaagaagtaactgcattttctatggaatcttccattgtttatgggcctgatgaaagcatttggcacttaatgattcccagactatttcaactttatnnnnnnnnnnnnnnnnnnnnnnnnnnnnnnnnnnnnnntgttttgaatgctaacaataaaatatgtggatttttaaaccttacaaaaa

SEQ ID NO: 90954 - DNA, 375 bp, Homo Sapiens
ttttgctctccaatctgcaaaatttattgtgatttctggtctataaaattggtgactatagaaccataatcctgcattatattctttctttttttcaggtagtaactagtacttcaatctgttcttagctttatatttgatgctcagatatattaatgggaaagtggctgtttctaccaagaaaatgggttttgaagtcttgaatccattcagtaggtgtacgtttatatgaaggcaaacgtttccaggagccatcttcacatttcttcataaactggtcaaagagcagtcttaggtccttgttccagctggggttggggacagaacagtccttaagaatgacttcctcagaagaaaatgacctcagctcgggtc

SEQ ID NO: 90955 - DNA, 2763 bp, Homo Sapiens
  misc_feature (411)..(439): n is a, c, g, or t
  misc_feature (1588)..(1647): n is a, c, g, or t
  misc_feature (2221)..(2249): n is a, c, g, or t
cggctaggtacgaggctgggtgtgaatcggcacgagggcatgcatcctggaatgcgctggacgtgttgactgttgaactctaccccgtcagacaagaggaccacagcttttggcttcctgaatgccctgtgtaagctggcagctgtgctggggatcagcatcttcacatccttcgtgggaatcaccaaggctgcacccatcctctttgcctcagctgcccttgcccttggcagctctctggccctgaagctgcctgagacccgggggcaggtgctgcagtgaaggggtctctagggctttgggattggcaggcacactgtgagaccaacaactccttccttcccctccctgccctgccatcctgacctccagagccctcactccccactccccgtgtttggtgtcttagcnnnnnnnnnnnnnnnnnnnnnnnnnnnnnaaaccccgtgggcagggactacagggaaggctccttcatcccagttttgagatgaagctgtactccccatttcccactgcccttgactttgcacaagagaaggctgagccccatccttctccccctgttagagaggggcccttgcttccctgttccaggggttccagaataggcttcctgccttccccatcattccctctgcctaggccctggtgaaaccacaggtatgcaattatgctaggggctggggctctggtgtagaccatggaccaaaagaacttcttagagtctgaagagtgggcctcgggtgccctctcacatctcctgttggatgctgggggagaagcaagaaacctcagcctctgggctccactttcctctcaatttgggctgcaaatatgaagcctgaattttatgaaattagctttctgattcttatttattaatagattaagttctgaggcagctccgcaggactgtgtgtgaatgtgtatgtatacttacatatgtgtgtgcatgtgccatggggcggggggtatcactatactgtcctcaaatataagccaagggtaatttcagcggatgcacacacaaccctgcctcccacagttcctcccctaatctggtttctgtgttgagcctgggatggaggagccctaggccagcctgggataagagtcccacagtctagggagatctgagggcatccgacaaggcccatctccttccctcctcaagaagcagaggcctcctctggagtgagaggctccacccactacagcacaggcgggaatagcacagctgccctcccatgctccctacctgtcccctcacagggaggggagcaggggagggaaagaaaccaggcatctggtcaaaccagcagatcaaaaagcacaaagagctggggcagaggcaggaagcaggggccctcctggcagctcctctgagtggggagaggttgggcagtgagtgagggacccctaatgcagggactagaagcctcagtttccccattttacccttccacacaatagcctctgtaggttaggctgccccatcccaccctactctgtgtggctgctttctttggtgccctcccctcaccccactgtagctgtgacgtgttgtagtttttagatgtttgtnnnnnnnnnnnnnnnnnnnnnnnnnnnnnnnnnnnnnnnnnnnnnnnnnnnnnnnnnnnnttcaccttcgtcatgctgcgtccagtgccccaaccctgtggtcactctccccattttgtaacactgtaccaggtggtgactgtttaactctttggtgtctgtgctcaaaagactgccttctccagtgcccagtgtatgagtgtgtgccctgtgcccttgtccctcactccccacatgctggacgtagccctcttcctcgcacccctgggagggacccatccatctcccttgctctcctggggaaccctaaacccaactctgttgatgtgaaaaatgcagtgaaaaatattgacgaaaaataaaacggaaacaaatcctccaaatactgagaaaaaaccactacgacactcccccaataaaatcaatacgagataagaactaacccctaccctagcaattaaaaaactgttaataataaataattgccgggcccacctcggccctccagaaaatttcttcttaaacccattccttttggccgccgcgggccccctaagggaaaaccgaaacatgggccttaagtttgttcccaaaggaaaaacctggggcaattagcctaagggctttggaattnnnnnnnnnnnnnnnnnnnnnnnnnnnnnggggggacacccgaaggcgtttctgaaaccaatccccaaatggggagttctccgcagggccctctcactgggaatctcttccaaacggggggcgtcaccgcgcgaggccttgaaaattcaaatttttacacccccgggcccccttggccctgtcttttttacaaaaaaccgtggtggaaaaatctccttatagaactcttttctgcccgcaaaaatgggagaacccctctccccaaaaatgggcatttgtaatgaaacccttggaatactccccaacggtggcaaccacaaccccctttggtgaccccttttggagcataataaaatatttccgcccccgtgggggtagaaaacgcggggcgcgcaaaaagaaaaatttttcccccactgtttgggcgccccccgctttgtaaaactctcaatagtgggtggggtgaaaacctcctcccccccgggccatatttggggttctaaacaccaactaataaaactcgtcttctttttccccaccgaa

SEQ ID NO: 90956 - DNA, 1095 bp, Homo Sapiens
agcaccaacacgggagtggggatgaggctctggaggtcaggatggcagggcagggaggggaaggaaaggagttgttggtctcacagtgtgcctgccaatcccaaagccctagagaccccttcactgcagcacctgcccccgggtctcaggcagcttcagggccagagagctgccaagggcaagggcagctgaggcaaagaggatgggtgcagccttggtgattcccacgaaggatgtgaagatgctgatccccagcacagctgccagcttacacagggcattcaggaagccaaaagctgtggtcctcttgtctgaggggtagagttcaaacaagtcaacaccgtccagcgcattccaggatgcaatgctgacccccgccaaaaaggcagagcagagcgatcatggccgactcaactgttcccaaaagacaggaagaagcaggagacacaggacatcacgctggagccagcaagcattctgagcctgccgatcttgtccatgagcagggcagacacgatattcccaggaagcactgccagtgtccccaggaagctcacaaagtataccatgtaggcaccttcgcccgtccctgtcacgtctagcgggcagccctccttgttgtgcaggaatgtactgtttatcagacggctgttcacaaacttgtactcgaacaggtcagtgttatagaacacagtgttgatgaatgtgcagttgcggaaaaacgtgttgctggatgtgacatcctcaaaataacactcttcaaacagggaatcctcaaaggacactgacttgagccgcagcccaatgaacttgtcattgaagtactgcccgcctcggtggatctgattctccaacgtgaagttaaaagttacatgctctacgcgctccccggggaacactttggtgcgggatgcgtagtccactgcctggagatggcggatcatgtcaggaaaccagacggtcaggccatagtagctgaatgacatggtgaaccacacacccatcatcatcagagtgatgcgccgatattcgggaccaaaacaggagagaacctcgtgccgaattcgccacccagcctcgtacctagcctatatt

SEQ ID NO: 90957 - DNA, 500 bp, Homo Sapiens
  misc_feature (376)..(376): n is a, c, g, or t
tgcggccgctccctcccggactcccggcctcccggcctccctggtcccgcctgggaagggatgcaaggaagccctccggcgctgcgctccgaggcgggagacagcgtccccctccgcccctcgggtcctggcgcctcagagcccggcccaggccgcggaacggtgatgctcgggccggacgggcgggcgcggatccctgcgtcccgctgaaaatgtgtgtctgacatgcaagctcagtggggcagagacccgtggattgctgtgccctgccctccggacctggatcatgaaggtgttgggaagaagcttcttctgggtgctgtttcccgtccttccctgggcggtgcaggctgtggagcacgaggaggtggcgcancgtgtgatcaaactgcaccgcgggcgaggggtggctgccatgcagagccggcagtgggtccgggacagctgcaggaagctctcagggcttctccgccagaagaatgcagttctgaacaaattga

SEQ ID NO: 90958 - DNA, 478 bp, Homo Sapiens
aatggtaaatatgtgcaatgaattttttggttaagaaagtaaaattttatctaatactaggtttttacttttttcactgtggtttgatatatatttttggttagaatgtactgattgtttttatgataagatgtatattttacttgcattcattcttaagaggtttctgtttttctattgagaatatctgttgaattaagtaggatttcagttagaaaaaggaattccgaaattaactggtctcaatctgattatatgtgctacatggccaaatcctattacagtgaattctaaggtgattcaaattgttttattgttatagaaatatgcagaaatcagatggcttcagagtcataaaatatttttcttgtaatagtatttaagcaatttgaccttatatgcaaacgttaagtgaatataaataagttctgtttcaattcatgtccatttaacaacattaaaataattattaggaacc

SEQ ID NO: 90959 - DNA, 704 bp, Homo Sapiens
gaccgcgctgacggcttctgccagagttagacggagcacgagccgtagatggtgaagcttgtgaacatcgagcatgtgtgcgtgcggggcggcctctacgaggtggatgtgacacaaggagagtgctaccgtgtgtactggaaccaggctgataaaatacaagtaatgcgtggacagtggtttattgacggcacttgcaagcctctagaagaggaagaaagtaatttaattgagcaagaacatctcaattgttttaggggccagcagatgcaggaaaatttcgatattgaagtgtcaaaatccatagatggaaaagatggtaagatcaattgatacatttaatatattctacaaaccaagtaagttgttgataaagtttagagtggtttgtaaatttgacataataattcaggaggtttagaattagaaaatttgatttttttaaacatttgattattctagaatttaaaaattaactactataaatatctgaactatctcaatttttattttaatatgtatggtaagtgtcatgatattaacacagtttactataaatgtacagattgttacaatgcactccctatttaatcttttttagtaattttttagttatcaaaggaaattgaacttaacccaaaaattccttgttgttatatcaagacaagtttcattaatatttcaatgttcttttcctgaagttc

SEQ ID NO: 90960 - DNA, 458 bp, Homo Sapiens
agattattcttccctattaaattatgttggcacttctaaaagaaggattccaaaagtagattaagaagcagttttaaaagaggattccaaagatgttacttactgttacagtaactcatgtcctccagaggtgatttttgaagagtgcgtatttttggcagttactttccatggcagttcagttacttcatgttcattaatttccctgactactggttgtcattttaattgtttaattgtagtaataatttaattgtttgttattttgaaggaaggggaagggaggttcaatgataagaaaagcattcttcctttttaatttaaataattagaacatacaatttgtactgaaatgatgtaaaaaggctcttattattgaatcattggttttgcttatccttttgtttgaagtataacttgtcatatcctttatagccacttaaaaaaggagagaaaga

SEQ ID NO: 90961 - DNA, 463 bp, Homo Sapiens
attgaatctaatttcagaagagcgcactgtcttctcagtcaacaaggttgcccagccacagagggtcagagaaaatgtcctttcccctccccactccttttcatagaatcctctctcaggcctaactgagctgtcatatccaattcagactgacacagagtgaggggcgctgagagtctctatgtatataaagatataggaagaaaataaggatcatcacaggaatctgttgggcttctccccatgactgtgatcttacccatgtttgaatcacaaactttaaatttataataattatgattcttgcagttttcaagtaatttgttaaatgcctattcaacacagacagatttttattttcagctgtggcttgtaaatgcctacaaactgattcatgttggtggtcgttatgacactttctgtgaattggtgaataaatatgattttagaatttcacagtaaa

SEQ ID NO: 90962 - DNA, 840 bp, Homo Sapiens
ataagatcttcgtggatgcttggaacccaactggtctcggttttctactttagggaaagagccacagcttgagtggggtggttttggtgtcacatacgcgattaataacacccaccgctgcagaggaatcaccgtggactactcctcctttcatcccatgctcttgcgatggatccctctcacctgtttactgatttcattcaaattcttcagcgaccacaggaccccgacttgccttctctatcctggttccctcactctgctttacaggcctggcctgctcgctgctcctcacaccagcgctgcacgggtccctccacgcctccgccctgtttcctccatcagacaggactagcttcctccatctctgtcgggcaaatgcctgcccagccttcaagaccctcctcagatgccgcctccacgattaggcttctttcagacccctgagcctgtaacacgggctaccataactctccacctcagcccacattcccacagcactcgcgacgtccgcgaccctcaacatggcgcttcattctcttttagggtatttcctgcttgtttcctgcacacacagtcgcgcgaggcgcagtcctgagtgacccacgcacgagtggcccgcgcttccagccgcgccgccgcaggccagcgagggcagcctgagccgcttcccgccccggcgaggaccgtcgccagcccgctgctctagcaggaggcggttccacagcgcacccggcagcccagccaccgtcagcaccgcgcctcgggcgggcttttctcccttccgggaggcgcgaatcctcaggggctccttgagagggcgccagggagcagctgcgc

SEQ ID NO: 90963 - DNA, 490 bp, Homo Sapiens
taggttatattttttatattttaatccattctttgtttgtttacctgtgctcatcctctgcccttacacccatgactgaggaccaatgacgtcatgtggcttttgcaattcacgccccccttaagtccttaatgaagagccagcccaagtagaggggcccctgatcctcacacttcagtatagcattggttccccctgaccactttggagcactgttctgggactccaggtcttgaggagagagacaaaaagagagaatggatcctcataggtcagggagtgggggagggggcaaatgagccttaagaaatggtttttaaacaaccaaacaaaaagcaggaaaaacaaatgggaaatgggggagcgggttttaggaagaggctgcactgcagccacaggggattcttaggatttttctacattctgtatatttcttctcaaacctccaaatgtccttaaatgtttaataaacactgacatttccagaaaa

SEQ ID NO: 90964 - DNA, 448 bp, Homo Sapiens
caggccaccatcgcaggactcagagtaccttggaagagcaacagcctaggaagattctgacctgcaggaagagcgactgtgccgtctcactgggccacatcgctaccactcaccacccatcaaagggcaccaagctggaaaacaggggctgtgcaaatgatttctttttctttcagacaatcatctgtgctttacgttgttttaaacatgtttaaggggagagagaacaagttgtattaagagtgtttaaaacaaattgtcttttttctaccttgatccactttcccctttccctgtaagcatttacctactttgtatttagtctgtggtcatttaaatggcatttggtttaagaggtgtccaagaacagggactctggcaacatttccattgcataaagagccatttatcacaataaaataaaattaaaattctacagataataaaa

SEQ ID NO: 90965 - DNA, 576 bp, Homo Sapiens
  misc_feature (489)..(489): n is a, c, g, or t
  misc_feature (503)..(503): n is a, c, g, or t
  misc_feature (528)..(528): n is a, c, g, or t
tttaagttgtagtgtcaacttacaatgacttctgttttttacagataacaaaagaagcataaaaacaaacataaccaaagagaacgttccccagtgagtggagttccaccagtgaccatcagtgcgctggtagaggtagagtgatgggtcgtgatgctagagatctgagaacacccactacaacaagtgggcatcgatgcgcagccaacacagtccttggcgaacgtagcggacaagattggtcatgctgctgtgctgggtcagaggccccatcagcgtgtccagatcaccaaagaattctttgttttctcttgtcagtttgtcggccatatcccagtgttcatagccccgtaacacattgctagtgatgttgacgtggctggcagccatgtggtgaatgcgctggggaatggtgactgggccattggtacagttccccattgcgttgatggggggagacgttgtgagagacactgggggatggaggtncttccattgctacncctgggaagggtatctgtgcgactnttggagcattttgctaaaatattccatcagtgattcggaatacttcat

SEQ ID NO: 90966 - DNA, 473 bp, Homo Sapiens
  misc_feature (47)..(47): n is a, c, g, or t
  misc_feature (142)..(150): n is a, c, g, or t
aactggtgattcagttttaaacatgtctagctcaacatgcctgtganacatacacatgacaatgtccagatacatggcaattggatgaatgattctgaaactcaaaaagagaggtctgagatggattctttgcatacttacnnnnnnnnngtttatgttatattgaaatgatctgttttgtgcctgtctccactattacacagggctggttcttaatgacctttgatgctccaacacctaacaccatgcctggtacaaactgcacactcaattagtatttgttgttgaactgaactccttttgagacatgatgcgtctaacaaagtaatagtagtagcctctgaggagggaaactagcaggtcagagtgaaaaagaaattttctttttgttgaatatattttagttctttttgccttttcctccaatgtatttctatttcctgagaaataaaaagatgacataaaaagtgaaa

SEQ ID NO: 90967 - DNA, 491 bp, Homo Sapiens
gcggccgcagtggaaggagcaggcgcttgagctcgagcgacggcgctggcggagacgccggctgctcctcccctccccgccggtattaatctctggagaagacacatccacagttagcactttcttcagatgctgacgctcggtgaacagttgcctttggtcacaagatttagaagacacagtgtccatcctcccagattggatctctttttcatatggatcttctgtttctatgtctttttaaaaaataactttttgggaaaccttttggattacaactgttcatcctcacctatgcaaagaaagggaagctattgctgggattttgaggaggtaggatgaattggacaaggatgagactcgtgtaggtgaggacagttggaaggatcatgatgtcgtaatcttggagttaggtgaaacagcttttcctaaaaggattgtacaccttagaagtgcttaaggaagagtgatgaaggcaagtatccaactct

SEQ ID NO: 90968 - DNA, 495 bp, Homo Sapiens
  misc_feature (120)..(143): n is a, c, g, or t
cagagtctgtgtggatgctgccatcggtactggaggccactgcactggatgtttgggcaaggctgcttacttccaaccgttcgatccgctccgcagttccctcctctcctggtagacatnnnnnnnnnnnnnnnnnnnnnnnncaagctatttccatcatagcagagccggtaggtgcatcagttgtggatgaagacctgggtcggcctgactgcataacagctgtcatctcctgaccagacttcctgttgatttggggacttccctttggggcctctggcttgccccgcctactatgcaagcttgtccctctcttcatcttgggtggcactcgaatctgctgcaggacacgattcagagcttcatcactcttccttaagcacttctaaggtgtacaatccttttaggaaaagcggcggggaggggaggagcagccggcgtctccgccagcgccgtcgctcgagctcaagcgcctgctccttccactgcggccgc

SEQ ID NO: 90969 - DNA, 596 bp, Homo Sapiens
tgtttcggatgccaactggcccactccccaagcacttgcccccagcttgcgaccattggcactgggagggcctggcttctgggctgatgggtcagttgggccttcataaacactcacctggctggctttgccttccaggaggaagctggctgaagcaagggtgtggaattttaaatgtgtgcacagtctggaaaactgtcagaatcagttttcccataaaagggtgggctagcattgcagctgcatttgggaccattcaaatctgtcactctcttgtgtatattcctgtgctattaaatatatcagggcagtgcatgtaaatcatcctgatatatttaatatatttattatattgtcccccgaggtggggacagtgagtgagttctcttagtccccccagagctggttgttaaagagcctggcacctacccgctctcacttcatctgtgtcatctctgcacactccagcccactttctgccttcagccattgagtggaagctgccccaggcccttaccaggtgcagatgcccaatcttgatgcccagccatcagaactgtgagccaaataaacctttttctgtataaattaaaaaa

SEQ ID NO: 90970 - DNA, 607 bp, Homo Sapiens
acgagggagacggtgcaccgaggcatcaaaggtgtggtgacagataaattcggcaagccagtcaaaaacgcacggatatcagtcaaaggcattcgccacgacatcaccacagccccagatggtgactactggagactgctgcccccaggtatccacattgtcattgcccaagcccctggtacgccaaagtcatcaagaaagtcatcatccccgcccggatgaagagggctggccgtgtggacttcattctgcaacctctggggatgggacccaagaactttattcatgggctgcggaggactgggccccacgacccgctgggaggtgccagctctttgggggaggccacggagcccgacccgctccgggcgcgcaggcagccctcggccgacgggagtaagccctggtggtggtcctacttcacatcgctgagcacccacaggccacgctggctgctcaagtactagccccggccccagcacccgccaggatgtggagaccgaggcccatctccgcatcccgggctcctggctcttgattttgtctgccacagacatcccacaaagccgctgccattttattaaagtgttttgatccactttcaaaa

SEQ ID NO: 90971 - DNA, 538 bp, Homo Sapiens
ctgaaggacacaaccttccccaaagtcctgacgtcgctgtttgctggcaacaaatagagtcaaaagaagagaggcacagaatgtgccaggggtgtgctgcgtacagccccgatgaccacaaggccttcttgggtcaagttctgccatctctggttaagatgggctcaccctctaggaccctgattgagtcctcggaccaccaagagtgccccaccaagagcctccctcttctggtgactcgtgcctgcttcccgtggagagctccagaagggaggaaactgtgaggaggtggagaacgtggcagggatcctaactttcttactgaaggaagttcttcacaagtacccatctgccttcagggaagaaaacataactcattttggtctttcaaattcagttctcaaaaccaaatcctgttgtcagcaatctgtgtcccaacgccttcttcagcaacagcattttccctgtggaattagtttccaatgttctttcttaaataaaccactgaagattaaaaggaatccagatacccaccaaa

SEQ ID NO: 90972 - DNA, 696 bp, Homo Sapiens
ataacgtaagccgagccatgagggagcgggaggggccgccccgcctgtctgtacagggtgtggggtgagggcaggaaggggacaggaggtgcccccagagacatgaatttttaaaaattaaacacactccttgcactttgctagaaggcctctgtcaccatgtgaccagggacctcttcagggctcccagcaggaaaggcagaattacaccccccgggaagcctgaagcccaccctctcgcagccctgagccgggcaacggcggctcaccagcacctcctgttctaggcggcatttttctaaagtgcagagtgcagcagcctctgcatcaccccactgcagggagagagccacgccctttgcagttgtgaaaccagacccgctggacagttcgcctccaagcacacagtgcatattggatactgacaggccagggtggcagtggggctcctgggacccacgtgacaggacaagagctgaggctcagccagtcgcccccacaaggccagccgaagaatgccagggaccgagagctgaggctcagtgagccatcccacccatgccagcgggagaatgccaggtacatcgctctccatgctgtcgtcctcaaaccccagcacaatgcctcacccttggtaacattcagccttcagctcatttgtcttgcaaataaaaaggttgaacttggaagaaaaaa

SEQ ID NO: 90973 - DNA, 307 bp, Homo Sapiens
ggctcaggcttgtaaattgctctcactggtttttagaaatgccctggttcttttcaccccactgttctcagcctacgcaaatcacttccatacgacaaggatctgtcgggatatagagagctcaataaaagctagatctttgatgccgatggcagctgcagactccagctccttcccattatcgtgatagactgtctgttgctgtgttcattttggttccaaatccacatcatgttattctgaactcgcaggccagaagccgcaacacagaataaatcctcaagtactgacgtgctaaagtaaaaaa

SEQ ID NO: 90974 - DNA, 451 bp, Homo Sapiens
  misc_feature (43)..(60): n is a, c, g, or t
tccatctttataagtgctttaattaaaaccaatcttattatgnnnnnnnnnnnnnnnnnnccttgcattgatggatggtagctatttgcaatttcttgttttggctggatgcattgaaggattaaaaatttaatatttaaggtgtgccttaaactgcaaggttccctgattttattctcatctaggaatttttgctgctttaggtagctgacaacatgcagatccatactctatctcttaaaattttcttttggaactgattccaggtgaaattttcttagggaagatgtggctagaagctgggtatgcaaagcatgtctatagcaaggaaagccagatgagtgagggtcaaaaatctagttataaaatttaagggagacactaggtttaaataaacatattctccaaccttagtgattaattttttcccttttttgatcatctggccatg

SEQ ID NO: 90975 - DNA, 436 bp, Homo Sapiens
caggaccctgaattattgaaatcgaaggctgacttcctttctgcagtgagcccaggggctaatgttattatcctgtcacacttgcaactagtgacttttgtttagtgatagaagatttggggaggacccaaaggactcagaactttctctccatacctccttttactcttttctttctgtgtaatgtatcaacaactgtttaatctcccttctaacaaaccttgatataagctttctgatatcaaagtatattgacagttaacccttactgattttaaacttgactatccagtctgttaattacctaagattttgttttcatttcatctctaattgttttgatcattggcagagaaagagtatttgaaattcatatcagttttgctccttattttaatctctttgaattaaaaataaaactttttcaaaatggaaa

SEQ ID NO: 90976 - DNA, 320 bp, Homo Sapiens
tcaaatgggcttaagtaaaaagggatttattggctccaaacctggaaggggctgaggtatcactaaatccagtgactccggtgatgtatttgtgtatctctccctttctgcaaagggccagtaacccctcagttccctatctactttgcgactataattgcaagcctcattctgtcctgttacagtcgtgcggcaattaggctgagggactggcgcgcccgctcccccgactgtgagcctaggcggcgggtgtcatgcccctccccactcccgggcggaacagttcagcaaaaagcttccagttacttcctgctcttaaa

SEQ ID NO: 90977 - DNA, 1183 bp, Homo Sapiens
tgtttcccccctcctgtctcgtcgtccttcgttcgtgcccctccttgcatgaccgggcgtcgtacgttctggtcccttcgcgttgtcttcccgctggtcatgtgcccttgtgacatcctgtcctggccctttgtctgaccgctgcgtttgccggtccctcggcgctgttctcctaccgtcgtccctttctttgggaccagcgtttttagacgcgttccttggggttctttcggggacaaagctgcttggccctcgccaacgggttcgggtcccttgtgggcgttttcgtactactggagtatctggtcggatcaattttcgatgactgtgcgctttccctggctcacttcttgggaaactgatgtggtgcgaacaactgcaggtgtttctggatgcatatcggcgctactcaggcccgtggtccaagatctatttcgtattgtggtggctggtgtcagtctggtcatactggctcaacctgtttgctggtcactgattctggagaacttccttcacaagtgggacccccgcagccactgcagccccttgctgggacctcagaggtccacctaccagatgactgtggagctcctgttcagggatattctggaggagcccggggaggatgagctcacagtagaggctgagccagcacccgcacctgtggctgtgcaggtgacgtccgggctgccgtcccagcaggggcggcaggagagagaggctggcctacacaggtgcccgtcatggaagaggcggccatgctgtggccagccaggcaggaagagacctttcctctgacggaccactaagctggggacaggaaccaagtcctttgcgtgtggcccaacaaccatctacagaacagctgctggtgcttcagggaggcgccgtgccctccgctttcttttatagctgcttcagtgagaattccctcgtcgactccacagggacctttcagacaaaaatgcaagaagcagcggcctcccctgtcccctgcagcttccgtggtgcctttgctgccggcagcccttggggaccacaggcctgaccagggcctgcacaggttaaccgtcagacttccggggcattcaggtggggatgctggtggtttgacatggagagaaccttgactgtgttttattatttcatggcttgtatgagtgtgactgggtgtgtttactcg

SEQ ID NO: 90978 - DNA, 456 bp, Homo Sapiens
atggtgattgggaagaccaggatgcgcaaaggcaagttgagggcaagcggggtacgtgtcctgaatttatagaatcttttgacacaaagcaagagagccacagtcaagactcaagtcaaaagaaatttagaccccatctgggcaaacaggcctctaagcaacaatctaagatttccacctattgttctggcattccttgtataaatgattatgactgcagagatcttaggaagtgctgtggtacctttagatgtggcctgaggtgcatacatcctcttatgattggccctgtatttttcaattcacctccacaatccaaggcataaatattggatggagaaatggattcagatggaggcatcattgagcttattcttgactcatctcagtccaaacattactctgtcaatcgttgttcttaaaatctgcatattaaaagctcagcatcaactaaaa

SEQ ID NO: 90979 - DNA, 611 bp, Homo Sapiens
gcggccgccgcggggtcggccgcggacttggcctttgccttggctgcgtccccggaggcgctgtcccggcgcctcgctgccttcctggcctccagggcccggtccctggacggcggcgctgcagcgggcggcgcggggccggagtcctggtgagggccccctccgtggccgagggcgccctcgctgccctggcacacgagcttgtgcttcttccagtcctggcgctggcgctccttgcagcagaaggagctgcggctgcagcgcagcaggttctccatcttcccgcacagctcgcagtactgccggtctcgctcgctcgagctcggctcgccgggcccgcagctgtcattggccatggcgaccgcagctgagcaggaggggtgcggccggacggcctcgcccgaggctccagcctctgtcttccaggttctttctgcaagtcttccaccagggccactacctcctctacactctccggatgctgctgtctgacccacatctgcatctcctggagaagacagtccggaactgatctaggaccagcaactccaggatctgctctttggacacttctctggccttagccactgacaacagagcttctggagctg

SEQ ID NO: 90980 - DNA, 466 bp, Homo Sapiens
ctgtttatatactaaagaaaaagctttacaagataagactgtaattcagaataccacatctgtacagcgttgacaactctaactaaaaggattacagcccttaaaattttagcttaaggacattttaaaattgcatgagattagcaaaattattaatttaaaaccccaaagtaaattgcaaattttaaaatttatttttgactcttttatcacatgctccaatgtatgtacataagtgtctgtggcttaaataatatgttgttatttgacacatttttgtggtgcaagtaattaatgttattatttgattgttataccatatgtgcccattaaaattctttttaattaaaaatatttcaaatatgcagaaaaataataatataaatgcccttgtacccttcacatactattttgccatatttgcttctgatttttaaataaataaaatgttactcttttgtacttc

SEQ ID NO: 90981 - DNA, 433 bp, Homo Sapiens
tatatgatattctggaaaaggcaaaactgcggaaacaatagaaaggtcagtggttgccaggggttgtgggcagagggaggagttttaggacagtgaaactattctgtatgatactgtcatgttggacatatttgtccaaacccatagaatgtacaacactaagaatgaatgctaaaatcagtccctggactttgggtgataatgatgtgtcaacctaggttcattgatggtaacaaatggaccactctggtgggggatgttgacagttggggaaaggagtacttgggaattctgtactttctgctcaatttttctgtgaacctaaacctgcttcttttttaaaagtctagtaaaaacttattggaggtaaagaaatcaattaggaatctattgcaatcataaaccaaaatgttctgatagagccatattatca

SEQ ID NO: 90982 - DNA, 531 bp, Homo Sapiens
attctcatattttatgatggggggaaatattcatggaagattactgaatgtgaaactgctgttcccttatagaaaagacccaaacattatcccatcatgtcagatttgaggttttggcttattgcacataggaatctttaaattaggtttgggctgtcataaagttagctttttgagagactagagaaaaaatatgacaagtcctataaaatagtaaagtctgctcctgttgatatataacattttttctctttaaaatcatgaacatagacatttatatcagggtatttaaaattatttgcctagacagtatagctggtatttagataatgatatatcagacagatactctaaagaagggagatatagtaattcaaaatggaaatacattagcatgctcttaaaagtaaatcaaatacaatatgcttttcagaatttagaaaatgaacttaccttttctttttgtatccattctgattctctcctagctcagactgaactggaggatgtatttgtgtaccttatggttgt

SEQ ID NO: 90983 - DNA, 516 bp, Homo Sapiens
  misc_feature (447)..(471): n is a, c, g, or t
gaatcatacaaaactgtttaatactaccaaaaatataattgtatgttgggcggctctccctggctatcatgggaggactgcaggctgcctctgaactgtagtccaacaggaaaaagggttgacaccctggggtaggggatgctgctggattaaaaaaggaggatgaggcccctcccgtgaggtctgcgtccatgagggttaaaggtgggttaggggcatgggggcaccaccaaggggagggttgtatggagtgggaaaaccacggggcaggtattgggtataggtgggcaacagttccccctggaccctagggtcactctgagggagggagcacggtgagggggcttccaatttgcagtgggaagacccatatctgccaggcaggtaggctgtcaaataaccggggggtctgtacccaaaacctttgcctcgttgggtggtccgtannnnnnnnnnnnnnnnnnnnnnnnntggccaggttgccttttccttgtccccaggggaaggtcccgcccc

SEQ ID NO: 90984 - DNA, 1276 bp, Homo Sapiens
aaacaatacgggctaggtacgaggcctggtggttaattcggcacgaggggcggcagtggagaagcggcggcaagcggtaccaccgtcggccggtttcacggacagcggccgccagtcggtatcccgggcggcgggggcggccgagagcgaggaggacttcctgcggcaggtcggcgtgacggaaattgctacgtgcggccctgctgaaggtgctggaggcgcggcccgaggagccgatcgccgttcctggctcactacttcgagaacatgggcctgcgctcgcctgtaaagcggcggcgccggggagcccccgggccagctcctgctgcagctagcagcgcctgggccgcgcgctatggcaccttcgcctggcccaccactcccagagagccgccctaaacaaaaacctgagcgtggactcaagacattgactgagcaccgacggtgcgcagggcagtgttctgggcaccagggctataaccaagacgaacttccggccctggagggcagggccggcttcaacaacaacgtgagcgtggcctacgagtgcctgagcgccggcgggcgcaggaagaggcagggggctggacgggcgcacctacagcgagctgctcaggcgcatctgccgggacggccaagcccccgaggaggtggtggcgccgctgctgcgcaaggtgcagtgccgtgaccacgaggcggtgccgctgagcgtcttccgcgcgggcacactcacctgcttcgtgctgctggagttcgtggcgcgcgccggcgcgctcttccagctgctggaggactcggccgccgccgtggccgaccgccgcgtgggccaggccgtgctggacaccctggagggcgcgctgcaggccagcgacgccgccgcgcccgcgcgcttcctggaggccggctcgcgcttggggcccgacagcctggcgctggcgctggaccgcgccgtcggggggcggcggcccagcgcgcccatgacccgcgaggagtttctggagagggccgccgcgctcttcatcgcgaaggtcaagccggtgggctgaggcccgtgggccgcgcggatccgggatctgcgctggggggtccccgcgtgcggggcgcgcggagccttcccttcgccctggtgaggccctgccataaccaggcgcccagccctgcggaggaggccggggctcccaggaagcggacgcccggtccccacacagcgccgcggccgcccctccacccccgcgggagcccctgccccacgctaataaaatgtgttgcgaggctg

SEQ ID NO: 90985 - DNA, 553 bp, Homo Sapiens
ccactctctgtaccaccagcaaccctcccaaattcactgcgaagtttggagagtccgagaagtgccctcgatgtggcaagtcagtctatgctgctgagaaggttatgggaggtggcaagccttggcacaagacctgtttccgctgtgccatctgtgggaagagtctggagtccacaaatgtcactgacaaagatggggaactttattgcaaagtttgctatgccaaaaattttggccccacgggtattgggtttggaggccttacacaacaagtggaaaagaaagaatgaagaggtgcgccgtttctcagattttttgcgagcctaaaacacttgccaagtaatcctgcacagatcgatacctttccccaaatagcctctcctttgtagtcgtacattatgtgtttctcctcagaagtgatcaggtctttactgaatgttagaagaggcctttggaagaaaattatgtaaagtttaatctataacaaatgctttattatttataatgcttggaatgggagaggcaataaataaatgttttagtgctatcttgt

SEQ ID NO: 90986 - DNA, 518 bp, Homo Sapiens
ttgttcccaagtacacatcttcttatccacaaggatgaaactctgtagggctcaccctgagggctcatgtgtggcattgagagggtagcagtgaccagaacaccacaaggcccacaagatgttttgaatgagggaacatttaatgtcatttgttaggagatagaaaccaaataataaaggacaaggaccacgctcattccgtggagaagaggtgaactccctctgctgactatttggaatggactgaatgaggaggtctctccagccagaaggagtattgaggtcatcaggcctcagaaaacaatgtacacataatctcgggctgtgaacaagagaaaggagggggggaaacatgaaagtcaatcttaacaatttttgcaatacctcttatttgcagaccattggatttatgttattgcactctcggtgtgatttatcgtatgtatctgataggttttatgaattgttttgagttgtaaactcctataccctttattaaaatggacctaattaaaaaa

SEQ ID NO: 90987 - DNA, 520 bp, Homo Sapiens
taggttccaggaatgagctcacctaacagacagcaaatgtgtctggttagatctcagcagagcccattctgcaagacctggctgagccagatgagagggtgggccctgtgctggggggccttgggtcacacacaggaaccgagacctggcttccaccccccagtcacccacttgggttatctgctggaagttatcgataggactgtgtggccaaccaagtgcttgtgagatcactgacactgcaaaaacaaagcaaactgctccgggtaccaggacttcctccaacctggcaagggtgtgcgctgaggcggggcttgcaggtgagggggctgtatgcttcaggaactaactaaatgcatgcagaaggtaagaggcatgatgggaggtgttcaagcacagcaatcccatttgggagttattttgatactgcgatgagtaagggtaagggcgcatggaatggggctaaggtgggagtgaacactggggtgaataaattttaaatcaattcaagtatctcaaa

SEQ ID NO: 90988 - DNA, 374 bp, Homo Sapiens
gggttctgaaagcgactgtaaatgtgttgtctccgagtgggcacttgtttgtaagtatttattttccggagcccactcaggagcagagagaagctataggctgttagagacaacggaacaatgagtcaaaacaacgcctccccacttttacactaatgcatgggggaaatccccagaacactagtgtttgattatgaatggagcctgctttggggttggtgtccacaggctagcaaagaagatctggagaccatggtttggtcaaagcattttcactggtgcttagtgctgtttttaaaaaatattcccacagagactgaatgactgtttaattcccacccagtaagtatttcagaaatgatttctgcaacaaa

SEQ ID NO: 90989 - DNA, 477 bp, Homo Sapiens
  misc_feature (62)..(123): n is a, c, g, or t
ctttgcaggattcatttaaggacttactaaaattgcctttatgtttctagatgttttagttnnnnnnnnnnnnnnnnnnnnnnnnnnnnnnnnnnnnnnnnnnnnnnnnnnnnnnnnnnnnnnctcattatattttcttattgattacttttagtatccacacactctactgaattcttactaatgttaagtggttacagttaattttcttgagttttctagttgttatttcttatggaaattgtattcctacttgtgttcaatatcttgtagtaacagccacaagttctagaaccattgagtactaaagggcagaacatgtatgtgtgttttgtttctaaatataatggatatcatttaggttttcacaactaggcatagtgacggttgtcaggttagtaaagtattacttatcatgttttatgtgtattttatatttaagattttctcaataaaaataaaagttttaatgtaaaa

SEQ ID NO: 90990 - DNA, 456 bp, Homo Sapiens
atgcaggcatctggatgttagcctggggttttggctggattccacctcgctcagtgatgatagtctgtttccctggaacattcctgtggttttagtagtaatgagatgtgtgcaccactccagtgggaactgaagctcttagtagttacattgtaattaaaaaagaattataaaacaagaaatcagcaagcctgcttacctccagagacacaccgttccacttacagtatctagcttcctcgactcctttgttaaaatcgtggagtatgaaccgtgaccagagaagtaaatatggagccgttttattgagcagtttcctccagggatgacggctgtcagtgtgtttcctgccagttttccagtccttactctctgcccttcattctgtactcttggcagagtcagtaaccaaccactaataaaatcaaagttgtagtaaagactttataacaaaaa

SEQ ID NO: 90991 - DNA, 618 bp, Homo Sapiens
cagtcgacggtaccggacatatgcccgggaattcggccattacggccggggggaaaacagttctagaataactgctccgtgttcagggggagaacagcggtgacgtgggtgccccgttgtcttcatccaccgtgacatcagcaaggagcagagaggaagtggccccggacccgcggcggcagctagacaaatgcactgctgggactgccatgcccagcacgggccgctcccctggggctctgcgcgtagagccgactccttgcttgtacctgcctgccttccggcctgcaccgggcaagaaacgtggggaggggatccacaggccaaggcgccgcacagtgatgccctgctccatcccatgacagggcctggaaggggactggcagctgcagaaatggtttccggccttcccacatcccccacgcacttcccggtgggggcatttttaaagtcgaaggagacacattcattcaaatatgtattaagtgcctgccagtggctctgagaatagaacagtgagctagactcttggcatcgtttcctagggagtcctcggtcctagggggaggagagagccctgtgtaatggatttcagatgatgttataaggtagggtgtg

SEQ ID NO: 90992 - DNA, 734 bp, Homo Sapiens
ttctgctcactgggtcagaagcatccgatttcctgtcatcggttgcggttcagccaatgttaatactgaaaagtataagaatatcataatcccagagtgatataaagacctttccaaggaagatgagatacccggaggctgtgaaggagaagtctgaaggatttgaacgcgttcaaatgaaaacctttggttcagcaaaacaccagaaacaaattcaaaagataaaatacactccggagaagcccattctctcaacgcatctgacagttcacaaagagcaactgcagtccaacttaaaaaataaagaaaatggtaggaaaatgggcaacatgcactgaggcaatatataagaagaaggaatgcgcaattaatcaacaaaagcctgctctttcctaacgagtgaagatacaagcttagtaaatattaaaatttattgaagataaaaatggacacttccggccatatataaaagcattgttggtaagagagtggggtaattgacatgctcctgggaaataatacgcattcagacaacctctaatgagtgaatccactgggggtatccactaggaatagaaaacgaccaccaatgcccaagtttgtggtccagaatttgagcagcgatctaacaaagtagagtctccccctgtgtcatgggccccacttcttaagcaaagaagaatgcctcattttggtaactcacccaaataaacagaaattttttttgataaaaa

SEQ ID NO: 90993 - DNA, 630 bp, Homo Sapiens
  misc_feature (210)..(218): n is a, c, g, or t
agaaggaagccaggagatatggtaccgaacaatgacaggggaagggtattggacacggcagcgtcctccttattgaaaacacattatgtcagttgggaattttaaataagcttttagcaaacctaacactaaaagcaaaatagaagaaagctataccattaccataatacatttttcatctcatggctacaatggaattcttgaaaaggnnnnnnnnntcctatctacatataaaaacctgcatgaatgaatcactacatatgcttataatgaggaagagttatgggtcctgagtgtaattttttatcctttcttaaaaagtttctgtattatgcattttgataacactactgatgatccttccacttacatttgaaatgttatgtaccacatttgcacaattaaaacttttcttagcattcaacctagaattgattaaatttatgactgaggcttcatgtgagctttccattgtggtttgtgggtgttgtatttgccttgtaacttactgaattacaataagaattgtgggttttcatagccactttctcaagaagcgccttttgaagaacaaggctatgaagtatttgaagaaaggaaataaaatttgatactgatctgtcagaaaag

SEQ ID NO: 90994 - DNA, 466 bp, Homo Sapiens
ttcattgtaaaatacggatcatttgtattttggggtgataaaatagttcaccatgggtatgagatatttattctttaaatcaaagtaaattagaatttttaaaaagcacaaaactgcaggacagtttatgaaataggtggcactattagggaatcttcctttaaagcaagaaatcatgttatttagaaagaaaaactaatcttaaacatactatttctaataaatatttatatttttatgaaataaagaggtatgtggaaattaatattggggaaggtggaccgggggaaaggtatccaggggttttacccgccctaactgaaattctcttggaaactgagctaaacctctaatagctgttccccttctattctgaacaactgtctccatttttcaagtgtgagagataagggctaatgatgacatctcatttattttgagtaaacattaaaattgttttacaagt

SEQ ID NO: 90995 - DNA, 492 bp, Homo Sapiens
aatactattttattttattttttaaccaaattaatgcaaaagtgcttcaaagtactcagagggctaaagatgaaagggtgagaaatgccagcacactcgagtctcgtggaaaaggtgtgcctgattccgttataaatgcttaattaaactgtctgttaatgcatgcagcttgaagcatcgggaggatgctcacaactaaatcccgtttacacaaagttccaaacacttaccactgcattttaaccttcatattttaccagtaacaacagctgattatgcacctctattaaacactgtacagttatacaaaacagtccagcccagagtgattctctgcagttaaaataagaacatgtgccaagaacaacaagtcagagggggcctgaaggtgccttccacagtttccctcaaagcaaactgcagtcctttctatcaaaagcaaatgctactgcttctctaactcagagacatacagaaggtggtcttccggag

SEQ ID NO: 90996 - DNA, 405 bp, Homo Sapiens
ctcaggcttccggtctgtttggtgccctggtcgcgtgtcttccgaactctgctgcttcgccccggcaagagcacttccttccgcggctgctaaaactggtgcgcgggttcccaacttcgcagaagcagcttcatcggccccccgctagagacctcagaccgcagccatcgacgcctcgcctcggggatctgtccccaccctcggggccagctcaccatgagtcaggccctgtgctaggtgctgggatgaagcagtgactgacacaggcctggacctgtccttgtgaagagtgcgtctgtgacacagatactgtgccatgtggcaaagtaagcgcgtgggacagcagagccttgtttgccattaaagtaaaaaacccaaacacaaacaacgaaattaacatgtcgc

SEQ ID NO: 90997 - DNA, 478 bp, Homo Sapiens
cagaaagtgcaacactttctcatggtcacgggtgagcacgaaacatctctccaaatatgggttgggaagattaagagactagtccagaagaaaacagtctccagggagaaatatatctgggaataggaatcgagaaagcaaccaagagagcagaactgagtggatgagaggaactgtcagaccacatctgcagctctgattagtcaaatccgaaatgtgcctgttgatctactattccgtggaaatactggaatcaccagctcaataataagaggaaagtaaataataccatacttgcgtggataattcccctctgctcataccttcattcaggtcaacatagatctatcatactcctacagtgtataagggacgtgctaagcttgaagtacattcattctaaaaatcaaaatacaaaggcatgggaagactaagaaaatttcataaaccttcattaaattatcagaaataaaaaaaa

SEQ ID NO: 90998 - DNA, 403 bp, Homo Sapiens
  misc_feature (50)..(106): n is a, c, g, or t
tcctgaaggcttcttccacagtgagctcatcacagcaccctgtggaatgnnnnnnnnnnnnnnnnnnnnnnnnnnnnnnnnnnnnnnnnnnnnnnnnnnnnnnnnnttccttcatgatggttctttctaggagtggggtgcaggagtctgggcttttgtcaagctcctcaggagatttgtttttttggacagcaggtttgaaaacgctagtcaattgcatgtctttattgtctgtgcttttctgtcagtgaaggttggttgtctttttgaatcatgctagatctttttccatttttgttacctaagatcacacctcctctaagatgaacataagtcattatatagttgtctgttttgtatataaaatatgtgcttaataaaacaaacaatggaaacaaataaa

SEQ ID NO: 90999 - DNA, 424 bp, Homo Sapiens
  misc_feature (16)..(16): n is a, c, g, or t
  misc_feature (25)..(25): n is a, c, g, or t
tggccggcctgcaggnacaagaagnaggtgagttagtgaggggcaggggccaatcctggaggctcacagatcagaaggtgcttaggctcctccccctgcttccctggaaaacagaactgtaccccctccccatctctgggaaagtggattctaccatttcccttggcagccttgaatctcccctcaattcttcctgctgcagctgaaacagtaggactgccagtgctcaggtaacaccacaggctgcaaacagggaaccaataaccaagacaggaactgctccaacaaagaccttccctcaggccttgggatttttcagacatgttatctcaatgagtcctaacaatgatcctattaataataaagtagtattaaaagaaccaataaaatcaccaataaaaatcatctctttgacatatgaaaa

SEQ ID NO: 91000 - DNA, 1225 bp, Homo Sapiens
gggggagagagtatgaagtcgacggcgcgccgaattcggcacgagggcagaagttgggggaaaacttttaaaagataccctcattgtgtcaaagagtgtgccaatctatttttgtatcagcattggaagtgcactttcccctggggcgtgtgggtgtgtgaatgtgcaagtgtctgagagatactgcatcagccctagacccccagagccagtcccgccctttacagagcagcccttagcctggggccatgggtcaggctgaccttcaacaattatttctagatgatttctggataagaattgctctctcggtaccagacagtttgacatcctccacccttagaaaatgactgacattgttttgttactgctcctacccaccaaggggataaagaaggcgagttctgagtgttggatgagtcagtcgcgtggaaggacgtggagcgtggcgctctgtaacttcctgccgtctgccaccccgccacgtgtatttaaccctcgcactttctccactgtggagatggctggggcggcgccccacagtgtgtattcctgtcctctatgttagagtgcatcagaagcacatttactgtgctatctatatctctatataaaagtgttttataaaaacccagaataggagcacgacgcatgattggtgtttgaggcgtttgccagctgggacaaactgcgtttggagctgtggttaagctgactaaggaggcggtggctctttcttaacattcccacgtgcccagggctgttcatgcaagattttaatggtgacttgtcctggcttactgggacagtctgtatgaggcatgtcaccacactgtcgcctcatagctgcaagagagaggcaccagctgaagttcccctgactgaagagagcctgtggccatgtaaaaagagaattaaactctgtggcttttgtatacctgtatgcgttgtgtagacgtgttgtcttccccagttcactttggcctgcatggttgtcccctgggccacatgatctagtggggccagatcggagttcaacacagccaaaaagggatggacgacgaggtctgcagttcgtcaactgcaaattgaactgggaggacaaacgcgcgttgcacaacatctgggtcaaatagcggcgggcacattgcattgcccaggacagtggggagcaatatatcaaacgcgacgaaaacgcacccttttctctttactcgtttctcgg

SEQ ID NO: 91001 - DNA, 489 bp, Homo Sapiens
ccctaggaaaggcgcagcggggcggactcccgggcctcctcccgcctcttccacaggttgcatccgcggctgcaggaaaacggatggctgggaatggccgtcgggggttggtcagaggaagtccctcggacctttccgaggcacatctcttggccatccacgcgtccttcgcagactccgctccctgcacctccgtttcctcttctgtggccggcggctcccccgtggccaccccatctcccatctctgccacctcccaacagccatttccactcctgcggccccatcccagctaaggagagcgcccttctgattggcaggtgggcctgtctgtcacgggcatgttccatcccacccaagcccaaggacactccagggtttccttagtttcacaacgaaggtgcgtgctcagcggactctgcagacccagtgccgcgacttcccctaaagccaggcgtgtatctgcgcgtgtgaggtgctctgccgcaa

SEQ ID NO: 91002 - DNA, 471 bp, Homo Sapiens
ctggtttgacttttaaaaaattgtagtaccaaaaactaatgattttgtgtgtgttatccacaccatcaaggctgtatcaccgagtatctgctcattctgaaagtgtccatcctttctgaattgaaatgaaagagcaggagaaaccgtctgtgtccagcctgttagaggtgttacatttgccctaggtgggctgggcagaaggctgttctgctcgggagcaacagtgtccacacgtcagtttccagagcccgggtcgccaggatccggctcagagtgtgagtttgctcaggtgtgtgctgagcacccctgggtgccagactccgggcaggtccccgccgcagccgtgtcagcagagcaatgtgatcgttgctgggactgttcccctagtctcagtcagttcactagggccatgcatgcagtgttcagacaggagattctcatgaaaaatagaattgttatcctaaaattaaa

SEQ ID NO: 91003 - DNA, 507 bp, Homo Sapiens
tccaggaagagcgaccaggccttgagaggacatggccttaggaccagatccagggaagacacagtcactaacccctggctcatctggcaggtgtgggaagcagccaggcccgtggcttcaccagctccccccgatctctgccttcagctgtcctgcagcctgggtcaggcacctaggcagctttatggcaggcggagatgcaccacccacatcctctttccaggcagggcttgctgccctggctgtagcgagtgcggcagcaggtggcctccagctatcagcaacttcagagagctgccttgcctgaggtcccgtcccttctggggaagctcccatctgccagggggctacaaaagcacagtggacaccatgatgggcaattctggctgatgggagcaccacctggtggctgaggcattcttgggccacatagcagttgactgccctctccaccatcttttcacaagtgttaatcccaataaacacccatcctcttccatcaaaaaa

SEQ ID NO: 91004 - DNA, 976 bp, Homo Sapiens
tcacaagcgcataagtatgaatttctgcccaccagcacaactccagatataagaataacagttccaccaaagaagattggcattctattagactatgaacattcaaagttgtcatttttcaatgtggacctttctcagcatctatatacatttagttgtcagcttcacgaatttgtgcatccctgtttttctttggaaaagcctgggtgtctaaaggtacataatggcatttcaatgccaaaacatgtcactttctattagaacattctgatgtccagtttcctgtcttccatgcctacccctctcgcagctgctcacgccttagctggctgaacctggcacttaagcaccatgtgcccagcacaatttatggctcatgctattatctgactggtgtgctagcgctcatttcacccaacctggattctagtcctgtgtgctgctacctgtgtgctgctaggatagtcattaccaggcccagctgtaaaataaaggctcagactaaacgaactcaaaagtctttgaagctgtcaaactatattcgtgtatatgcaaaatatcttgagtttccaagacctagagagcttgggagaggacgagggtagtcttaatggctccagcagcaccagtacacccatgcatttcatgagtcagccaagaatacacttgagaaggcgagaggctgtctgtagagaaccagggaagctgtgtgcgcttctcaatgtcttctaccctcgttttcccaatagtgagcagcactgtggtgaggtcccttccactgtgtactctgcatacagggtattccctgttccactcctacacagtatgcaccactctctaattttgaaattacctctataatgcctaattccatgaagggagggacagtgcctgttttgttcattgctagatcaccaagggctaacacataacagctgtcaccaagtatttgttgaataaattagtatcttcttca

SEQ ID NO: 91005 - DNA, 1319 bp, Homo Sapiens
  misc_feature (1175)..(1262): n is a, c, g, or t
cccctcctcttcttctcccttcctttctatccccttctgtccgtccggctcggtattctcggcatgctcactggatcagagactgtgcgaaacatcccatgcatctagaaacttagatccaagaaacttacatcccctcccttccccctcctcgttccctttttcccacggttagactttctccaggcctggctgcgttctctgcctgtggtccttgccccaccccagcctcttcctaatcctgtgccacacactcagtggccctgggagaggcagaaggggggctcccccttccttccatgtatccagcgctcccccttgatttttaattaccagggttatgggagttcttgacttcattggtcattcgctttcaggccgtttcctgatgtaccttctgacctgaccttttccctgccttcaggacttctgggcccagccctctttgccaggcatgcatatgtgatacatgtctatcatgtatgtcgccctcttggcgcgtgagactcctgcatagatatgactgctccctgaccacttcacttttcaatgtcgcgtgctgccacgcctgaggcccgctcactaccttactcaagtacctatgcaacgagcacgcactacgcaggtgcatggcccacctctctccctttcaaacctcttgcgtcttcttcccgcccttctttccttgtccccaccagttgccgggctccggccgttccgggcgtttttgtcgaaataacatggggtgttcccaaaatctcctggccaacgcgacaaaaactttctacggggtgaacttgctgcctacccctcgttcctccaccactgcgagcccctcgcccgacccgccctgagacaaccccagaaaatcacttcccgcactttcagaactcctcgggcacgggtatatattctttttcccccatagcgggcggccacccgatacccactcattgcattttcccctacacgagatccctttatcccacctctaattcacaataccggctacacacttccccccctctacaacatgtttctcattccccgccataaccccccacctatttttatatcaccccccctgcccgaataatattatccttaaaccccattcccgccgtcgcctcctctacgccgagggttccccaattctcgcttgcctcttaccactnnnnnnnnnnnnnnnnnnnnnnnnnnnnnnnnnnnnnnnnnnnnnnnnnnnnnnnnnnnnnnnnnnnnnnnnnnnnnnnnnnnnnnnnttgccataatcaatacttataatcgcaaaacctccctttgaattcgataattacacc

SEQ ID NO: 91006 - DNA, 466 bp, Homo Sapiens
agttttgtatgcatctgtgaagcctagttggtctataatatggtttggatatccatgttctccaaacctcatgctgcagtataaatccttaatgttggatgtaggacctggtgggacatgtttgggtcacaggggcaaatttctcatgaatggctggtacattttcttggtaaccaaaaagtttatgctctattgattcaaatgagagtaggttccttaaaagaacctggctccttcacctcacacttgctctgtctcttaccatataatacatccagttactctttatttttcaccatgattgtaagtttcctgagatcttcaccagaagcagttgttgacacacacttcttatacagtctgccaaactgtgagccaaatatacccctttttgttataaataacgtactctcaattattcctctatttgcaaaataaataacatagtctataatgttaaaaaaaa

SEQ ID NO: 91007 - DNA, 1695 bp, Homo Sapiens
  misc_feature (1461)..(1468): n is a, c, g, or t
  misc_feature (1471)..(1474): n is a, c, g, or t
  misc_feature (1478)..(1532): n is a, c, g, or t
ccaggaatgaagagcaagcgccatgttgaagccatcattaccattcacatccctcttattcctgcagctgcccctgctgggagtggggctgaacacgacaattctgacgcccaatgggaatgaagacaccacagctgatttcttcctgaccactatgcccactgactccctcagtgtttccactctgcccctcccagaggttcagtgttttgtgttcaatgtcgagtacatgaattgcacttggaacagcagctctgagccccagcctaccaacctcactctgcattattggtacaagaactcggataatgataaagtccagaagtgcagccactatctattctctgaagaaatcacttctggctgtcagttgcaaaaaaaggagatccacctctaccaaacatttgttgttcagctccaggacccacgggaacccaggagacaggccacacagatgctaaaactgcagaatctggtgatcccctgggctccagagaacctaacacttcacaaactgagtgaatcccagctagaactgaactggaacaacagattcttgaaccactgtttggagcacttggtgcagtaccggactgactgggaccacagctggactgaacaatcagtggattatagacataagttctccttgcctagtgtggatgggcagaaacgctacacgtttcgtgttcggagccgctttaacccactctgtggaaagtgctcagcattggagtgaatggagccacccaatccactgggggagcaatacttcaaaagagaatcctttcctgtttgcattggaagccgtggttatctctgttggctccatgggattgattatcagccttctctgtgtgtatttctggctggaacggacgatgccccgaattcccaccctgaagaacctagaggatcttgttactgaataccacgggaacttttcggcctggagtggtgtgtctaagggactggctgagagtctgcagccagactacagtgaacgactctgcctcgtcagtgagattcccccaaaaggaggggcccttggggaggggcctggggcctccccatgcaaccagcatagcccctactgggcccccccatgttacaccctaaagcctgaaacctgaaccccaatcctctgacagaagaaccccagggtcctgtagccctaagtggtactaactttccttcattcaacccacctgcgtctcatactcacctcaccccactgtggctgatttggaattttgtgcccccatgtaagcaccccttcatttggcattccccacttgagaattacccttttgccccgaacatgtttttcttctccctcagtctggcccttccttttcgcaggattcttcctccctccctctttccctcccttcctctttccatctaccctccgattgttcctgaaccgatgagaaataaagtttctgttgataatcatcnnnnnnnnaannnnaatnnnnnnnnnnnnnnnnnnnnnnnnnnnnnnnnnnnnnnnnnnnnnnnnnnnnnnnccttgtggggccgccctcggccctccaaaaaatttttcaaaaccatttctttttggggcggggggccccaataaggaaaaggggaaaatggccctaaaactgggtttcccaaggagaaaacccggggcccaggaaaaaaggggcttggggatttcccccccac

SEQ ID NO: 91008 - DNA, 979 bp, Homo Sapiens
  misc_feature (306)..(462): n is a, c, g, or t
  misc_feature (737)..(737): n is a, c, g, or t
aattcccgggatagggaatgaagagcaagcgccatgttgaagccatcattaccattcacatccctcttattcctgcagctgcccctgctgggagtggggctgaacacgacaattctgacgcccaatgggaatgaagacaccacagctggtgggaaatctgggactggagggggctggtgagaagggtggctgtgggaaggggccgtacagagatctggtgcctgccactggccattacaatcatgtgggcagaattgaaaagtggagtgggaagggcaagggggagggttccctgcctcacgctannnnnnnnnnnnnnnnnnnnnnnnnnnnnnnnnnnnnnnnnnnnnnnnnnnnnnnnnnnnnnnnnnnnnnnnnnnnnnnnnnnnnnnnnnnnnnnnnnnnnnnnnnnnnnnnnnnnnnnnnnnnnnnnnnnnnnnnnnnnnnnnnnnnnnnnnnnnnctcctccttctgaccatcatttctctttccctccctgccttcattttctccccaatctagatttcttcctgaccactatgcccactgactccctcagtgtttccactctgcccctcccagaggttcagtgttttgtgttcaatgtcgagtacatgaattgcacttggaacagcagctctgagccccagcctaccaacctcactctgcattattggtacaagaactcggataatgataaagtccagaagtgcagccactatctattctctgaaganatcacttctggctgtcagttgcaaaaaaaggagatccacctctaccaaacatttgttgttcagcttcaggacccacggggaacccaggagacaggccacacagatgctaaaactgcagaattctggtgatcccctggggctccaaagaacctaacacttcacaaactgagtgaatccccagctagaactggaactgggaacacagattccttgaaccactgtttgggagccacttggtgcag

SEQ ID NO: 91009 - DNA, 613 bp, Homo Sapiens
caggtgcagccggtgagcgccgtctcctagaaacactccccaaaaccccgcggcctcccgggggactcggggcaggcagacagagcgtgtgtggaccgagagcggcttgctggttcgtcccggacagcggcggatcccacagcgccccctgctggaggaggccggtactgctcaccacccaacccgaggcggtctttgtcatcccgccgagcggacgcgcggggcggtcggggaggaagactgcgtgagaatggatcccgagtaaagggttcttgtggggtgagggcaagagtggaggatgttctgaagtccatcgccataccactggacagcaccaaatttagtttgagctgcagttctactcataagaatgtattctaaggaaataatcagatttggagttattattctaaggaaataaccaaataaggaaaccagccttatttgaaacaatcaactctccaatcctacggattccttatgtaaagtatgatgattagctagtcctcaatctggtctggtgtcagagtcccgcctcctacctcaatttcatacgatgttagcaccagcatccattaaaactcatcctgtagagggatatcacataacgaaa

SEQ ID NO: 91010 - DNA, 467 bp, Homo Sapiens
tttctcaccagtcctgcaaacagtctcaaaagtactaatcaaactcatgtccacttctttttgatcatcaacggtacctagtcccaaaatgccaaatttctggatcttggcccagtaattattcactactctgtttgcagttcagttttatttcatattttatctagttttattgtcatcagtggaaggacagttctgaattacctgtcactattgctaagtccattcctatagaaattttcaagcttaccttttatttcctcaaaaaatagcaggcatagttttataatctgtgactagtaataacatagccttgcagttctagtttctgcttacttatcatgacttacttactttcaggcttatcttttccctatggctacttgtccttgtaaaattgtttaacagaaactatctgaggcctagaatgaaggtgtcttcttccaatgaggatttacctcgtaccc

SEQ ID NO: 91011 - DNA, 485 bp, Homo Sapiens
acccagaagtccttcatttttccttgtatttcttcaggctatccgacatgttcagaccatgtatgaagaggcttacaatgattaccttaaagacaggggaaaaggcaatgggacactcatcaccttccactcaacatttcagtgctgtggaaaagaaagctccgaacaggtccaacctacatgcccaaaggagcttctaggacacaagaattgcatcgatgaaattgagaccataatcagtgttaagctccagctcattggaattgtcggtattggaattgcaggtctgacgatctttggcatgatattcagcatggtcctctgctgtgcgatacgaaactcacgagatgtgatatgaagctacttctacatgaaaattgcaatctaaagctttcataccaaatgtcacaggagctgtctcccagctcatttttaacactgaaatgacattaggatctaaaataatttgctgtcaattgtaaaaa

SEQ ID NO: 91012 - DNA, 672 bp, Homo Sapiens
tattatgagacattagagaagaatgaagtagtccctgaggaaaactggcatacaagagcccggaacttctgccgatttgtcactgcaatcaacaatactccccggaacatcggcaaggatgagatcacctcctacaccactggattgccctgctggctgactgccccatcactgcacacatgtatgaggatgtggcactgatcaaagaccatacactggtcaattccttgattcgtgtgctgcagacattgcaggagttcaacatcacgctggagacgtcccttgtcaagggcatcgacatctgacctcccagcaccagccagcagcaggactgagaaagactcaccctgcagctctgaccttttttcccaaagggacttaagcgattgtgcaggagtaggagacaaaatgtacactcactgtaaaaagaaaactagaggatttttggaataaataatctattttagagtttatttgctgatttgctttttacacactttcatgtgaaagagtgatagggagagggagcgaggctggtgccgcttattttgaagctggtgccctccctcgccgtggccacatgctggaagcctgaggcctccctggactgagcctgtggcactgcgtgcgggacagttatgtttccttgccccgtcgcattaatgcggccgc

SEQ ID NO: 91013 - DNA, 1133 bp, Homo Sapiens
aactattgcctagtcaggccggtgttaattcggcacgaggatctgcaacaaggaatacatatggctgcacgttgatgcagcctacgcaggcagtgcattcatctgccctgagttccggcaccttctgaatggagtggagtttgcagattcattcaactttaatccccacaaatggctattggtgaattttgactgttctgccatgtgggtgaaaaagagaacagacttaacgggagcctttagactggaccccacttacctgaagcacagccatcaggattcagggcttatcactgactaccggcattggcagataccactgggcagaagatttcgctctttgaaaatgtggtttgtatttaggatgtatggagtcaaaggactgcaggcttatatccgcaagcatgtccagctgtcccatgagtttgagtcactggtgcgccaggatccccgctttgaaatctgtgtggaagtcattctggggcttgtctgctttcggctaaagggttccaacaaagtgaatgaagctcttctgcaaagaataaacagtgccaaaaaaatccacttggttccatgtcacctcagggacaagtttgtcctgcgctttgccatctgttctcgcacggtggaatctgcccatgtgcagcgggcctgggaacacatcaaagagctggcggccgacgtgctgcgagcagagagggagtaggagtgaagccagctgcaggaatcaaaaattgaagagagatatatctgaaaactggaataagaagcaaataaatatcatcctgccttcatggaactcagctgtctgtggcttcccatgtctttctccaaagttatccagagggttgtgattttgtctgcttagtatctcatcaacaaagaaatattatttgctaattaaaaagttaatcttcatggccatagcttttattcattagctgtgatttttgttgattaaaacattatagattttcatgttcttgcagtcatcagaagtggtaggaaagcctcactgatatattttccagggcaatcaatgttcacgcaacttgaaattatatctgtggtcttcaaattgtcttttgtcatgtggctaaatgcctaataaacaattcaagtgaaatactaaa

SEQ ID NO: 91014 - DNA, 444 bp, Homo Sapiens
cctcttcccatctactcccctacgccccttcaaccttttttctctgtctgcttcacctgagaagaaagtgtatgaagagagtgtcctcctctcgcatgagccagatcagccagaaaatgcaacacttggaagagttaaatgctgttcagtgaagatttcagccccaggcctttgctgcaagtgaccctgtggctttctcagacatgatactctcatcatatttgcaactcttctctctctttcttccccacacccaagaggaggattggtggtagggggcaggcagagggggtggggagaagtttcctgggctccatcaatggctgcatcttttctggactcagcagtctccttgattccatgtagagtgtggaaaggagttgctgattgcatttcctctcattaacaattgggtgtgtaataaaaagcattgtacttcatctt

SEQ ID NO: 91015 - DNA, 453 bp, Homo Sapiens
tgataatatctacagcatttataaggttacaaaataaaaggaccaggatatcaattctttttttcctaagctctatgactaatagctttcatatttgaggcctacaagagcaaatggcaatgttctgtgttatgagacactttcttagaaggccaaaaataaaactggataccaaaagatacacattactattatgttgagatcatccttactgatatatgtataattagaaatagatttgccttccttcaatctttagccaggagactgagagatctttactatgattttgagagtaaaaacaaaaacaaaccagactctaacagctatgggaactgtaagccaaaaataatacaaaatgagtcaatacaacacatctcctcttaaaatcctcttctttgtagttaacccagttgtccccaaatgttattccaattttgtaaccatgtagtg

SEQ ID NO: 91016 - DNA, 434 bp, Homo Sapiens
  misc_feature (131)..(131): n is a, c, g, or t
gtccttccaataactctcgtcctctcttcacagctgaactcacagaggacaatttaggcaggaaccgcacactgctatgacatatccaccccaccgtgctttctcgaggagtgatgtcccataccccctgntgagcagccctgtacagtggccactttccctggtagtaggtgacacatctacaaggtggccccagcagccttcagccctagagtctgactgccctggtccaagccatccctgccttgctggcctcctggggcccatgcaccctgttgacattcccctctccactgccctccactcaaagcaccaaagaagacttactcaatgtgtccttatggtgcagagtcccagcaagcagaggtctttgtatctgttgaataaaaaaattcctcatgatgcgtagtaacatcagtgaggaagactgcaaa

SEQ ID NO: 91017 - DNA, 451 bp, Homo Sapiens
  misc_feature (100)..(100): n is a, c, g, or t
  misc_feature (112)..(112): n is a, c, g, or t
tgcatcctggttccagaccatggaggtgtcctacagctgaggatagggcaacatcacttaatagaccccacccttaagtctcagagacacagtgcctacntaagattaaagntgaatcacaacagaaaatgccatcccttctaccaccaccaaaatatcaaatgctgagtcaataagaacagcaatctactgctaaaagaaggataaaaacatggagaaagacccctctctgaggtacaggaatgaagggaaggcctaaaggtaagagtggtgcaaacattgagaaaatctcctttagcaaaccatcccacacactaaacttaaggtaatactagaagaatttgaagcctgtggataaccatagcaacaaaaacacctaaacacagtttaactcctgattagatcaactcaagccttcacaataaagatctaccgaaagaaaaagtaaaaa

SEQ ID NO: 91018 - DNA, 565 bp, Homo Sapiens
  misc_feature (308)..(308): n is a, c, g, or t
  misc_feature (325)..(325): n is a, c, g, or t
  misc_feature (447)..(447): n is a, c, g, or t
cgaggcacgctgtgaaggcactgatggaggcattttccggggaacagtgacaaggacggccagcacctctcttgcattcctcagtctgactcaagctgctcttcaccctcctccccagctggagctgaggctgaaggcagttgagggccaccagggagaagagctgggtcagggccatgacttgccagcaagcatgaggccaagcagatgtgacgggcaggacgtacgaatgatgttatttctggcaaggaggacacggctgctgtggttgattggctgtggaattcccaggggagcaaggcactagngaagtggggaacgctgnccaggcccagcagctcatcaggagcttgcacttggcccagttagggctggccgtgggacgggcttgttgaagctgctgccgccataagctgcccctctgcaccaggagacagatcccattanccccacctacagctgcttcctggtacaagagaagagttaccatttgaaatgactccacaggagagtctgacaaacatgtttgcttttcactgacaattaaaattgttttgctgctaaa

SEQ ID NO: 91019 - DNA, 485 bp, Homo Sapiens
gatttcactgataaagtcctggaccttgagcctgagcccaatgtcttaataaatgagaatttcagaaggtcttgggagggggtgagtatattttgcatgtgggaaggatgtaaataatatgtggcctgagagcagattatggtggtttgaaaatgtgtccaccaattctttaatactactctcaacaagaggtggaatctgtgtctcttcctttggaacatgagtggacctttgtgattaaatgcagcagaaggatgctgtgtgaactctgagacagggtaataaggggtgatacagctgccacctagttctttctcagaacatgtgcctttggagccctgagctgccatggaagaaaaccacctaccctgaagccacaacactggaaagaccatgtggaagaaccacagagagagagaagaggaccaaatgtgtgagccttcccagcccaggctccaaatatgcaagtagtaagccttcatttc

SEQ ID NO: 91020 - DNA, 710 bp, Homo Sapiens
tcctgtgacaaagatcttcttatcacttcaaccttggaataacagatgtctccatttttatgtaagataaaaataattatgaataattctaaataaaaaagcatttagttctgaattacttatttccaactaaacatcaggcaaacaaaataatgtgtaatactatgatggatctgaacatggccttccagaagctggaaaataggtattcaacatagaacaggtcagtttaaatagcatccctttgaaaagtgtcatacaagaaagagtgagagctactgaaaaattctggcttgttttctggcctccttgactttccttcaaagggacaccaggaagaatcctcccagatttccattggtttgaacattgtgctcttgtgcttgggtaaggctggaactatgtgctctccttgggtggctgggtgaccggtgctggctgcaatggctgggtgcccgtggccgttttgatagagttcagggttttgctaaaccaagagtttttcgcagcttggatttcattcataagggctcctctctgatgttcaagttcctgaattttacacttggcctccaccaactgcaagttggtttgtgccagttccagttccatctctctcagctgcttcttaatgagtccttctcatcatctggttcattccctggttctcttctcctggggctgctatttcaaagcccctctttgctgaa

SEQ ID NO: 91021 - DNA, 549 bp, Homo Sapiens
agatatagcaaccattggggaatgaccttttcatttcagaagtggatgaggaaggtggtgtgagcatcaggtatattctggaccatttcaagtgctggtgagaagaaaggaactctttgcctgaactgggcttggttttccaagtgctgctttggaaatgaagacccagagatgcagagcttatggtagttcataaatcttcatgttctattatctttcatctgccaataaagttcattttcaataatgtccaccattgctgtgcccagaataaccacaggcaaacaccaaaacaatacgcataagttagacaagattaaatcttgtctgatatctgcacaaacagatatgcaccatgttggaaacatgtgttttcctagtcccatccaggcttcccacaagaaagccatgatgtgggtctaaaccatatgttttgagtaaaggagaatagaagaaggggagtgtccgcaaaatggaaagagatgaagatgttccaaggaaatatgctgaaacagaacagtgaatgttttgcccaaaactacaaaaata

SEQ ID NO: 91022 - DNA, 905 bp, Homo Sapiens
  misc_feature (398)..(410): n is a, c, g, or t
  misc_feature (474)..(495): n is a, c, g, or t
  misc_feature (635)..(635): n is a, c, g, or t
  misc_feature (753)..(764): n is a, c, g, or t
cttaaagttcaaatagaaatcatttctgaagacaaaagcagaggaatattgtcagtgccaagtaatggaagaataagggcggcatttacactgtgcaagtattgagaagagtgcataaagacagggaactactctcatggagacagtttctctcttataatcaagtaactagaaggggaaaaatcatctaagttatgaaatccaacataggcgctatattacaaactgtgccggattatgcaaattgtagttgttactgatcaaagtttaattgcttcatttttgtttaaaaagggatactgatgtcagaaaatctgtaatatgttttattcaaaagatgtaaataatgtatacagacttgtatgtgatgggatgggaaatatttaaattctaggtgnnnnnnnnnnnnnaaagaagaaactcaatgtttataagaaaaaaatgaataaatagttacgtttggcgaaaaacgcnnnnnnnnnnnnnnnnnnnnnnctggtgggccgcctcggccctcaaaaagttttcaaaacctttcgttggggccgggggcccataaggaaagggaactgggccttactggttcccaagaaaacccgggccaggactaagggttgggatcccccccaaaaaanaagccccgggcgggaaaccaagcggtcttaaacaaatcccaaagggaggttccggagggccttaacggggattctaccacacggaagtcccaggcgagcctccaaattcaaatttaannnnnnnnnnnntggcccacttcattggaaagaacggggtgggaatatcccttttaaacccttttctcgccgcgaacggggaaacgccctctcccacaaccgggcgctgggaaggaacacccttaaaatcccgcccgcgggggaattccagca

SEQ ID NO: 91023 - DNA, 520 bp, Homo Sapiens
aaacaggacctgggaaacaaaccctgtgcggtttgaaaggttattaagtctgtcaaatgcttctggaatcgacgcttaaccagaggccagtcaggaccatttgcttacgtgtcatctctgactgctgccacactgctacagcaggcttcaccagacatgacagagaccaccgggcctacaagcgtttaccacctgcccctttacaggaagaactggccaaaccctgcgtcacgccgtgactggaaagtcctaatactcaccgctcatcttctgactcccctgctcaaaagcttcccgtgaatctctgcaggaaacctggctggctccctatccacggaatttcttctttctcgctggagaaatgcaaggttatcaggatctttatcgttccctcaacccaccccagctcctgaaggaggaatgatcattctaagctcatcacagcaatcacatggttttccacagtgactggcttagcagtcggcatgtgctgtaacccagcccatacgatgttaccaga

SEQ ID NO: 91024 - DNA, 492 bp, Homo Sapiens
  misc_feature (53)..(53): n is a, c, g, or t
  misc_feature (403)..(411): n is a, c, g, or t
tcagacatgtgtccccttttgctctcccaccagcaaaccatcaacgacccctngaagtgggtggcgcaggagccatcccttctcatgtcagcctgtcggagggtgcaagttgtacctccttgtttgtgtgtgcatttcctggctcgggtgagatggagccgggcgttaggttaggttggccctcgtgtcctgcagcctgtttgtgtccttcgcccgttgtgacatcgaggcattctgcttttaatttttgatgtgtatgagctcaaaataccacaaatactaaccatttgtcttttatatgtattgcaaagatttttctacttgttctttgtctctcagctgtgtttttctttcttgtgcaaacgtgtctttctctgattgtcacagcaatgtctgtgtgtgnnnnnnnnnaagcgtagaaaacctggaaaatacagaaaagcacaaagctaaagaaataaaattgccgggtgcttcgcctggagacgcaaa

SEQ ID NO: 91025 - DNA, 458 bp, Homo Sapiens
  misc_feature (23)..(23): n is a, c, g, or t
tgagactgcagccggcacattcncagggccctcggagcagtcctggggttccatgtcttttgaaggcagcagagcaaggaaaagactcttaagattccagtgcgttttgtaaaaaccaatcataatgctaataatgactgaaccatcgaaaagcaaagttatagacagcgcctgcagacgctttcgggtccggagccggggagggaacttgtgtattttacaactgcgatgcctatcgggaatgtggcaatcgccgaggtggggcctgacagtaatcttgacaaatgtgtgaagtgtcagctcctcctgcgctccttagcgccgggttttgtgcagttttgtaccgtatataccgagaaacttgggagcaggggaaaaatgatttcgacacacccagctacagtacctggttcgttagcggactgttggaaagagagaagaagcgggaatgggagcgg

SEQ ID NO: 91026 - DNA, 459 bp, Homo Sapiens
tcctggctgaccagaaatactgttgaatcttcctgttaatggaattaggaagagaggatggagagagaaggaaggagggagagaccatgaatggcggcccccagaagagataccaaaaagaagaatgtacttcatctggttgggctggattccctctgataagccttcccagttgactgaaagatgaggctaggctctagcaagttgaagtcaaaccagctccttcaagaagctttgagcagaatgaagtggggaggacccagcttccagcccaggaagcccactgtacctggagccatctgggataagactttgacccatgactcccatatccacagcctgtccatcctagcccatcccagtttatcctgtatcatttgagctgggattcccacatcctctgagttggaagtcccatctcaagtcttcaataaagactcttgaatattgaatcacaaa

SEQ ID NO: 91027 - DNA, 597 bp, Homo Sapiens
tcatctcctcgtcttcaaggcagcacaagccattgtggaatctccaccaggtgtacagatcggtgcctctgcgtcctgccactcaggacctctcaagtccccgatgtgatggctcatcagcatgatcaggagaaattccatgatcttgcttattcctgtcttgggaagtccttctccatgtctaaccaagatctatatggctatagcaccagctctttggctcttggcttggcatggctaagttgggagaccaaaaagaagaatgtacttcatctggttgggctggattccctctgataagccttcccagttgactgaaagatgaggctaggctctagcaagttgaagtcaaaccagctccttcaagaagctttgagcagaatgaagtggggaggacccagcttccagcccaggaagcccactgtacctggagccatctgggataagactttgacccatgactcccatatccacagcctgtccatcctagcccatcccagtttatcctgtatcatttgagctgggattcccacatcctctgagttggaagtcccatctcaagtcttcaataaagactcttgaataatgaatcacaaa

SEQ ID NO: 91028 - DNA, 462 bp, Homo Sapiens
ttggttgaaagaaaatgtatttgtggaagaaaaaagaaccttctgggagattctgaagtctagtggttgggtgacgaggctgaggcaggagaatggcttgaacctgggaggcagagcttgcagtgagttattgttattgctgtcataacgatgagcacttcacaacagctgtcaccacccgatgcagcagcaattgcatggaatcataacttaaaaaattaacaaccagatttctgaagttagagttcttagtttcaaatcttgtctgcatcaaaattgctctgtgactttgggaaagtttaaccactgatttctaccttgaagaaaaaaatgagtataataatatctatctcgtaaaatggtggtgaagatcacatgggataatgcaaatgaagtttgtatcttattgcctgatacataaagtatattcaataaatatttgccattatgattaccattaaa

SEQ ID NO: 91029 - DNA, 353 bp, Homo Sapiens
ggcacgaggctcagttgctggatgcttggaaacttctggaggagaaggggagctttaacttttccaactcctgggatctgctgcacggttcgaaggagcaaaggctcagacagcagcagggcccgtttcttcccgagaagagggttcttactgggctctttggtttgctcttgaacctgaaccacaatgaaagcaacagcacgtgagcgccctctggaggactggccgttttcttaaaatatgttttgtagaaattgcgtttttccatttggctcagcttgacttaagggaacaaatgttttcatgtatcatgaatataatttctcagacatcagtaaaattattgaaaggtg

SEQ ID NO: 91030 - DNA, 972 bp, Homo Sapiens
aattaggtagtacgagcctggtgtttaatccggcacgaggctctacactgggacgtgtggggttcctgccggctgtattcgggccttggactggactgagaagctacggtggagaccatccatggaaaagaacccccctgatgatacgggccccgtgcacgtgcctttggggcatattgtggccaatgagaaatggcgcgggtcacagctggcgcaggagatgcaagggaaaattaagctcattttcgaggatggcttgacaccagacttttatctgtcgaacagatgctgcattctttatgtcaccgaagctgatttggtggcaggaaatggctacagaaagaggcttgttcgggttagaaattccaataatcttaaaggaattgtagtcgttgaaaaaacccggatgagtgaacaatacttcccagccctacagaagtttactgtgctggaccttggaatggtgctgcttccagtggccagccagatggaagcatcctgcctcgtcatccagttggttcaagagcaaaccaaagaacccagtaagaaccctcttctcgggaagaaacgggccctgctgctgtctgagccttcgctccttcgaaccgtgcagcagatcccaggagttggaaaagttaaagctccccttctcctccagaagtttccaagcatccagcaactgagtaatgcttccattggggaactggagcaggtggtccggacaagcagtggcacagccagatcccatgcccttctttcacgcaagccaaggtgagggctggcctcagggccacgggatccttcctcccgagaacacaaacaccaggatcttgtttcagtttaaaaccaagaaatgggccggtggccctggtcacgctctatctcagatttgggaggcgaaacgggatatgaggccgaagtcaacaacgccaatggaaccttaatggaatacgagtgaggcgaccctggggg

SEQ ID NO: 91031 - DNA, 738 bp, Homo Sapiens
acttctaattcttgtagtgatcaataacatcactatgcacagggtcaaagtctctgacagacagagagaagcttccttctaatgtttcactctctctaataagcacagctccagcgctatttcctggtgccaaaagctgcctttctgcgtccttcctggttatatccttgaaaaaccactcttctgtttctaaggtgttgagtttggccacatagttgctggggatgaagccttctttttttgttaaaagggactttgctttccaccattctccatgctcctccaggactttcatcttctctcctttcttgaaagacaagtcgtccgggtggatgccatcataggggtacaaggctaccacaatgtctccttgttcctctggatctttagtttgaaacctctgtccaggtaaaagctgagattctggaactggcctttgctgtttattggacgttggatctctcacataaatagttctttcagtattacgtactggttgagtcttcaaatctactccatcgtcactcaagctgtctttcccttttgattttatacatcccatatttcccgctcgcggtgaaagtttcggggcggcggagctccacggtgacttgagttcagagtggggggcgcgacggggcggcccagcaggacctgcgtatggggaggctgctggccgggaacgctggacgcgcggcgaggggctgctggcgcggggccgggggtggcgcggccgca

SEQ ID NO: 91032 - DNA, 437 bp, Homo Sapiens
agggggcccagggggcgcctcctgctccgtgggggcccctggcggggtatccatgttccggtggctggaggtgctggagaaggagttcgacaaagcttttgtggatgtggatctgctcctgggagagatcgatccagaccaagcggacatcacttatgaggggcgacagaagatgaccagcctgagctcctgctttgcacagctttgccacaaagcccagtctgtgtctcaaatcaaccacaagctggaggcacagttggtggatctgaaatctgaactgacagaaacccaagcagagaaagttgttttggagaaagaagtacatgatcagcttttacagctgcactctattcagctgcagcttcatgctaaaactggtcaaagtgctgactctggtaccattaaggcaaaattggaaagagagcttgaggcaaaca

SEQ ID NO: 91033 - DNA, 509 bp, Homo Sapiens
tgagtgggattcactgagacccacagaggaaggcatttttcaggtaaccctcactgcagaaactgattgtcgatatgtgtcttggaggagaaagaaattatatctgctctttgctcagcatcgctacatctcccgccttttttcagtgctaattggcagtgacattgcagataaactctatgccttgaatgacagggtatatataggaaaaagatatcactatgatattcggctacccaacttctatcaaatgtcaactccagaaatacgcagatcacccctgacacaacattttaagaattccagacgatactgtgataaatgacatcaaagtctgaaatttataagtataaaaaaagactctctcttcatcattccccagtgaaatagcaaaatacaaaaaaagagctccctaatgtttttataaatcaaattcagaagcgagatgccattgccaactgttttattcctttcaacaactgcattgtgaataaactttacaaattttt

SEQ ID NO: 91034 - DNA, 499 bp, Homo Sapiens
taatcaataatgtccttggatgaccttgggatgccagattcacacataattccttgttgtccccttcctgagttaatagtttagcatacaatttaccaaaatttgtagtttcctgagccacagacttcacttggaatgatcatataaagtcatccatgctacataccaacccacagaaatgaggaccgctttcctccagtgtatgctgagtcctacaatctgagcactgcttcaagaggatgccttgagtcatttttccagagttaaatttgcttatgcttctaacctccacctacagtccccgttacactgggaatgataaaaactatgccttttgaaaatataagctgtcatgttattaaagatgacaaaccagtagtagttaaagtgctgcatctaaattgttgaagcttgttacgtgggagttcattagactgtttttcctacttttgtgtatttttgaagttttccataataaaacatttaaaaagacaaaaaa

SEQ ID NO: 91035 - DNA, 196 bp, Homo Sapiens
ccccctaatttaaaaaatctgtaaagggcatccatttttcttcagttaatagtgtaaaaaaggctgcattgatgtggttaaattcccaggatcctcacttctttagggatggacgaaatgtcggtgtcattgcttacaaaagtgtcttgaacgtgatggagcttagattgaaaaataaagttgatatttcttaaaa

SEQ ID NO: 91036 - DNA, 454 bp, Homo Sapiens
gagtttggtagctggagtccaaaccagttagtatgctgtacagtttagaaattagtgggttgcctgctgtcctgtgtgtttacataacagggcacctgaggtaggaagggccctttcaggactgatttcttgggggccagaatggacatttggagtctagagcaaatgcaataggagaggtgggtggcagggagcatctttatgaagctttgtatagaaggaacagtccagctttagtgagtgtggagctagactctgatctggatttgaattctggttcctgcattcattcaactgtgttactgtatccaagtaacttgattgacttgtgtgagcctcagtttcctcactgtaaaatggctattgtagtactcacttaatggagttattaaatgactaaacaaactccaaagagtatatctaaagccagctgccaccaggcctggtagcttat

SEQ ID NO: 91037 - DNA, 726 bp, Homo Sapiens
gggcccctacccttcacccccttctgtatcagattggccctcccactcccatctcactctgcgtgtacaatcttccatatccgcaagttcactggcactcttctggcacctgggcaagatcccagaacagaggatggagtgactggcctcacagagcttagtgcccgactcaggggaaatgggactggtgcatgggaaatggtcagcctaggataggacacgagagtctgaaattcaaagcaaccagcttgaagtggtttgagaagctggaagcaaacatgggctagagagatagggcagaagtcaagacgaggatctggactgatgtggagaaagtagccacggaagcatgaactgtatcctgcacaaagtccctcttccccgcctcctaattcattatgcccaaaaggccttacgtgaaattccagcccagagtactcatgacttgagagacgtggacagagccagcttctaccttgcctggccgtctctcccctgtcttaatgtctgctcttgctctaagctccagaagagtggcgggccatgtatcttcaatatgtttttgctgtatgggcaggttgtcttattatgtgatcaacagatgtccaggaactaatgagtggaatttaatattattgtcaaataaaacttgatttgtcctatatttaatgaccagtagttacttgcatgcatgacctgctagttgacttactcccgaggtcctgt

SEQ ID NO: 91038 - DNA, 481 bp, Homo Sapiens
  misc_feature (13)..(13): n is a, c, g, or t
  misc_feature (93)..(156): n is a, c, g, or t
  misc_feature (177)..(226): n is a, c, g, or t
tgttctttttgcntggaatgctttctcccactgttttgtctagacaagggctgtctattaggactttctgtgatgagggaaaagctctgtatnnnnnnnnnnnnnnnnnnnnnnnnnnnnnnnnnnnnnnnnnnnnnnnnnnnnnnnnnnnnnnnntgcctggtataaatgactgannnnnnnnnnnnnnnnnnnnnnnnnnnnnnnnnnnnnnnnnnnnnnnnnncaactgttacttactttgaaatcattagctcagggctccaggtctccactgggaaaccatcccaatattatggttgatgtaagtgcccccgttcccccacccccacttatgttcctgtagtaaccttgttctccctctatcccaatactcagaacaccattgtcagtgattcactgatctgcctcctctgctagaccaaatcttttttaggtcaaagatatgcagtgcagtcaataaatggttgatgcctaaaaa

SEQ ID NO: 91039 - DNA, 351 bp, Homo Sapiens
  misc_feature (212)..(240): n is a, c, g, or t
gttgagacggctgggagagaagaagggcacatgcttcgtccttttagttcacaggtctctggatcaacagatgctgtacccaaggagctggacctgtggaattatcccccaggaattttgactgcacctggattggatttagtgtaagaagagtaactgtcatgagcctcaaatgagttctgcagtagagaaaccatataatgaagtaaagnnnnnnnnnnnnnnnnnnnnnnnnnnnnnctttatactgatcactacatgggcaaaaaagaagacagttgtagaggtatgatggaataaaaaaattgatcagtcagatggcaaaactgtcatcttcatcaaaatgccaaa

SEQ ID NO: 91040 - DNA, 531 bp, Homo Sapiens
ctcagcccagccttgcccaagatgtattgcaggggaatctggacattttagccataccaagaatcattagaagatgcaagctggaaaaaagaaggtcccagttttggttttgaacccttcatgttgcagcaaatgtgaatctcctacagatgggtttggggacttacctgttcaaatagcagcccggtgtcctctgtgggtggggggaggtttgtctgtcctttcattctagtaaatccaccatcctctgcacgagagccaggagaatccacatcacttcaaaagagcccccaaatccttactacgtactacagcctcctttcgaatgttcctggttgagagggagatcaattgcattatttacaagtcaaaaaattttgtatcaaacttcctatgagcttgggcactcatggcctatggaggcccacccagacgcagccccgccatcatgctttttcgttgttttgtggatgtacccagggctatttacacactctttcattaaaaggcttatttttatatttaaaaaaa

SEQ ID NO: 91041 - DNA, 403 bp, Homo Sapiens
atgtttgggattcaggagaatattccgcgcggggggacgaccatgaaggaggagccgctgggcagcgccatgaacccggtgcgctcgtggatgcacacggcgggcgtggtggacgccaacacagccgccttccaacctccggaaatccaatttcttccacttcgtgctggcgctctacgataggcaggggcagccggtggagattgaaaggaccgcttttgtggactttgtggagaaagagaaagagccaaacaacgagaaaaccaacaacggcatccactataaactccagttattgtacagcaacggagtcagaacagagcaagatctgtatgttcgcctcatagattcaatgaccaaacaggccatcgtctacgagggccaggacaagaacccggagatg

SEQ ID NO: 91042 - DNA, 433 bp, Homo Sapiens
accgaccaaaatggcggctgccgttggtgcggggtgcggtttgtagtgctgttgccctactcatccctttgcaaaatgtgaaagaagaagcggctggtggaggcgggccataggcaatgagtcggcgaaggaaacatgatgacagccctagcccgaagaaaacgccgcacaaaacagtggcggcggaggaatgcggctcggtggtcgagccagggaggaggcggctgagatcggcccgcggttcgtggccctgcggggctagagaggggcctcccgggccagtgcggcagcgagagcagcctccgaccgccgccctgtgcagtaaaagtaaccccgagggtgagacgtcggcagcgcggcctgccttggcttcggcgccgcatccccacatcccagcttgcaacaaggaaatctggggtgggggtggagtctg

SEQ ID NO: 91043 - DNA, 1130 bp, Homo Sapiens
cagtcgacggtaccggacatatgcccgggaattcggccattacggccgggggggatttagattgtcactgccacctcggtcggtgcttacttcgctgccagctggtcgtcgccatgaacccggacctgcgcagggagcgggattccgccagcttcaacccggagctgcttacacacatcctggacggcagccccgagaaaacccggcgccgccgagagatcggtgagggcggcgggcgagacctccctcctttcccgagaaaagctggagactccctcgatgcggagtcaggggcgctgtggggcctaggccctctggcccagcgttaggggagccgggacccccacttcgaggaacagcctgtgtccctggtggggggatatcgccattccccaggtgtgtccgcgactctgaagcctattgtgattcagggagggtggaacggaggcccgagtgtctgtctgccttttaatgccctttaaccccctttcagagaacatgatcctgaacagaccagacttccagcatgaggacttgaacttcctcactcgcagccagcgttatgaggtggctgtcaggaaaagtgccatcatggtgaagaagatgagggagtttggcatcgctgaccctgatgaaattatgtggtttaaaaaactacatttggtcaattttgtggaacctgtgggcctcaattactccatgtttattcctaccttgttgaatcagggcaccactgctcagaaagagaaatggctgctttcatccaaaggactccagataattggcacctacgcccagacggaaatgggccacggttagtccacattgagggtctgtgggtaacccacctcaggacatcagttaacagtgattgctggcatttgacttttttctgctgctacctgtttgggattctatttttaagttgttaagtcaaaattcaacttcttgttttctcctagacattttccctggaaactggtccagggctttggcctataaacgtcattcactgttatttcctaaagccttttattattgaacagcttgaaaagatggggtttacagtgcagcggggaaccccattatgttactttgggtctaatgagtaaagactttgttggaaattc

SEQ ID NO: 91044 - DNA, 729 bp, Homo Sapiens
gggggatttagattgtcactgccacctcggtcggtgcttacttcgctgccagctggtcgtcgccatgaacccggacctgcgcagggagcgggattccgccagcttcaacccggagctgcttacacacatcctggacggcagccccgagaaaacccggcgccgccgagagatcgagaacatgatcctgaacgacccagacttccagcatgaggacttgaacttcctcactcgcagccagcgttatgaggtggctgtcaggaaaagtgccatcatggtgaagaagatgagggagtttggcatcgctgaccctgatgaaattatgtggtttaaaaattttgtgcaccgagggcggcctgagcctctggatcttcacttgggcatgttcctgcccaccttgcttcaccaggcaactgcggagcagcaggagcgcttcttcatgcccgcctggaacttggagaatcattggcacttatgcccagacagagatgggtcatggaactcaccttcgaggcttggaaaccacagccacgtatgaccctgaaacccaggagttcatttctcaacagtcctactgtgacctccattaacatggtggcctggtgggcgtaagtgaatttttcagcatttatcggatgtttgaagttggcaagacttcaaatcatgcattagttcttgcccagttcatcactaagggcgaaatgctatggatcacatgccttatcgtaccta

SEQ ID NO: 91045 - DNA, 337 bp, Homo Sapiens
gggattaaaaggtctggatcagtggttcttggttctcactgttcatcagaatcacctcggggagccttgggagataagccccatccccagagatttcgattcatttgatactggcttggtgtggaactggggcttttttttaaggtatccaggtgattgttgtgtacagccagcattcagattataggtgtaccctagataacataagttagggtggctgttgttgctgttactatcttggcacctttattattaatgggtcataaaataattcagctctattttatacactaaatatatcaactctataataaaatcctgtatgagatctggctgg

SEQ ID NO: 91046 - DNA, 524 bp, Homo Sapiens
  misc_feature (93)..(112): n is a, c, g, or t
taggtgacaaaaggtgtgccttctgttgccacatttgacccaccacaggactcactggactggacttctatttatattgtattaagtaactgnnnnnnnnnnnnnnnnnnnnttttgattgacaccaaaaaattaccttggcacaaatgccagacctgtgaaggtcagaggcccgctgcttctcccaggagggagggaactttttggttgtctgtggcaattcctctgtacagattgtaactttttaaaaatttcccttcaccccgtcacttgaatatatgttcatagtaatttgtaagatacttcttttccttattttggttgcaagacccttccgaacacattcctgtataaagtattttgcactatttaaagaaacccatatggatgaagtcaggatgtgcaatatgatggcgtcacagtgctcatcgttgtacctgtaatgtaactaatcagtttaaatgtactattttaaatatgtaaaataaattttcaccatgagcatgttttaatgaagttaaaaa

SEQ ID NO: 91047 - DNA, 1517 bp, Homo Sapiens
ggaccggtccggaattcccgggatctaggctgtttctctcgcgccaccactggccgccggccgcagctccaggtgtcctagccgcccagcctcgacgccgtcccgggacccctgtgctctgcgcgaagccctggccccgggggccggggcatgggccaggggcgcggggtgaagcggcttcccgcggggccgtgactgggcgggcttcagccatgaagaccctcatagccgcctactccggggtcctgcgcggcgagcgtcaggccgaggctgaccggagccagcgctctcacggaggacctgcgctgtcgcgcgaggggtctgggagatggggcactggatccagcatcctctccgccctccaggacctcttctctgtcacctggctcaataggtccaaggtggaaaagcagctacaggtcatctcagtgctccagtgggtcctgtccttccttgtactgggagtggcctgcagtgccatcctcatgtacatattctgcactgattgctggctcatcgctgtgctctacttcacttggctggtgtttgactggaacacacccaagaaaggtggcaggaggtcacagtgggtccgaaactgggctgtgtggcgctactttcgagactactttcccatccagctggtgaagacacacaacctgctgaccaccaggaactatatctttggataccacccccatggtatcatgggcctgggtgcctttctgcaacttcagcacagaggccacagaagtgagcaagaagttcccaggcatacggccttacctggctacactggcaggcaacttccgaatgcctgttggttgagggagtaccctgaatgtctggagggatctgcccctgtcagccggggacaccatagactatttgctttcaaagaatggaagtggcaatgctatcatcatcgtggtcgggggtgcggctgagtctctgagctccatgcctggcaagaatgcagtcaccctgcggaaccgcaagggctttgtgaaactggccctgcgtcatggagctgacctggttcccatctactcctttggagagaatgaagtgtacaagcaggtgatcttcgaggagggctcctggggccgatgggtccagaagaagttccagaaatacattggtttcgccccatgcatcttccatggtcgaggcctcttctcctccgacacctgggggctggtgccctactccaagcccatcaccactgttgtgggagagcccatcaccatccccaagctggagcacccaacccagcaagacatcgacctgtaccacaccatgtacatggaggccctggtgaagctcttcgacaagcacaagaccaagttcggcctcccggagactgaggtcctggaggtgaactgagccagccttcggggccaattccctggaggaaccagctgcaaatcacttttttgctctgtaaatttggaagtgtcatgggtgtctgtgggttatttaaaagaaattataacaattttgctaaaccataaaaa

SEQ ID NO: 91048 - DNA, 466 bp, Homo Sapiens
ggagtacagggaacctcaagtagtgaagtggaaatccatgtgtaaggctttgtggcttcaggtaccagtggctaaggtagttttaaagactttgttgattttagaaaaagtccatcttccatcccctacatggcagttaatacccttctatatggtaaaaccttagagattaccttaatctgctaggaacagaagcaagaaaaaccatggcgtaaacacccccagagtttttgttcatttgtttcatctttcttgataaagcccgaaggtagcccattcagggctgttgtggttggttgctccatcatgtcatcaatagcccatatcttttcttttttatcttccttagtgtaacaccaaactacctctctgatagctggtgttcatgaaatattttaccttcaaatgattgtacctttttatttgctttagagttctgaaataaaatgaaattccactgtaaaaa

SEQ ID NO: 91049 - DNA, 448 bp, Homo Sapiens
gcatcatggtcatgaaaatgaatggatccctccatcaagaattgaagattgaggagaacttcaaagacaccagtacctccttcctggccttccagctccttcctgaggaggagcagctgtgggcggcctgtgcaggacgcagcgaggtttacatctggagcctgaaggacctggaccagcccccgcagagggtgcccctcgaggactgctctgagatcaactgcatgatccgggtgaagaagcaggtctgggtgggcagccgagggctggggcagggaacacccaaggggaaaatctacgtgattgacgccgagaggaagaccgtggagaaggagctggtggcgcacatggacaccgtgaggacgctgtgctcggctgaggacagatacgtgctgagtgggtcgggcagggaggaggggaaagtcgccatttggaaaggggaataaac

SEQ ID NO: 91050 - DNA, 661 bp, Homo Sapiens
  misc_feature (623)..(623): n is a, c, g, or t
cgttagtggctgcggctccgcgggactccagggcgcggctgcgaggtggcggggcgccccgcctgcagaaccctgcttgcagctcaggtttcggggtgcttgaggaggccgccacggcagcgcgggagcggaagatgttggagctgaggcaccggggaagctgccccggccccagggaagcggtgtcgccgccacaccgcaagggaaaggcggccggcggcgaccacgaaaccgagagcaccagcgacaaagaaacagatattgatgacagatatggagatttggattccagaacagattctgatattccggaaattccaccatcctcagatagaacccctgagattctcaaaaaagctctatctggtttatcttcaaggtggaaaaactggtggatacgtggaattctcactctaactatgatctcgttggttttcctgatcatctatatgggatccttcatgctgatgcttcttgttctggccatccaagtgaaatgcttccatgaaattatcactataggttatagagtctatcattcttatgatctaccatgggttaaaacactatagttggtactttctattgtgtgtaaactactttttctatggagagactggtanctgattattttgctcatttgtttcaaagaaaaaaacac

SEQ ID NO: 91051 - DNA, 612 bp, Homo Sapiens
gcaggcagaaccatggaaaatactgtatttgtatacacaggaaggatagctgcaagcccctcacagaggaaactccaccccaaagaaaaatcttagcagcaaattcctatctccctcagcactatcagcacagcccaggccagaaggttgggcttcttgtctctgggaacccatcatacccttcccgccaaagaattctaaataaggcaggaaaaaaaattggagtccagtgggagctgggtgcctggtcattcctagaagacaggcagtgtctttatgatggttagactttgagcaacgctgggattcttctctgggtcctatggcctgctatgttgagagctggcagcaggatggggacctggtagaaggaactggaagaaagtcataggttcttgggtgcacatgaacgtgtgtataacagggcacaggttgtgcattttccttgtgcttgatgcctccatctgccatcctctccctgacagcagcctaatacttcacacctacatttctttctgtggctctggatccggaaaccaagcgtttctccaacagagctgctgtgattcggcaacattgcaaaggtaactgctgtgattcgacatcggaatc

SEQ ID NO: 91052 - DNA, 830 bp, Homo Sapiens
  misc_feature (110)..(110): n is a, c, g, or t
  misc_feature (121)..(121): n is a, c, g, or t
  misc_feature (178)..(178): n is a, c, g, or t
  misc_feature (752)..(752): n is a, c, g, or t
gggccacggggccacagcctggacggaggtcccagggaggcccccacctcagtggggctgtggagaagaaatcgacccttcgatgaacgggaagctgtcggatccccccngacccttcccnggcagcagcaccagcaccagccacagcctccgcaatatgccccagcgccccagcagntgcagcagcccccacagcagcgatatttgcagcaccaccatttccaccaggaacgccgaggaggcagccttgacataaatgatgggcattgtggcaccggcttgggcagtgaaatgaatgcggccctcatgcatcggagacacacagacccagtgcagctccaggcggcagggcgagtgcggtgggcccgggcgctgtatgactttgaggccctggaggatgacgagctggggttccacagcggggaggtggtggaggtcctggatagctccaacccatcctggtggaccggccgcctgcacaacaagctgggcctcttccctgccaactacgtggcacccatgacccgataaactcttcaggggacagaagctttttgtctggagctgcccacaagaaagagggcaaggaaaaaaggctggactccatgactatatatacatacatctatctacatctgcctgtgtacacacacaactttttatactagtaatttattggcaattgggctggtaattagttgatgcaaaagggaactcaggtggagaataatattgacacttgcttttctgcncccctcaggggtgtgtggaaggcagtgggggagttgggaggggggcagggaaatgaaatggagttttgtcctggcaaa

SEQ ID NO: 91053 - DNA, 506 bp, Homo Sapiens
tacagtgaagatctctcaagaatgatttgtgtgatgtagttcggtggatcatccagcagagggcagtagagccagagccatagtaaaagttatagtaaagttgctcttagcaacttgagtcttacttagatttaattttgcatagaaccaaaagttcagtttagtagccattttctttaaagtcaggctgtagtggttccgaaatgaaaattaggccctgattttatgtaagatgatgtccaatctttaattgacacccttaaaaatattaaaagattatgataggatcaggaaggagtttttgaaaatgcaatttgtagtttttaacaagtgatgtagaataaataaaaagaagtactttttaaaaagtaagtataaaattattttccagttaactatgggatataaatgattgctttaatacaggtcttcctaacctgtacagcatttcctaacctgctctgtgaaaaacaaagaaataaaacttagtgctctctttaaaaaaa

SEQ ID NO: 91054 - DNA, 1067 bp, Homo Sapiens
  misc_feature (381)..(381): n is a, c, g, or t
  misc_feature (724)..(740): n is a, c, g, or t
atatcttcgcgctgagacatgcgatgtaattggtttattcttgaagtgtgaatcgcgataagactgttaactaacagttttcaagtcttgtaccggatagtgaaatactcgaaggtccttcaaggatcctttgactgatttacatcaataagagaacctatttttgatgtgctaaaagatatgtgctcatctccaattacaatgttcaagctcctttgctttgtctaaaataatgcttctgtaagcagaagacttaagttactcctacagagtgtcagcatgtgttagatttctccacattttcttctattcaaaggaaggggatacaaaagtacaatcctcaggggatatacaaaaggaaaattaaaggtttcttccttnccaggggttgtgaaaggaatttctccaagagtgaaaaagaccccaatccagaaaccaaactttctttttacagaggaaaattaggccttcagagttcttcagaagcctgagaaacatcatttattctgtcgggccaaccctatcagggggaggccacaaagcatcatcttcttttgtaatttcactgtcatcaataattctcttcagttcttccattacactcttgtgcacataagcctcttttctgatcatcacatcatttttgtaattgctgttgttggcatatctaagctttccttaaaattttgtatttgcttgttgtccagcacaaaacgtgcattcnnnnnnnnnnnnnnnnntatatatccaaatgaactttcttgttgcaggtaggcaagatcaatgtaacattctctaaggatagcgctgtcagaaaacacactgttgcacactacttgggtagcagtttcacctcatcctctgctcatactgctctggaagtctgtttttttctctcaaaggccaagtctctcatttcgagactcatctcaagagtgccgtcctctaagaagatcttcctgactccctcctgtggaactttacctctcccctcttgcttggtactcttcatgcgtccgtccggccgaaattcgaactccagaaactcgtgcccaaacttgccctcc

SEQ ID NO: 91055 - DNA, 776 bp, Homo Sapiens
gggacgtcactgcaaggcgccgggggacacgttggctgcgttttcggcgggcttcccgggtacaaaaatggctgtggctagcgatttctacctgcgctactacgtagggcacaagggcaagtttgggcacgagtttctggagttcgaatttcggccggacggaaagcttagatatgccaacaacagcaattacaaaaatgatgtgatgatcagaaaagaggcttatgtgcacaagagtgtaatggaagaactgaagagaattattgatgacagtgaaattacaaaagaagatgatgctttgtggcctccccctgatagggttggccgacaggagcttgaaattgtaattggagatgagcacatatcttttaccacatcaaaaataggttctcttattgatgtaaatcagtcaaaggatcctgaaggccttcgagtattttactatttggtacaagacttgaaatgtttagttttcagtcttattggattacacttcaagattaaaccaatttaaattgtatgttttcaggctgtttgtatatttaattaagggatgggaggggttatttgtcatttacagtattggggtttttatgaatgtgaagcaaacaaaaaaaatttgtatgtaaactgaaaataagaaaatacattagcaagcttaatggttatccttacttgagtccacatgggttggacagtccccacacacattaaattctgtaaatgaaagccaccttttgttaaaaatttgctctaataaaacataccaaatcctg

SEQ ID NO: 91056 - DNA, 781 bp, Homo Sapiens
tctttatattttctgtgcatcacacacatgcttttctgcacgtggttgccttagtcatcttcctacagcaccatctagacatcaaaaattgtgctatatatcattggtaaaggaaatttgaagagatgacagtgcctaaaagtacagtttacatccttttggaaagtatgtgtaagtgcatgttttttgtgcaccttcttctatagcacttttttacaaatatcttatttttatttaacgacttgggttcatgtccctaatataagtatcttgacaattatgagctttatacctagcaagccacttcaggaaattcttttggagaatattttctgattattgttaaacttaatatacaattagctttattccttataaaatgtctaaaagaataatacgaagtatatataaaaggaattactgtaaactacattgccatagcaatttacataaaagtatattgttttctatctttaactcaaataaagcgtgtaataaataagttatctaaatttccagaagtgaacctgaagaatacatgcattcgactcccaacaattatagtacatgtgaacctgcattcattttgggtttgttaccatcatgcattaggagagttaggttaaaagatgtctttgcctctgtggggagcaaaaaaatgctccttttgcttattttgcatttcataagcccacctggtagaagaagccttacttatctgcttgtctatgtgattaaaatgtagtttcttaaaatattaaaatagcaaataaattaatga

SEQ ID NO: 91057 - DNA, 570 bp, Homo Sapiens
gcggccgccgcgcgccccgaagccggtcttgcctgctctcccggcaattcggcatccctggcacacatgtctctgcaagaaggactgtaaagatgtcatagcacagccccgccgccgccaggctgcacagatgcagcccgcgcagccgtccgaggctgggaggaggctcggggctcggaagatgaacctcagaacaaaggacttgtctattcccccatatctcagcctccaaggcaacgcacaatacctttgcgggcaaacactaagaaattttttaatgtcccctccgagcggcacggcaaaacgccagtttttcggttttgttcttaaatcatcgatttccccaccccattatccagtatctagggtgtttcgcatccccccagctccccaaagtagccttcccggggagaaccactcgggctcggatttagggaatgccttcacagggacgcggatgatgaaagggcggggacggaggcaggacggcaggaggaaggaggcaggggcctggggctcaccgaagcgaggcgcacgagtacgagcgaagtctggtctgcgcagtggcca

SEQ ID NO: 91058 - DNA, 453 bp, Homo Sapiens
tttcagttagtcatcatgttatattaacagttcattaaacaaatgacaatttgtaaattcagtccacagaatagcatactgaaaggctacacatgtagaattattagataaaaaggaacatcactgcccttcataaattctagaaagttcattgcattcattattcacctttaaattcaaaactggaatttgatgatgattgcaactgcagctgagggccataaactaaaacaatttactgggtgtggaaaagggggctgggaagagccgtgggctaaccatcctgttaacaaggagtgtctcctcatgaaggtggcagccaccagaacgaggtgctgcctcctaccctacaaatagcaagggcccatgcaaatgaaaagtgagcctttgagatgagtctagataataatgcattggagatttcctgttaaactagcactcttaagaacatag

SEQ ID NO: 91059 - DNA, 614 bp, Homo Sapiens
tggatgtacctcagtttacttaaccaattcccttttggcagacactgaaatcatccctatcatactattacaggcaataatgccaagcataaccacctacacacaccaagttcattgctgaatctgcctttgatgaagcctctgtttgaatcaccataacgtcacaaggctgaaaagttagccccttttttagttttcattatgtacagcagtatgtagcaaaagactccctcgggcaaaggaaatgtactctttggggatttacttcataacaataaatggataaacagaacaccaaggagaactgtttatatttaaccatgaacatgtatgtatacaatacatgcatacgcatagaaagaataaaataaataaatccatcaaagcattaagcgttgtctcagtatggtggatctagggagtgctttgtagaccgccctctttgcctatcctttctaatttcacaacggtaaatacgtatacttttgcaatataaaatttcaaaaaatgttaactcaaattaagctgcatgtattccttcagtctgtcctatatttgtatgatgctccagaatgctcaaataacacttcattaaaaaaatttatttcttcaaa

SEQ ID NO: 91060 - DNA, 474 bp, Homo Sapiens
tccctcccgccaaaccgccgagtgggcccaggggtccgacccgcccccggcgccatagcaacgcagaaggcttcgactcccagggggccttgcggctactcagccaggaggggcgcgaagatctaacagaagcgggagagggacgcacgcctgcccgtcttccgcagacccacaccctcgggagcctcagttttcccatttgtacaacgacaagactaacccagagaagcgggttcactgttgcgataacgcgtcctaccctttgtttgacctctcccactttccaacacacccctccttcgagaatcagcccggcctcctatccggcctaatcagaatcattcttttgcgtaatcccgcctcctccgataagcctcgccccgttcccgcccctaccattccgccctgcctcctttgtgatcagccccgccctccactggtctcgccaatgaatcgcgtcccgtttctccaaaa

SEQ ID NO: 91061 - DNA, 452 bp, Homo Sapiens
ttggttaaagatataattttactccatataagctttctaaagttttatataaagctaattatagtggttcagtattacaagaataggatgtgttacacagtacgacagtaatactgctgtgttccctcagatggcataaatcacttggctaatttggctactaataaatagttagtataaaatcttatttaccaaggccaataaaaaaattctcagcagttgggtatatttgaatcaaatgtcactgtaaagataagacaaaaaaacttctgtaatacatactgttatactctaatgtatccataatgaaagattccataatgaaaaataatacaaaaaatagattatgtatcaagactctttgtcaaaagctatagttcacatcagaagttaatagcactagggagttaaatgattaatacaaaaacaaattcttactacaaatattcttt

SEQ ID NO: 91062 - DNA, 1142 bp, Homo Sapiens
  misc_feature (843)..(905): n is a, c, g, or t
taaccggacaaatggatagtgctttggggatgactaccagaataaatcagttctaaaccttttccatatttgtgtcacttcgctcaggacttcatttccctgtagggagagactggtggacttagcttgtggcaacaattaacactgtgtgccagagaggagggcaggatacctgaattgaaggttccatcaagagcacaggcaggggtgattgaaccaagccttcaccgcaccgagtttgccctactgcagtcacccacaccgcggctcgcttacggttggagaaatcaaggccctaccggggccacctctctgttgtgggcgtggacgaggctggggtgagcctgccggagctgcagttgccagcgacatgttcaaggtaattcagaagggtccgtggggccagccagccggagcttgttcaccttcagagtctgtgcagcaccgaaaaaggactcacctcccaaaacttccgtgaaggttgacgagctttcgcgagggcaaatcgcagtgtgtggaggagtcaaggaaccagcttgaagaaagcttctcacagctccgacacttattgcgagccatacacaagctggtgtcaggacacgtactcccaaagtcccaccaatcccgtactagctgtggcttccaaaaacaagcacttgagggctttctctggcattctgggctggtgatagacacaaggattgcagggcttgatattcccaagaaatagctctctgtcaatgacagccttaggcacaactggactttcaatcacacatattttcccagagaggtgcatgacaaaggtgcccagcacatcctcaactggaaatagagttggcnnnnnnnnnnnnnnnnnnnnnnnnnnnnnnnnnnnnnnnnnnnnnnnnnnnnnnnnnnnnnnngaagagactaaaatttatagagatggaaagactgaatgcactatatcatagttataacagcatggatctacataacacatgagcaaagacaaattcgcattccttttttgaagcaactttaatgacaacatttgtgaataattgtaaaattccaagtgcagtccttggtacatgttaggtgctcaatacattttagttctctaattctttatcaaataaacttagtagtaaaacaaa

SEQ ID NO: 91063 - DNA, 453 bp, Homo Sapiens
cccaccaatcccgtactagctgtggcttccaaaaacaagcacttgagggctttctctggcattctgggctggtgatagacacaaggattgcagggcttgatattcccaagaaatagctctctgtcaatgacagccttaggcacaactggactttcaatcacacatattttcccagagaggtgcatgacaaaggtgcccagcacatcctcaactggaaatgaagagactaaaatttatagagatggaaagactgaatgcactatatcatagttataacagcatggatctacataacacatgagcaaagacaaattcgcattccttttttgaagcaactttaatgacaacatttgtgaataattgtaaaattccaagtgcagtccttggtacatgttaggtgctcaatacattttagttctctaattctttatcaaataaacttagtagtaaaac

SEQ ID NO: 91064 - DNA, 349 bp, Homo Sapiens
  misc_feature (209)..(209): n is a, c, g, or t
  misc_feature (310)..(310): n is a, c, g, or t
ctcgggcctggagcggctggtgcgcgcgctgtgcacgcccggctacaacgcccgcgcgcccctgcactacctagcgccgctgctctccaacctcagccaacgccctgcggcgcgggccttcctactggaccccgacaggtgaagcccagggcgcccgcgcgggcggggaggggacggaagttaggggggacggccctaagtgacacctnccaacaggtgcgtggtccagcggctgctgccccttacccagtaccccgactcctctgtacgcaggggcggggtggtggggacgctgcggaattgctgcttngagcaccgtgagtggtgggtgtggcgggggtgcgttgcc

SEQ ID NO: 91065 - DNA, 359 bp, Homo Sapiens
  misc_feature (170)..(205): n is a, c, g, or t
gcaagacatactgaatgcatatttcggtttgtgtatccatgcacctacgtcagaaaacaagtattgtcaggtattctctccatagaacagcactatcctcatctctccccagatgtgactactgagggcagttctgagtgtttaatttcagactttttcctctgcatttnnnnnnnnnnnnnnnnnnnnnnnnnnnnnnnnnnnncaagtaccagtataagcatctcccatctgcttttcccattgccatgcgtcctggtcaagcccccctcactctgtttcctgttcagcatgtactcccctcatccgattcccctgtatcagtcactgacagttaataaacctttgcaaacgttaaa

SEQ ID NO: 91066 - DNA, 694 bp, Homo Sapiens
  misc_feature (477)..(477): n is a, c, g, or t
  misc_feature (499)..(499): n is a, c, g, or t
  misc_feature (512)..(512): n is a, c, g, or t
  misc_feature (680)..(680): n is a, c, g, or t
gcgaaatggcgcccatcaggccgccgcgcccggctgaggcgagcgcgggaggcgcggcgcgcgacgcccccgaggcccacggcccccgaaacggcccccgacacccggtcgccagcgctgcgccccgcgggctctcggggcccgacctggccgcgggcccgcctcctgctccgggctccccacgaccggggggacggaggaaaggaggaaggaaggaaagagagccgccgccattagcaaagcagccctgccccgctgggcccgcctgccagaccagcccggcccagccgcgacgggctcgaagcctgtaaagaaaactggtgtttgggaggaggagcgagcgcggccgggaggacagcagctccgggctgcgggcggagatgctgcgtcatggtgccaacatggacgccggccttttgtcctccttcgcgttgccagcgcaggcgcgccccggagcctcgagaagacggctttggngtgcggaatcctcacgatcganaggaaagttggcncctaggcttggcgatgaggctccctagtgttttaagcccttccgtgttcaaagcacttcaatttctttctccgatccaagttcagacctggtatgagcgaagggccgaaaggcagctgctccatggacctccgaaggtcgcttgcaagcctgtcttctcccccttggngcaaaaaaggcaca

SEQ ID NO: 91067 - DNA, 515 bp, Homo Sapiens
  misc_feature (175)..(343): n is a, c, g, or t
cagcttccagattgacgacaagtgctgaacagtggaggaagagggacagatgaatgccgtggattgcacgtggcctcttgagcagtggctggtccagggctagtgacttgtgtcccatgatccctgtgttgtctctagagcagggattaacctctgcactactgacatgtggggnnnnnnnnnnnnnnnnnnnnnnnnnnnnnnnnnnnnnnnnnnnnnnnnnnnnnnnnnnnnnnnnnnnnnnnnnnnnnnnnnnnnnnnnnnnnnnnnnnnnnnnnnnnnnnnnnnnnnnnnnnnnnnnnnnnnnnnnnnnnnnnnnnnnnnnnnnnnnnnnnnnnnnnnngtctgtagggatttttggctacacacaaaccagtatcgctcatagatcagcaaaccggggcctactagagtctgaacagctgtaatctatgaattctaagtgaaattttaaaaattgttaatttttcctatattgcattaattttaaaaaataaatctgaggcaaataaaaa

SEQ ID NO: 91068 - DNA, 562 bp, Homo Sapiens
  misc_feature (82)..(170): n is a, c, g, or t
atgttattctttctacgttgtaacctttgcaagtatagcatttgaagtttagttgccagtgatgtgtgtctcaattcttctnnnnnnnnnnnnnnnnnnnnnnnnnnnnnnnnnnnnnnnnnnnnnnnnnnnnnnnnnnnnnnnnnnnnnnnnnnnnnnnnnnnnnnnnnagagcaaagttccttgctgaggtttagaataaagagacagacgaggaggaacccaattactaggggacaccattaggatgaaagagcagaagtatggaaatgggaatggggaactgtatccacccatagaattgtcaacaggtatgcacgtagcatctgcgattccgggagagctgacaggctaggagccagctgtagcttacacttgaaaataataataatatccacttaggggtatggaattatttatcaccactggtggaatttttgccaaaggcaagaaatgaaaacatccgatgaaaaatgtcctcagtccacagcccattacactgacacaccgtacaaactgattaactctctggccaagaataaacagtactatagttactact

SEQ ID NO: 91069 - DNA, 542 bp, Homo Sapiens
  misc_feature (99)..(99): n is a, c, g, or t
ctggccatcgtccgggtcgtagggctagcccaggatgtccagaaaggcagcaggcctttccacggtgtcgatgtggtgcaggttgtctcggtgaggtgnacccatcccactaaacccccatccttcaacctgcaccccgcccctcacttgctggctagtatgcagctgcagaaacttaatagccagtatcaggggatggctgctgccactccaggccaacccggggaggcaggacccctgcaaaactgggactttggggcccaggcgggaggggcagaatcactctctccttctgctggtgcccagagccctgctatcatcgattcggacccagtggatgaggaagtgctgatgtcgctggtggtggaactggggttggaccgagccaatgagcttccggagctgtggctggggcagaatgagtttgacttcactgcggactttccatctagctgctaatgccaagtgtccctaaagatggaggaataaagccaccaattctgttgtaaataaaaataaagttacttacaaagagacgggcc

SEQ ID NO: 91070 - DNA, 728 bp, Homo Sapiens
cggcggcgtgcgtgccaggggctgggggctccgcgcctctcttgcggctcaccgcgctccgcgcttccctctctccagggcaggcggcttctcagagtaagcaatgcaaagatgatacagagaggtagtaagtggacactttctagaagtgtctgagcagattcttaatgaccgctgcggagtggagagtgtcacggagaattctagcctccttggaaagattagagactctttttaaggtcctcaagattctttggaccaagagcacaacagctccagctggcagcatcacttcccgccaatttatccaacttctgccaaggctctgaaatgccaacaacgtcgagggcctgcacttgatgtcaagggtggcacctcacctgcgaaggaggatgccaaccaagagatgagctccgtggcctactccaaccttgcggtgaaagatgcaaagcagtggccattctgcactaccctggggtagcctcaaatggaaccaagagccctgctatcatcgattcggacccagtggatgaggaagtgctgatgtcgctggtggtggaactggggttggaccgagccaatgagcttccggagctgtggctggggcagaatgagtttgacttcactgcggactttccatctagctgctaatgccaagtgtccctaaagatggaggaataaagccaccaattctgttgtaaataaaaataaagttacttacaaagaaa

SEQ ID NO: 91071 - DNA, 505 bp, Homo Sapiens
  misc_feature (304)..(312): n is a, c, g, or t
gagaccccaggcctccatgactcaggggccgctccaccccattgtgcggctggtggcttggggaagagagacgtaaaaccccaagttaggaggtctgtccgggcccttgccttgcctaaaggtcatccccagcaggtgagcgtggcccaccctacacactcaggtttctcagggtgccactccgtgcctggcgctcagcacgacatggtggattcacacccaagccccaggtgccaggacaagaatgccagcgctgggcatactgccggcccattccccccggcccgagaccctggacacccgnnnnnnnnnggccagctcaggcttctaggtggaatgtggagacgggtttcagccacactcccaaccttagctgttgagactcaactccaaagacggaaagttagaaaccccagggcagagtccaggagccgacctgggtctcacacaggtgtcccagaccagcgtggggatgcccaggtggccaggcccagcctgcggccgc

SEQ ID NO: 91072 - DNA, 569 bp, Homo Sapiens
cagtatgttgaaatggaagagcactggctttgtgccagacatttcagaactcctgggacccttggacagaggggatatgctaaatgaagcatttattggcctgtctttagcacctcaaggagaagactcatttccagataacctccctccctcttgcccaacccacagacatattttacaacaaagaatactgaatggctcttctaacagacaaataattgacagaaggaatgaacttgaaaaagacatctgttctggatttttgatgactaatacctgtaatgcagaagacggagaactgagagaagacggcagagaacaggaaatcagagatggtggttctctcaaaatgattcactttggtctggtgtaaacattaagaaaaaaagaaaactgccttctttatatctaaacttttcatggcctgatacagacttaaaatcccccgtgtggatttttaacaagagacagtatgaatcatataaattagttaagagttttgagttgagtgtttgttttcaaaataaagttttattatttcaaaaacatgcagcataacagcaaaaaaa

SEQ ID NO: 91073 - DNA, 601 bp, Homo Sapiens
ttttaagatatttcacatttatttttcagaaatacagaggttcatctaagtatcgcttcttaaacagatgtctatttcaatgacagctctctgtccccgctgtccccacatcaagagcagtacatagtccaacgctctgcacaaagcacacactcgggaattgctgcgctaacagggttatcaagggttactgggttctgagctaatgtaattttctgaaccagagaactgtaattgtccaattcgattttagaaagaggaatgtgtaaaaggttgtccagtaatatacttttgacatattcaagtaataacaataaataaaatttttaggtctgaaaagtctagtaataaacttcaacatcaggtcacctagaccctccctgtgtgactaaactctctttaattatttcaaaacattaaaaaagaaaccataggtcattaagacaggccaatttctattcaattccgtgaatttttatgctggcattcagagacaccccgaatataaccaccacacagagaaagtctgacattatgcttttatgcaaaatagagaatatcagtggggacatttaaaatatctactaaccagtatgaattt

SEQ ID NO: 91074 - DNA, 432 bp, Homo Sapiens
tttacttttaaacttgtctctaacttagaaaattttttctaaatgtatcgattagtgtaaagaaaaagtatgagtagttaataaatctgacctattatacaagaaatgcaattttgaaataccagattttcattttttgtactaagtgtatctcattgtaggcaataaaaaattgcatcacaggcatcaaaagtgggaaaaaattgttccttttatcaaccaaatagaaactttcaataacatactttgagtgataaaatggtgatgtcttacatttaccattatagagaggtcttgtggttagaaatttaaaaagtgtttaaagatgattaagcatagacaattaaaagaaacattatatctcttggtatttttctcaagacactaaaataataaaataaaaatataattaaggaaaagcatgactttggg

SEQ ID NO: 91075 - DNA, 657 bp, Homo Sapiens
aacttcaagttcgaggctgggaggaccgcgtacttcaccatcaacggcgtgagcaccgctgactcgggcaaatacgggctggttgtgaagaacaagtatggctcggagaccagcgacttcaccgtcagcgtgttcatcccagaggaggaggcgaggatggccgccttggagtccctgaaaggtggcaagaaggccaagtgaccggaggtgcgaggagagccagccggcctgtgtgacttgggtgtgaatggtttgggttaaggatgagacgtcttcatgctttctcctccctattattttctggcttgaggggaaaataatgtcaggtctttcactcatataaaaaagcaccaactaatgacactttaattgtttttctttatctacaaaattatgtgttaagaaaataccattcatagcatgaagattaggaaacagttttaaggagaagacttgaatgaagttggagggacattgaatgatggtcagagggcagacgaatgtgtcgtggggcgaattgggatttgctgcagctgtgaagccatggccgtgtctcgtgtgttgttacagaggtgatgtgcttttcgacgggcgcctcgtggcttggaacctcctctgtatgaataaacagtattcacgtctgtcctcttccccgaa

SEQ ID NO: 91076 - DNA, 358 bp, Homo Sapiens
tgtgctgagtctcacctgaaaccagcaagtctcagagccttacccaaggccttcaatgtagtacctgggtatcacttctggttttccaggacccaaagtctcttcaggtagcctgtaatgaatgccgtcgggatgaatgctgaaggacttttcttccaggtggtgggttctcttctggcccaagatgtgtctaaaaatgtcatctggcagtgcccagcgatctctctgtaccatgctccctctacagggattgggggaggagtggcacctgcgattcaggactgttttttaaatcactccagtgcctctttcagcaatatgaaggtaaaaccagaatggacaaatggccaaatagctg

SEQ ID NO: 91077 - DNA, 614 bp, Homo Sapiens
cttacaggacaaagaacaggaactggagcagttgactaaggagttgcggcaagtcaatctccagcagttcatccagcagacagggacaaaagttacggttttgccagcggagcccattgaaatagaggcctcacatgcagacattgaaagggaggcaccattccagtctgggtccctgaagcgacctggttcatctcggcagctccccagtaatctccgcattctgcagaatcctatctcatctggttttaatcctgaaggcatatatgtatgacattatctgtctttagggaggagacccaacagaggtaccaaggacagtaaacttcctttttgatttgtgccaatgatgaacagaggatctattccacaagacgctgtatgttttttctctcctaaattgcataccacttggagccataccctgtgcactgatgctaaagaacaaagaaactgtgttttcacacatcaacagtgttgatatttttgtccagcagctataatgcaaagccttcgtttttatttgtagcattttgagagctttaggaaagtattatatagtgtgtatacataaataagccgtgacttaagtaagagtgaagagaaatttgaaa

SEQ ID NO: 91078 - DNA, 599 bp, Homo Sapiens
  misc_feature (298)..(327): n is a, c, g, or t
  misc_feature (491)..(491): n is a, c, g, or t
aataaagctattcacattgttaagaaaaatactttttaaagtttaccatcaagtcttttttatatttatgtgtctgtattctacccctttttgccttacaagtgatatttgcaggtattataccatttttctattcttggtggcttcttcatagcaggtaagcctctccttctaaaaacttcttcaactgttttcatttaagggaaagaaaatgagtattttgtccttttgtgttcctacagacactttcttaaaccagtttttggataaagaatactatttccaaactcatattacnnnnnnnnnnnnnnnnnnnnnnnnnnnnnngcatgatatttactgttttgttgtctgggtttgagaaatgaaatattgtttccaattatttataataaatcagtataaaatgttttatgattgttatgtgtattatgtaatacgtacatgtttatggcaatttaacatgtgtattcttttaattgtttcagaantaggataattaggtattcgaattttgtctttaaaattcatgtggtttctatgcaaagttcttcatatcatcacaacattatttgatttaaataaaattgaaagtaata

SEQ ID NO: 91079 - DNA, 521 bp, Homo Sapiens
agaacaagagagggtgggaaaataagaaaggaaaatagaacattttagggaaagggaatagtgtgtgcaaagatgaagaagtataaaagaaaatgtagcttattccagaaactgctaaaaggatcaatatgctgtcgtgtcatgagagagccacaattcttcaaacatatttaactgctggagagaatggctcagaatcccaggtatcagcttcagcacacagataaaatataagaaagaatttgaggttgatgtcagaagcatttccaacagggctaaggaagtatttttttggaagatctcttcttggcccttgacagaagaagcagagtaacttttcttaggtggcataattcttcaaaatgtgttcattttgaagaacaggggtgatggatggtaatacacaggcagggatcaacagtcccagaactgaaggaagagttgacaaatgtatcaaagatgcctaatcaaaatgtgtccacattctgctaaataaattctggttgagcagaactaacaaa

SEQ ID NO: 91080 - DNA, 689 bp, Homo Sapiens
tggtgaagagagagctggcggccacactgaggcctgtctcgttgcgtttgtagtgctccccgaaggacaccagcccaatggagatggtctgcaggaatggccggatggcaggcgtgaactggaagcccaggcagcggccatagaagcatcccttatgcagcgtgacatactcccggaggaagtcggcggtgagcccctcgtcgccctcaaagaagagtacccccggccgattggtaaccagcaggcgctgggcgtagtagaccagagcgcggagctgggtgagggcagccaggtaggcctccagctcggccaggttgtggctggtgcggaagaagatgctgcggcggttggaggccacatagcgggatttgtgcaggaggtgcgccaggcagcagcgggctgtgtgcactaggctgcggtacccgttggccggtgtctctgggtccaggtcaaagaggtgcgccacacccagcaggcggcccaaggccggctccagccccagcgcctgctcccgtacaccggcaaaaacgcctgacagccgctgggccgtttccccaggaccctggctcgagaagaaggctatgttgtcctccgccagagtcaccagcgactgtgtcattgtgcgcaggtccatgttgtggatgagccttgaggccctcctaggcatcttccgagcttcctgggctggg

SEQ ID NO: 91081 - DNA, 770 bp, Homo Sapiens
  misc_feature (344)..(344): n is a, c, g, or t
cagtcgacggtaccggacatatgcccgggaattcggccattacggccgggcttcctggctgggacggcacctatagaaactagggtacaaatctcccaaagatggtttgcaccgtcatttcaaatgtttgcacaatataccacttagaggcttaaaatcagggtggttcagttcaaaaggtaatatcaaccgtcagcaaacatgtcagtttaaaaataagttcggttaacaaggaagtgttaagcagattttttgaatacacttacaatatactggcttataatcatttttattctgccatatggtttatttcatatacactcacttttacactcacttccaanttatagcattcaataacgttacggcttaacagaaaagtgacatggtgtatttgtaatttgttttctagtagctagcagagagcctggcacatagtatgtattcaaaacaagtgtgttcacacttactaacacatatataaatctcatttgagattcacagaatataacataattttcttttaactctttattctagctcaatatttaataggaacgtctgatttcaaggactactaaaggaaggccatatacatgtgaaaaccataaaataccatattatgcattctactattttcaggggcatgccctgaatgaaagctttagcaacttatgagacccgttacgtatgagacaacatataagggatagcactcaaggactctgccagcaaacaagtatgaaacttgtactttcaaactgacatct

SEQ ID NO: 91082 - DNA, 934 bp, Homo Sapiens
taggtgaactatagaacagttggtacaaaaaagcaggctggtaccggtccggaattccgggatatcgtcgaccacgcgtccgggcgagcacggccgcgggcggcgttcgctggagctggtggaccgggcggctgaccgaggggcggacgcacggcggggcagaccgcttggggaatgcggccggcgtctgtgtccgtcgccatgacagatcagacctattgtgaccgcctggtgacaggacacgcctttcctggacaggccatgggcgcttgagtgagcagcaggtggacaggatcatcctccagcatgaaccgttactacccacagatccttaccaacaaggaggcggaaaagttccggaaccccaaggcatccttgcgtgtgcggctctgtgacctcctgagccacctgcagcggagcggtgagcgggactgccaggagttctaccgagccctgtatatccatgcccagcccctgcacagccgcctgcccagccgccacgctctgcagaactcagattgcacagagctagactcgggcagccagagcggcgagctgagtaacaggggacccatgagcttcctggctggcctgggccttgctgtgggactggccctgctcctgtactgctatccgccagaccccaagggcctgccagggacccggcgcgtcctcggtttctcgcctgtcatcatcgacagacatgtcagccgctacctgctggccttcctggcagatgacctaggggggctctgacagaccctggacccagggcctcacctgccactcaaccaaagagtcctcgagccggcccgccaaggggactgctgcttctttttctaaatgcatatttttcattatttataatttgtgtaaaaaacacaccttcaccttacaaggtgctgaccatattaaatgttcaagttctctcaaa

SEQ ID NO: 91083 - DNA, 443 bp, Homo Sapiens
ctaggatgccttgggtctcatgtcccactgcattgtcatcttgaagatttgtcacactttgagagaaaaacttgttgccatgacaatgggctcagaggctgaaaagaagacttcaaccactgtcagcagcatcattgtggtggccaagtggatcatccccagagtagatgatgttgtgaaatcagtgtaccatctgttaagcaccaagctcctggatgctccatcagcagagagcagagaagagaagcaactggatatccaagagaagcagcttgacttcaaagagacaacttgacaacgtggcttcagagaggagtctggccaaggactgctgaactccaggggaggattgccctcccactccatctgctttccagctcccctccccacagagagccattttcatcagcaataaaatcctccacattcaccaccctccaaaa

SEQ ID NO: 91084 - DNA, 437 bp, Homo Sapiens
aggacaatcaaaaatgactagtcaacccaatgatctagccaatttctagtgccggtgagtggaaaaagtggtgaagaccctaagacatataccccgtgggcgcctaaagcactaagctcacgacgctgggaaagcggggccgagaaggagggactcggggcgacccgacagcgccagacagggcggccggcgccgagggccgctacctcggtgcggcggtacagcgtggcttccccgaaggcgccgcggcccaggacgcggatggggatgtagtgcagttcctcctgctccgccgcgccgccgccggctcgcggcccctgactggcgctaggccccggactcgagtccccgcaacccccggactcgctcccaaagtccgagttgatggaatcgcagtgtcgctcgtactcgcccagcaccgacatggcggcggccgc

SEQ ID NO: 91085 - DNA, 434 bp, Homo Sapiens
tgcggccgccgccatgtcggtgctgggcgagtacgagcgacactgcgattccatcaactcggactttgggagcgagtccgggggttgcggggactcgagtccggggcctagcgccagtcaggggccgcgagccggcggcggcgcggcggagcaggaggaactgcactacatccccatccgcgtcctgggccgcggcgccttcggggaagccacgctgtaccgccgcaccgaggatgactcactggttgtgtggaaggaagtcgatttgacccggctgtctgagaaggaacgtcgtgatgccttgaatgagatagttattctggcactgctgcagcacgacaacattattgcctactacaatcacttcatggacaataccacgctgctgattgagctggaatattgtaatggaggcggaggtggaaagggcccgg

SEQ ID NO: 91086 - DNA, 489 bp, Homo Sapiens
cagcccactgcctccaagtcaggcagaccttggtgaatctggaagcaagaggacctgagccagatgcacaccatctctgatggcctcccaaaccaatgtgcctgtttctcttcctttggtgggaagaatgagagttatccagaacaattaggatctgtcatgaccagattgggagagccagcacctaacatatgtgggataggactgaattattaagcatgatattgtctgatgacccaaactgcccatgtcatttgtttccagaaacgaggaccaataattctctcacactggcatttgtgctggtagaacaagtcctttaatatgtccaggaagggagccattgcccagtggtccatatatcgtacggcatcccccgtttaagcccaaggtaggagtcccgtcctaaattatttagcctttaggagcctaaatttccttatttgcaaaatggagattaataaaacttaccttgcaggacctttgtga

SEQ ID NO: 91087 - DNA, 374 bp, Homo Sapiens
aagaatgtgtcctttaacctcagagccccaggccttggccagtccccccaaaacaattggggttcacatgacccctgtccctcaggaacttcctgggagaaggggagggcacctcccagcacctctagcccccactgaaaaaccagcctgggtggccctgagagggcagaccgaaagccttggcacctcctccccaaccatccctctgaaggagagctgggggaggggacggctcctcggctttggcctccaggacctggcactggataggtgccaaatgtttgctggctacatgaggcacttgttcctgcagaagggaaactgcacctgacaatgactgcttcctccacctaagtggggccttcttccctctc

SEQ ID NO: 91088 - DNA, 945 bp, Homo Sapiens
ggtccaaggtagcgaggcctgggtggcgaattcggcacgaggcattggaggtgaacaagcaaacccagagggctccactaggacttcaaattgggggttggatttgaagacttttaagtttccttccagcccagaaagtctctcattctaggcctcctggcccaggtgagtcctagagctacaggggttctggaaacattcaggagcttcctgtcctcccagctcctcactcaccttcagtaacccccactggactgacctggtccacagggcacctgccaccctgggcctggcagctcagcttccccaacacgcaggagcacacccagcccccacatcctgtgcctccatcagctaaacaccacgtcacttcatgcaggtgaaacccagtcactgtgagctcccaggtgcagccagaggcacctcaagaagaagaggggcataaactttcctcttcctgcctagaggccccacctttggtgctttccagaatcccgtaacacctgattaactgaggcatccacttctttcagcagactgatcaggacctccaagccactgagcaatgtataaccccaaagaaataatttttagaatctctttcgaagttttcctaaagtgtatggtttgggagttgtttgtactgagccaggtttgaaaaggccattgctgagtttgaggtggtgccaccagttttgcaggtggcatcagaggctggcatgctggcaggaacatcccctcttagccccagtcttctcttttctataatgagacccaccccagcttgcctccctccctggcttctctgaccctcaaaggagatgccacgcagggaaagactgggagagagaagcctggggcaatactggcccgcctggcctttggcccctggtgggggggccccaacacccttatcctttcttcccctttgggaaggcccccccc

SEQ ID NO: 91089 - DNA, 604 bp, Homo Sapiens
ttgcagagtgcattcactttggtgctagtttcttcataagaatcatttaaaaactcatatttataaaataatgtctttgccaaaactaaattgagaattctgtgcttcctgtcagttaatggtgacttgttttgacctattcataccaaaagatctaaatgttagaatctgctaaaagtagaaattataactagaaaaatatgaaaatgtaagcaactccctagtaatgaatatttgaagttgtgtgaacacctaacctctactcgtatctacaaattctggatcagggaaatatcttttttaggttgttttaaagtagtctaggacctaaacaaacatgcattatttcattaaatcttagcaagtatgaatcaacaggccagactttgcctccagtttttttctgtgcctactaagcagcttccttctttatgttaaccagatctcctattagtcactgggcaagtatttgtttaaaagtcttgagaagccagacctggtggtgtgtgtctgtagccctagcaactcaggaggcataggtgggaagatcaccctagcccaggagtttggggccagccttggcactgtagcaatacttcatatt

SEQ ID NO: 91090 - DNA, 562 bp, Homo Sapiens
tttaagtttaaaaattaagaacaaatactttgatagatttcttttataactcctgaatccatctagtagtttgcaagtcatgaactgacaatcttcgttcacctcaagtaattagatcttgtggtaccatttatatttcctttttataactatagataacaaattatataaagatgtgaacattcttcccttatcacctccccctctcccaccccaatcctaggagtatcctgagtgagcatgtatgccttcaaatcttttcatgtaccatgcacataaaatgtaactctaaagactcaatgtgtatattatacacataggtatgtgaatatatagcatgcatttatttaaattggttttgacaaaggtgagatccatactgctctgcaccttgctttgctcacttctcataggcatctttccatgtcagtacatacctacctcttctttttaatattcataacacattctataatgttatgtactataaccagtctctgaacatttaggttgttcccaatatttcattattacaaaaatactgcgatgcacatcagtgtat

SEQ ID NO: 91091 - DNA, 424 bp, Homo Sapiens
atttgaacagtgagaaacagcaaagatttgaaacagcaaagatttgaacctattgttcggaagtccatgctgttactcatttctttatgctgccataatctaatataaaattgaataacaataaatgcaccttatatttgtatagctatacacactaatttacatgatcttcataagaactatgaaatggctgtgattatccccatttttaaaatgatactataaaggcataaaatgctgtatttatggtatgcaaccctttggtgaacaaccctataaatatttaattacttatattgatgttcttcctacgtctaagaaaaatgttatttccattcccaagatgttagtagagacgaagatttttcaatttgtctccttgattttgttggattatagcattaaagttatttttacaaagcca

SEQ ID NO: 91092 - DNA, 1057 bp, Homo Sapiens
ggtaattagagcaattgacagctcaaacctgaaagacgattacagcactgcacagagagtaacatacaaatactacgttggacgcaaggctatgtttgacagcgattttaagcaagctgaggagtacctgtcatttgcctttgagcattgtcaccgttctagtcagaagaacaaaaggatgattctgatctatttgcttccagtaaaaatgctattgggtcacatgcccactgtggagctcctgaaaaagtatcacctgatgcagtttgcggaagtaaccagagctgtgagcgagggcaacctgctgctgctgcacgaggcgctggcgaagcacgaggccttcttcattcgctgcggaatcttcctcatcctggagaagctgaagatcatcacctacaggaacctctttaagaaagtgtatttgttactgaaaacacaccagctgtctctggatgcttttctggttgccttgaagttcatgcaggtggaggacgtggacattgacgaagttcagtgtattctggctaacttgatatacatgggacacgtcaaaggctacatatcgcatcagcatcagaagctggtggtcagcaagcagaacccatttcctcccctgtccacggtgtgttgaaagtacacggagccccgaggacggcctgatgaaaacctggaattcctttttcacagactcggctggttctggagtctttgtgagacttctttgaaggaggctttgcgtgaaggctgctcggctcacttttcctaagtgtggttcctgaaggctgtctttgtaactttttgtagttctttgtgtaaaaagcgtattctgaatttatacacatggcatgttcttcattatatcttccaggatacatctatttttatatattaaatttgaatgtgttatcaaaatgcttggttaacttaaggcacctttttaaaagcagaatttaatttgatttaaattttccagattttatagcttgcctgtatggatgctcctcaatttatgatggggttacatcccaataaaaattattttatttgcctttgaaaa

SEQ ID NO: 91093 - DNA, 1834 bp, Homo Sapiens
tgaggcgtagggggtggcgctctccgttcggcggcgctcccatggcgcacattaccattaaccagtacctgcagcaggtgtacgaagccatcgacagcagagatggagcatcttgtgcagagttggtgtcttttaaacatcctcatgttgcaaacccacgacttcaaatggcctctccagaggagaagtgtcaacaagtcttggaacccccttatgatgaaatgtttgcagctcatttaaggtgcacttatgcagtggggaatcatgacttcatagaggcatacaagtgccagaccgtgatagtccaatcattcttgcgagcattccaggcccacaaagaagaaaactgggctctgcctgtcatgtatgcagtagcgcttgaccttcgagtgtttgccaataatgcagatcaacagttggtaaagaaaggaaaaagcaaagttggggacatgttggaaaaagcagcagagttactgatgagctgtttccgggtctgtgccagcgacacccgtgctggtatagaggactctaagaagtggggcatgctgtttctggtgaaccagctgtttaaaatctacttcaagatcaacaaactccatttatgtaaacccctaattagagcaattgacagctcaaacctgaaagacgattacagcactgcacagagagtaacatacaaatactacgttggacgcaaggctatgtttgacagcgattttaagcaagctgaggagtacctgtcatttgcctttgagcattgtcaccgttctagtcagaagaaccaaaaggatgattctgatctatttgcttccagtaaaaatgctattgggtcacatgcccactgtggagctcctgaaaaagtatcacctgatgcagtttgcggaagtaaccagagctgtgagcgagggcaacctgctgctgctgcacgaggcgctggcgaagcacgaggccttcttcattcgctgcggaatcttcctcatcctggagaagctgaagatcatcacctacaggaacctctttaagaaagtgtatttgttactgaaaacacaccagctgtctctggatgcttttctggttgccttgaagttcatgcaggtggaggacgtggacattgacgaagttcagtgtattctggctaacttgatatacatgggacacgtcaaaggctacatatcgcatcagcatcagaagctggtggtcagcaagcagaacccatttcctcccctgtccacggtgtgttgaaagtacacggagccccgaggacgggtggagcagttgtttgctttccactttggttgtgctgatgagaccggtccggtactgcaacaaggctccctgaagccggaactcttggaggcgcttttcccagggatgctgaggctgagattttcagcacacccgagttaatctccttcatttgtaactaatttcagcctgatgaaaacctggaattcctttttcacagactcggctggttctggagtctttgtgagacttctttgaaggaggctttgcgtgaaggctgctcggctcacttttcctaagtgtggttcctgaaggctgtctttgtaactttttgtagttctttgtgtaaaaagcgtattctgaatttatacacatggcatgttcttcattatatcttccaggatacatctatttttatatattaaatttgaatgtgttatcaaaatgcttggttaacttaaggcacctttttaaaagcagaatttaatttgatttaaattttccagattttatagcttgcctgtatggatgctcctcaatttatgatggggttacatcccaataaacttattttatttgcctttgaaaa

SEQ ID NO: 91094 - DNA, 487 bp, Homo Sapiens
tgagttcaggctgcactgcagagcgttccttgagccacccatgccctcaccattgggcgagagtggggaggttaagaatggatgttttatcctaactgagcagaaggcaggcgggcagggctctccttccctaaagaaaggagggggaacatttcccctggtgagcccagtcccacttctcctagggaaggaccccacgctcggggccccactcctgctggatgtccaggcggccttgggaggcccagccctgggcctgcctggggctttaaccatttatagcactcctgagagccggactgcctcctacttgggcccggaagccagtccctccccctaagaccccgcgcctctgaaggggcttggaaccagtccgccgctgcacatccttcttggcttcctggcgccccctatcgggggtgagcgaagcccccactactaaatggcctctctccactaccccgactatccctgcacataaactccg

SEQ ID NO: 91095 - DNA, 411 bp, Homo Sapiens
aacccttcatacctactgttaatcattgttttttcctggaataaatttttaaaatatattcaggtaaactatattcatgcataagatgactgtggtgagtatttagtgtaaaagacatttttcttttgaaactgcagtattttggataaattacatgtgaacctcaagtcgcctgtgacccaagtgagattgttagtgttctgaatactagtatcatttttagcctttgtgtatctttttatatgaagtgtctacttctcaagctgattataggatgaatgtgcttaaggttgtgtgcatcagtatgcttaacaaatatcattttagtctctggaagaaagcttgctaaatgtaaaggtgaatctcaagtatataaatttttgcattatagtgtatttaaaaatatatgcc

SEQ ID NO: 91096 - DNA, 440 bp, Homo Sapiens
tttgctgtcaggaagacgtccttatattggatgtaagtgtctgtggacccttcaagggatgcatctttaaacccagagctggaggtgtagacgtgtcacttagaaaggacagaagccattaggatgaacagacctccagggagaggattgggggctgcagaggcttctcctcggtgtctcattgggaattctgaagatgaaagaattctccagaaagtgggtggctctttctggaccctctgcagagagctctctgagccaaatgttattccttatttggaagcactttttgattgttttcaccaccctcagggatcagagaaatgaaatgaatttgtccaaggtcacattacttattaaaaatttactttgggcttcgctccaaacactgggctctggcttgtcaaggcaaagacagtctagctgatgaagaagagcct

SEQ ID NO: 91097 - DNA, 426 bp, Homo Sapiens
atgttacactcacccagagttgctgtgccagtcagaggcagagctgggccagtgggcagtattcctccctaatagtgaagggcgtcaggtcaacattttagcaccttttgagagtagtaattggattactcaggccaccaacagggatgaatttcaaactgatgaaactttgatacaatatgaggggtcttttaccttcctacttactcagtaaaggaccaaactcttacccaggatctactggagcagctgttggagcccatgacgcctgtcgggatgcaaaagagaagcgctctaaaagccaagatgcagattcacctggaagttctggggcccctgaaaacttgacattcaaggaacgccagcgtcttttttcacaaggtcaagatgtatccaataaagtgaaagcttctcgtaaattaaaaa

SEQ ID NO: 91098 - DNA, 524 bp, Homo Sapiens
gccagaaatcttctcaatcttctcccttccctatcctgaaaaattctctaagaggccagataggagtgcaatggtgaaaagaaaaaatgccatagtactttcataaatgtgggggctgctgcagaaaaaccaagtaagggaaagtgttgctttgcacctgtcatacacatttgatacagatgcatatattatgcattttaaaaactggcatctaattatcaaattaattcccagaaaactcatggaaaatgcttttactaaaataactcatttacagtctgtgctataaaataaaggtaaccactaaagcagcaaaaatctggaacctggtagtcatccttggcactaaatgaattccattctgtatctgataataaacctgcttaaagaatttcatcatgagaaaaagttctcagagaaaatggaaggtctcttgggaagtaaaattaaatacaattttgttcatctaattcaaaacagtaaaagtttgctccaaccctgttacttgagaagaatttgtgaag

SEQ ID NO: 91099 - DNA, 509 bp, Homo Sapiens
agaagaaataaatttgatggtatgtcaaccccgattgtttggtgaagccgcctgcagtactgtttcaagcaccattccaaagttacatccaagctcagtgggaaagcatgctgataactgatgtctgcaatggaagccagagagtcgaagctgatgagccacttaccaccagccacgctgggggacagtgattatcaaaccttctaaactgatccatagaaagaaaaacatttaacattgtggtctagtgaccatagacaaagataactctacaagtacatgtgtatacacatgtacataatgtaaaattaaaacaagcttcacaaaccatatttattacctttactgaatatgataaaccccccctccagaagtcaggctagaaaagcttgtggaacccttctcggaatatttttaaacagataaagtacatcagattacaaaagaaaccaattataataaaatccagttatcaaatattaaataaatttgtgtttcagtaacataaa

SEQ ID NO: 91100 - DNA, 540 bp, Homo Sapiens
  misc_feature (192)..(208): n is a, c, g, or t
  misc_feature (233)..(283): n is a, c, g, or t
aaagaagttataggttcacagaaatattaagaggagttgacagagattttccgtatctcccttgcttccacacatgcataacctccctcattatcaacatcctccaccggagtggtacatttgttacaattgatgaacctacattgacacatgataataacccaaagcccatagtttacattacggtacacnnnnnnnnnnnnnnnnnctgagacagagtctcactgtgtcannnnnnnnnnnnnnnnnnnnnnnnnnnnnnnnnnnnnnnnnnnnnnnnnnntgaggcatgagctgtcacacctggtcccaacattacagttcactcttatggtggacattctatgggtttggacagataaataatggcttgtgttaattgtagtatcatacaggaatcgttcagcatatagtcttttggtattggcttcttttgcttagtcatatgcatttaaagttaacctgtgtcttttcatgacttaatggcttatttctttttagcactgaataatattccattgcctcaatatcccacagttc

SEQ ID NO: 91101 - DNA, 544 bp, Homo Sapiens
gcctgagaagagaaggtggtcaagcctgggcgagtggacactgggccctactcctgcctgtcaggctgtgcccagggatgggcactaagggagggctgagtgggaagcccttggccactgctgagttcctcgagtcctgcaggatccagggccggcctttcagaacctctcttccctctagggagcccttctgcctgccccggaatctgggctgggctaatacccagcctgacaggtacccagagcctcagaggcctgagtcccacctctcaggaaagcaagtcccgttgcccccaccaccctccacatcactctctcctgcatctattaaattagccaggctattgacgggcaccctggaagtcctggagctggaggctaccctaggatagctctcccagtgggtcctgatgtgggagaaagagcacagaagaggagcctagcaggggagggagcactggactggctctagccccctgtggttgtgggaggctgggtgggtcagtggttaggagcagggaccaccagggtagtccaggttagg

SEQ ID NO: 91102 - DNA, 357 bp, Homo Sapiens
ctgaaaaaatcatacaactttgtgcttctattgcttttttgtgttttgttaagcatgtcccttggcccaaatggaagaggaaatgtttaattaatgctttttagtttaaataaattgaatcatttataataatcagtgttaacaatttagtgacccttggtaggttaaaggttgcattatttatacttgagatttttttcccctaactattctgttttttgtactttaaaactatgggggaaatatcactggtctgtcaagaaacagcagtaattattactgagttaaattgaaaagtccagtggaccaggcatttcttatataaataaaattggtggtactaatgtgtatccagag

SEQ ID NO: 91103 - DNA, 496 bp, Homo Sapiens
cacccgtgtatttcggagattacacttttagataagaatatccaccagtccgtgagtgagcagatcaagaagaactttgccaagagcaagtggaagcaagccttcaatgccacggctgtggtgcggcacatgagggaaactgcagctgggcaccagccaggaggggcaggggcagacggcgagccatggggagctgctgacaccagtggctggggggccggcagctggctgttgctgtcgagactgctgcgtggagccgggcacagaactgtcccccacactgccccaccagctctagggccctggacctcgggtcatgatcctctgcgtgggagggcttgggggcagcctgctccccttccctccctgaaccgggagtttctctgccctgtcccctcctcacctgcttccctaccactcctcactgcattttccatacaaatgtttctattttattgttccttcttgtaataaagggaagataaaaccaaaaaaa

SEQ ID NO: 91104 - DNA, 205 bp, Homo Sapiens
ctgttaaaaggggagattctcaagcttccaggtgctaccatatggagcctaaggataaagccaataccaaagaaaacagtgactaaacagagagaaactaggtccttggtgacatcttttgagccactagaccaagctttacctgaagcagagctacctcagaacttttcagctatgtgagccaataaacatctgtcaaacgaaa

SEQ ID NO: 91105 - DNA, 430 bp, Homo Sapiens
  misc_feature (193)..(242): n is a, c, g, or t
ttttttaatgtgaatcaaagtggttgttttgtatacagtgttttacagtagctcttgagtagatttccacttcttttcttctatagatttgctacaaaattttagcttcgtcatccaatgagacaatgtagtttttgttgtttgttttggtagcaggagaaagcaaggaaaggggaaagagtaccaccgtctnnnnnnnnnnnnnnnnnnnnnnnnnnnnnnnnnnnnnnnnnnnnnnnnnnagagggagtctgaaactcctctattacccttgtccctgaaaggcacagaaaggtcaggatatccatggttgtagcagaacaggtacattccagaaaggagctgtatatttcattgacccattcttaattcctttaaaaatacttttcaccagtttcactggagagtgggggagtaaaacttctcatct

SEQ ID NO: 91106 - DNA, 488 bp, Homo Sapiens
tatatcatggtcccatataatgaatatcattacaccttgaatattcaccaacaccatttttacttcatagactcaataaatagactcaaataataggacatttaacccctcaggtcacattaagtataaaaatcctggcaacaaaaacaccaagaaatactggttgaaacatgtttataaaaactctcaaaatataaaagcgaatgcttatacactgttgatgggaatgtaaattagtacaacctctatggaaaacagtatggagatttctcaaagaactaaaagtagaattaccatttgatgcacgaatcccactactgagtacccaaaggaaaataaatcattatattgaaaagacacccacacttgtatgttaccacagtaaagttcacaataacaacgtcatggaatcgatctaagtgtctatcaagagatgactggataaagaaaatgtggtatataaacaccatggaatatattgcagccat

SEQ ID NO: 91107 - DNA, 463 bp, Homo Sapiens
gcctaattaatatacttacttacacagacttgtcccatcttgatgtaagtttgttatgtttttataatgcctataaattaatctaacatccagaaagacctgccttcttaggttaatgcagacattcaaaaggagaatttgataagcagaattaaatgtctgttattcataaatgttagaaattggtttaaaaataataacatgcaactgggtgggcacagctttggatttctcatccacgtctgttcccttctttaaatatgattagaattttcgtaagccaaaactaaaggtcttcaaacatatcttgcaatacatagctttgcatcttccacacaacttccacgtcttcttttattctgtattttacaaaaaactcatataatggttttttcttttgaatgtatcagaatatgcatcaaatttgtcatatcagaatctataaattggccctgtgtctccc

SEQ ID NO: 91108 - DNA, 556 bp, Homo Sapiens
  misc_feature (164)..(164): n is a, c, g, or t
  misc_feature (192)..(192): n is a, c, g, or t
  misc_feature (225)..(225): n is a, c, g, or t
ctctgtcttcccaaggattttgagttcattttgtccttgacttttttctccccagtgtgcgtgcttgctctttagtcctcttctttctaatttggctatttttccatctctatctgtttatgacatagaatgtctccccagtatctcatctgttttgcttctcntttgagctcaaaatgtaatcttgagaantataccttggttctagcaaagagaaaacataangttttggtataaaattaggcataataagcattatcaacctcccagactctttgaaaatttctggaagttcctcctcaaatcttcccaatgttggccagcctctttctcagagccttttatacatcatttaaaattttttagttattagtattgtgacaatcttgatttgttttccattgcaacatatttagtatttaagccacgttataagtttagtttgtttatggatagctggcctgtggccctcatcatttgtaaaattgtttccaagagacagaacaaatgatttgtaaagcccttttttgataataaataaaatagattggtaaaa

SEQ ID NO: 91109 - DNA, 461 bp, Homo Sapiens
gcatggaatccctccctcaggcctctctggacggtgttggtgggggatcaagatgaacacactgcagacgagaacaagagccccacaggaactctttgtcccacaggagaccagcggacccacgccagagaagatgcttgtatcttttcacggctcttctctgagaaatgaagccacaccacaatacggtctggaagaggaagccgggaatgggagatggcaacagtccctgtcactggaatgctggcctctctggacaagccacccttttggaaccccatcccttatgaccctggcagtggaacggtgatttatcctgcctggccgccggcgtttgccctgtcctccctcctgctctgcctcacctgtttctcaagtgcctcaatgcctctcgctgacgcccaatgtcttcaacaaagatgacttcccagtccgtcagggagacattttttcgaaaaaaa

SEQ ID NO: 91110 - DNA, 143 bp, Homo Sapiens
aattttctctttgcctgcttgttgttctttaattttctttgtaatcagagttaagctgtcgtcagtttaaaataattgcttagaagattcctccgcaagtctcatggaagccatgaagcaaaattctgtagcagatacacaaa

SEQ ID NO: 91111 - DNA, 319 bp, Homo Sapiens
tttaggggagtgtagccattaggcactgtttttattatgcaataatttatccatgaacagtttatatttcatatccatattacagtgttttttttccaagtcactgggagtactcaagcagagctgatgaaaattcatcaatctgggaagttccagaagggattttgcagtgagtagaaagttgaaatcttggatgataacgtcccttccaatttgaagattctataatttccaacttaggcaactgacataagggtgagtatcctcatggacttgattccgtagtgatggtggaaagcagtggtggactatcgtgagc

SEQ ID NO: 91112 - DNA, 477 bp, Homo Sapiens
tattgttgacccttgttgaagagaactctacttggcttctttcctggctttcctaaattgttcacatacaagataaactaccgtcattcagacttacagaagtgagaagacaagctgaaccaaatgtaaaatggtagcaatttacagatgtcagaactaacatgtggatgaacttagagatggagaagaaagctgggcttttccaaagagtggatctatctgaactggatagcactattgaactttgttgcatattttgtggtagctctaaaactcctctgcttgcttacatacaaccagacaccagtgccttctgaagctaatccaggccatttttataacctaatgcagtagcactttgcaattagatgaagaagatcggtgggatttctttctgtggtgattaaaatgtgtcaggggaagaaatcaagacaatactccaagtgaaaaatataaagtcagttatttctttaaaaa

SEQ ID NO: 91113 - DNA, 426 bp, Homo Sapiens
ggggaaatgtaattctgataacacgcaaagtaaattgtgcattaaaagtatgggaattcttggtagcttaaagcttcaggggttaacttcagtgtatgaacacctagtgtgttagaattgcagtgcatagttgtttaaatacaatattccttgtaagtgacaaccaaaatatgttgtggctggtgccagtatttttgttaatgaaatgttcagtgtctcactacagtctgatcagaactcttggtgttataagccaggcctaaagccattttatagctattggcctaattgtgtaactttttctttcaaaatgttttattataatacttctgtcatttctttcacttaatatgtcaattgtcataataaaaatttaaatttggaaacctccgccgaactttacaatatttccttggtcggcccgcc

SEQ ID NO: 91114 - DNA, 471 bp, Homo Sapiens
ttgagggggtctgaccaggaggccacctacagcagaaagtgaggctgccatgtttccttgagacacagctgcctctccccagctctgtccctgtagtcacctgccggtgggcgaggatcctctccctgggataagcactcccagccccgtttatcagaaacacaggcaaggaaattggaactgccacccagcccagcatggtggctcaattggttggttgcgttgtcagttgtctcttcgttttgttaaggtttttaataagtacgtttggcataatgtcttttaatgggtttgtaatatttgtaacggttttagcagcctataacttttcagctggtgcttttacttagggaaaaaaacaatttgtaaatacagaacattgtttaaaagacataaccatagaacatagcttcctgtttgtggattttgtttcctatatattcaaagtaaaatgacttacaggagccaaaa

SEQ ID NO: 91115 - DNA, 383 bp, Homo Sapiens
aacttgatgtttcaaaattgacttgctggagagagaacaccatttcatctttctgcaatcgctctcctccccatcctcgtgtatctaccttcttccacctttccctgccctcccctctaccccaaccctgccagctgccagcctccttgctccagttctcccatacgctggaccagtctgtgctgatgagcttgcaaggtcactgcctggggaggtagaggagggggaggagaccctcctgttgtgttcacgtcagcagagatgtcatatcgctctctggttcctgtggttttactgtgagatcctctgggtggagctgatggtgatgtgggacttcagcagatagatatgcattttgagctggatgctagaaatgaatatat

SEQ ID NO: 91116 - DNA, 328 bp, Homo Sapiens
ccttagactgacagtaaggctggacttcagagtaatcacgttgagctttacttcatcatgctcagtaaacacagctcatcacaaatccagcccaggtctttcccaatgtctttcccatcaactagtaaaaatacgtaaaaaaataaattcctgcagatagtgtatctctacccataaggacagtccctggcctggaagaataaatgataagagttttatgtgacaatggatataaaacaacagtaacaacaacagtgtcattcaaagcacacagaattaaggggaattatgaagaaaaagacacacacagcaatctacatgaaggaaa

SEQ ID NO: 91117 - DNA, 626 bp, Homo Sapiens
gcggccgcggctcctccccgccccgcgcgccccgattggcctggccgcgcgccagggccgagcctgcagcgcctccggttataagttgaagaaataagaccagtttccaaataaatgacaaagagcttggtattcctgcaggcatcagaatcacctggaggaggagatgctgctgctggtggtggcccagagaccacacattgagaaccactgctctagaaaaccatttgtctttgctgatggagaaacctggctctaatagaagggcttgtatgtgtccaggaagtctagtgaattcgaccatgaatccagacatggccagtggctaaatcctgtgggaagacactgtgcttctctctgacccatgaacactctgctagtcaagctctctgtcacaaagacaacttgaagagacagagtggacctcacagaagataccatcgtcactcttaccaatgcaactgtggtgaacaggaccactattattccttagatcaaaaggacagcacattcaacagcatcctcatggcatgccagcaatttgcataggatgttcacaattaaactttgattatctagtgctttgtggatgtattatgtattacagaaatctatttgcaaaaaaa

SEQ ID NO: 91118 - DNA, 1062 bp, Homo Sapiens
  misc_feature (893)..(893): n is a, c, g, or t
ctggaccggtccggaattcccgggatatcgtcgacccacgcgtccgaaaggaagtattttgagtattttcatctgtttgtattgtttcgactatgatatcagatatccagtgtgtccattctggcagtggttttgagttacttcatggaacttggacatacaccaccaggtcctttatgtgttgttctcctgggagacttctttttttaaatgccagggctacttctgctttacctcagtggtatcagcacattgtaaattacgttaaaacacacaactcactgtgatctatgggagtgatatcaaatacaaacgatgttgtgttccttctctcgaacaaaacagcaaagggaatgccagctaacttctttgattagaaggtaatgtcatggaatagaatgctgtcaccagaaaatgctctcccactgctagataaatgcagaggcaaagtgtagacatctgtaggaactaaatatcaaggaaatcaagacatttattttcaaagcgagaattctatctacattctattctgcggatgttatttctgttatacatctgaattttaaaatgtttactgatagataatggatttaaagggcggctaattgattgtctgccattgttgataaactgttctaattggtttgtgaaagaactctgagaattagctaaatggaggctagtgtatttatttttagaggtacatgttttaagtaaatgtatttaaaacaaattttcatggtctgaattgtatatgtaaatgcatatctgtgtaagtatatgcaagtgtatattcttctactgattcagtcagacacgaaatccaactgaaatacccggtagactgaatatctgacgggatttctatatggacatagcacagatgaacccanaatgtatttatattcacctgaggttttatgtttttttaaacaaagttttctcctgcaatgcttttctatatgaaatagttgagtcaagcttggggcttttttccttccttggtccccaggcctgggaaagggataggggaatttattccaaacccccttggaaacgttt

SEQ ID NO: 91119 - DNA, 775 bp, Homo Sapiens
ggaaggggaaaggatttaacatttagaataaaccccaccatttatgtaatggaaatagtttaaaaattgctaactgccatgtggattgcaaattaaatggaaacttatttagataacgtaaggctcaatatctgcgttgaccacctagatattacaggttttaatatttaaaactatttttgaattatccacaacctgtatagtgatagccatatatttaataatggaatggtggttaacagtctatttactgcacaattaattgttcactaatcaaatagaatgtggtaatttttcagactttatgatctgtttccaaaattggcacaaagtgctagggtttatatacacttatcgtaactgtatttttgtgccttggttttatcatgtcaatgcactgtactctgtaaaagttttgcagacaaaaatagaaagtatgataatccgtcagaagtatgatgtaaaactggaatcctctgtatttttttaaatgttctaaaaattttatcgctgttaaggtattaatcattcagtattactaatggaatagaaattcatacttttgtatggacaacaattcaaattgatattgcatttatagcactgtaagaaactttcatcttgagcaactttgtagatgatgggtgttttattttcaatcgccatatttgatcagtcattgaaaattggccccagtgctgttggttcatctcctgaatggaaaaaactgacaggggagaaccaactttctgaaactgtggaggggggtcccagg

SEQ ID NO: 91120 - DNA, 505 bp, Homo Sapiens
tttggaaggggaggggttaaaggtctttatttctatttcatgagtttttcccagttccagttcatttatccaagttgtttttacattaccatcaatgtcatcaattttactttcttcaatatgcagaattccattcaactttgtatctatgcaatcctcagctttcacttctctggctgaatctacttcttttatagttctaatttcaaaaaggtctttagctaaaatgcaatctgaattgttagccaatctatttcctctatcagtttcagctaggtcatttttttcttcatctgtatcttcaggatcgtaaagttcaggtgtaaaatagatagattcatcttctgcttctgtttcaaaatctctatttgaagtggactgtttatcttcttcacttactagagacaattcaatgtctggatccagggcttcttcagaacagagcggatgttcagaatgattttttctagtaagggtggcatcaatctttaatgatgaaataatg

SEQ ID NO: 91121 - DNA, 404 bp, Homo Sapiens
  misc_feature (128)..(128): n is a, c, g, or t
ttaacgtatatgttcaatagacattgtctaaagtgctaaatctacaaaaagagtgttggggtgttttatggactgaaatgcttgtgcctcctccctctctcaaatttgtatgttgaagccctaacttnccagtgtggccgtatttaaaacaggaagtaattgaggttaaatgaggtcataagggtcaggcactgatctgataggagcagtgtccttagagacaccaaatatttttctataccctcacaatctccttccatgtgtgaacctggcaagagagccactgttttcaagccaggaagagatcctcccctataccagaaatcacctatgctggcaccttgatgtacttccagtctccggaactgtgagagaaagtaaatttctgttgtttaagtcaaaaa

SEQ ID NO: 91122 - DNA, 400 bp, Homo Sapiens
  misc_feature (146)..(146): n is a, c, g, or t
  misc_feature (192)..(192): n is a, c, g, or t
gggtcactcccggctgatatcttcttttgcatcatctccacatcttacctacctactggttggatgatcctaagctaattacctcactcctctaaactgcagctgtcacataagcaggtaaaaaaactttgaaaggccttacaaanagcccatcaagctctacagtaatgctgtccaaggcagtcacaacanggccacatgtggctatagagcacatgagatggggccagttggaattgagatgcaaaatacacaccggactttgaaaacttagtttgaaataatgtaaaataagtaagaatgtaaaatacctcattaataattttcatagtaattatacatggaaattataatatttttggtacattggataaataaaatatattatcaaaatcaaaaa

SEQ ID NO: 91123 - DNA, 491 bp, Homo Sapiens
  misc_feature (223)..(223): n is a, c, g, or t
  misc_feature (288)..(288): n is a, c, g, or t
  misc_feature (300)..(301): n is a, c, g, or t
tttaaacgcaggcagaggaaaatatttatttcaaaaaacagcagaaaatatggatgcacataacagtggagttacatcattaatgtgttgaaagaaacgagctgacaacctagaattccatactcagaaaaaatattttttaagaataaaaattaaatacaaatattttcagacaaacacaactgagatgatcagcagacctcctctaaaggaaataatagtnaggggtaccttcaggtggaaggggaaatgaccctatgaaagtcacagaaggataaaacacaatgnatagtggcatanntattgtgggcgcatcaaaatgaacatcaacagtactgtgtcttgtgaagttttaaatacagaaataactaaaatatccaataaactgttttagcattgtctgggaagaggaaaaaatactaatttacattagacattgataagtcaagaacgcatgttataatctcaagtgtaccactaaaagctattta

SEQ ID NO: 91124 - DNA, 308 bp, Homo Sapiens
tttcgttaactctaccgttacagatttattgagcattaacttcacatcctgtattgagccagaagctgaagatttgtaaaataatcgtcatggtccccacactcatggtgattatggtctggtgaggaaagcagacagaaatcagatgatcatacaggcaaagataatattagctctgtttaagttctgtaatagaaagttatatggtgctaaagagcagagagagaagtgtgctagagaaaattattaacagacctgatcaaagaagtcttcggggggaagttcacaaggaaaaggaaggaaaaaaa

SEQ ID NO: 91125 - DNA, 708 bp, Homo Sapiens
aaaaaaagtgccagcgtatgaggtaattagattggttctctccagaggtaacctgccaagaagagatgctatagatgttactcctatactgtaaaacattgtgaaatcagattactttaaaatgatgtattacaaagttatgcaaaaaagcagttgtgactatggaagcccaaggcttatatcccagctctgtcttacactaaatatgggtacagtgtttccactctgtccataaaatgggagctaatattctccaacctgtgtgcctgacatgatggttaaagggattaaacaaaacaatagtttgtaatttattctgtcagagcaaactgctggtaaataaaagggactaagttgacgaaaaataaattttaaaaaacctaataaaacaagtttgtaatttataattgtatacaaataaaagatgttacaaaaattgcgcacttatatgtatgtaccatgacataactaattcgttgaacaagttgtgagacaatcctttctgagaaaaggtagacctgttacatcgtctgtgggttagggtcatgtcagcacgtaccaggtacattctagcttttgtagagaaagtaaaatctagtgttgagtatgtaggcactgagccaggtggcctgcttaacataaaaggactgatttcagggtggctgtgggagcctttctaatgctctaattctctagccccttgcctga

SEQ ID NO: 91126 - DNA, 1082 bp, Homo Sapiens
  misc_feature (79)..(113): n is a, c, g, or t
  misc_feature (400)..(415): n is a, c, g, or t
cacttgatagactcatataggggctcagccgttgagcgaacgacgagcgcagcgagttagtgagcgaggaagcggccgnnnnnnnnnnnnnnnnnnnnnnnnnnnnnnnnnnncagtcgacggtaccggacatatgcccgggaattcggccattacggccgggtattcagcactggaatctttaatgggtagagagagaaaacaattaaaacatatacaaactaaaataagaaaacagtctaatatttgattcatattcccaaaaactttccattccctccaattacataaatacgtaaagtaatgaaagtgtccttttcctcttcattataagcaatatagcaagtctcaagagtggagactatttagaacattaatctcacttcagccatcaaccttnnnnnnnnnnnnnnnnccagattcaactttattaacttgtgtcacaagctaagtgggattcacctaatgcatcccagtggtcttgcaacagtgaaccaggatgtgttctggccttttaataaaaggagtgcaccctgcctttttccttgtatatgtatgggaattctacctctaaatctgtagaacattcataattgttgtgaggaagtatgaatcataatagaaatgttgcgactagatataaaaatctgcagagtatagagaatggaagataaaatttctattcagaagagttcccaactccaaattgtaaggatacaggaagctagtaaaagcagaaggcaattaagacaggcgattcacaaagtgtcgaagacaaacacaggtcaagtacattcaaaccagaatgctcacaagtgtgcactaccgacaattaggcagcgtgtacacatgtgacactatcacgcaacagctgaactaacacatctccaacacacgactaccggccacacggagtaaactaccccggcaacgcaaggcggagcacaacagcggcacagaagaccacgccaccagggcaacacaccacacaacataacccagccgaacgagcacaacgtacccagcgagcagcgggacaagcaaacgacgccacacaacacagaacagcagacacaacaaac

SEQ ID NO: 91127 - DNA, 540 bp, Homo Sapiens
ggatttctggcagcacagaactgctttttattttggggtctgtgagtttcttaggtattagcaatcttgcttataaaataagaacaccttttaattaatgagtgggtcattcctggtgcaattgtgatttttctttagccagaatgaatggcaaactctatttagagcaaagtaagtattagaaaaccctaggaactcttaatcaacgtttattacactttcattaaggcaaactacgtgaaagagccttggggaagttggcccatatcttactaagttgatcagatttctcgttgggctggaaatgtttcgctgttgtatattttaaagtaaattgcacctttgtaacatattgtattgacgaatgatcactaagattagctatatctatacagtcattagtttgacaagaaatagaatcctgtcagatgccaaagagtgggatttttatgtttaatgattaaacaccattatttattgacaatttaccctgtggaactgtattatttctaactatgaaataaaggggtgatgtaaaaa

SEQ ID NO: 91128 - DNA, 376 bp, Homo Sapiens
ataagatgcgcgggtcgttttaaatggaatcggaagccgggcctaggcccccccaaacgcgcgggtcagctggaacagctttcgctcctgaagaaaaccgggctcggaaaagcggcgcgtgtggggcctgcctccgcagtctgcccgcccggctcgggggagatggcccgcggccccgatcaccctccccagcctgcagcgggcctttcaacggcgacagggccccgagaagggagagagcgaggagtcctgagccgggggccaggagctggcttgtcggctcaggtgtcggtgaaaatgtgatcaggaaaaaaatgttttcgcttctctttggttaaaaagtaagaacaaagggagcttccttctaaacaataaa

SEQ ID NO: 91129 - DNA, 431 bp, Homo Sapiens
  misc_feature (53)..(53): n is a, c, g, or t
  misc_feature (61)..(61): n is a, c, g, or t
ggaaaagacaaaatggagcccaaactacctggggttcaaatccctgactccanccacacgntacggttaccaatgatcctgatctgcccaaggctgaggagtttccccaggatatgggactttccactgctaaaaccaaggatagtcccatgcaaagcagcatggctgatcaccccatcttgctgccatgagactacccaccatcctcgaggatgatagatcccaaggagagagtgacccagtcaacatccagccccatcagcatgtgacttatccagccccagtccagtcaccagataatagcaaatgcatgagttaattcaggtgagaccatcagaacgatctagctgaacttgtctcaaattgctgtcctctgttggagtttttctgcacataaaaaataaaattgctgtcctacataactgtaaaaa

SEQ ID NO: 91130 - DNA, 419 bp, Homo Sapiens
atgtgggtaatagaggtttgaaatgtatacagccagaggctggactctaggaaattcttccaaatcttgtagcttatacatgaaataaagttgacagagcttttccccattttaaaatatatcaaaaatttacacagcattataaataatgagtcgtgatgcagaagtaaagtttttctaatattaataatagcaaaaaaatcacttatgataggaaggctaaattattttttataaaaaatgatattgtataattcatgttatttgaagtgacaatgaaaaggtctgaagacaaaagacagtagtatagcagtgtgttatgcatttaatttatagttttttagattttgtgatgcttgtggtattgtgattccttttctctttctaaataaacgtttacttatatacttacttttaaa

SEQ ID NO: 91131 - DNA, 422 bp, Homo Sapiens
ccatattggaaggagggtctgcgatggcaagggtcttctatatcaccagaaagagtcgcgcagtaagtcactgcccgttgccatctggctgtaattttctatgttatcaaggtaggagggagtgtttctcttctagctgttagatagaactgataaaagcaagtgtcctacagcatttcccaaatgaaggcattaggaaatagaaaagcacggtctttttggctccctggtctagtcacattggtactagggtgacctttcacccaagggacagctgctaaagggagtaattcagagacatggagcttctggttatgggtttgttttgggtttgtttttaactcctgcctccacacatgttcttgactgataactgactcatgtccctgaattaaaatgactgacctatgacagcatcaaaa

SEQ ID NO: 91132 - DNA, 1028 bp, Homo Sapiens
  misc_feature (70)..(170): n is a, c, g, or t
agcatcgagagagaacactatttagtgacagaggcagagattagattggtgagctgtaagccaaaggatnnnnnnnnnnnnnnnnnnnnnnnnnnnnnnnnnnnnnnnnnnnnnnnnnnnnnnnnnnnnnnnnnnnnnnnnnnnnnnnnnnnnnnnnnnnnnnnnnnnnnacttccaggatccagaatgattaatctcaaagatattggtgaaatctataaaatacgtattggacatgacaacactggaaagaatcccaggtggtatctggaagaagttagacttgaaaatatagccacatatgagctattttgtttacctgttgattcctggatagctgagaatgaaaatgatggcgatctatggaaggaaatacccatcatgggaccaaagaaagcacctttgccaggattgctggaatgttttcaaaagaaaagtgttttgagactactagtctataagtcatcattctttgggggctgagctacattgctggtgggattatagtgatctcctcccagaggccagcactgccaaatgcagcttgtttcatgcctttctctgatttattcaccatccgcggtgttggttgggagcagcccggaggagatgccgattgcccttggcttgttgtcctgaagagtctttagttaacggcctggcagtgatgcttagggctgataagaatgctgactcagctcgaggcggccttgccacatattctggctccaggctctctccaggagagatggatgataaaagaaggtgaggttcgaggccacatctatgggtgaagaaatgtttgatgccagactttggcaagtggtcagaagggctttacttcaaatcaagaaataaccatctgagaatgtattaaagtaccatcatatttgaaatatgcctacttcaaaatatttgcatttatgaaacttgaagtcatgagaaaataagccgaaatgcctgctgacaacctatagcaagttttagataacaactgagctaaattaaaaaaaggacaagctttaaaa

SEQ ID NO: 91133 - DNA, 481 bp, Homo Sapiens
ttggactggccccattctggcccgatagaaattttgggaacttgttcaagttcaactaccgactgtgttaaaagaaaaacccctaatttttaatacttggtggccgtctctgaagtgccttgctgcaggtgtggagtgatcggtaatggctttattgtcatagagaagaccaaaataagagaaaaaacaacaaatgccaaccacacgatgggtgaggattaaacaggagaatgcacaggaagcttgcagcacctggtgagaactcaacgaaggtgtgggtccgccttctgatgacggaacctgttacagctgtctgtctgaagcgatgagatgaggcaacccttgctctgggaaggcagagtcacctggcatcatcaaggcctttagcacctgctaccacttgtctgctacgaagtaccagaaaatgacaaaaacctcggacttgaagcaaataaactaagtaaaaactctgaacaccaaa

SEQ ID NO: 91134 - DNA, 432 bp, Homo Sapiens
ctgcagggagaaatcttggctgctggcttctttaaagtgtttcacagatgaagggaatatcaaggacagacttaaaagagggaagaagactattgtttgaagccaggtgaagccttgatgactgtggtttgaattcactgggaaaagtggaatcgtcaagagacccgggctaactaaatccctctgggagcctcagcagctgaggccatcactcaaaattaagggtggtagattctcctttggacctgtaggcccaattcaagaactaatggctgccctgattattctgtagtctgtgttgtctgatggatccatatcttcctctttggaaagctgggaactagaaagaagtgttctatttgctattacccaagggataatactaccagaatagccagtggaatttgcctattacttttcttaaaaacaaaa

SEQ ID NO: 91135 - DNA, 477 bp, Homo Sapiens
aagtgggccttaaaacaagggtccctgtccccacgttctctctaaaagtctgcatgatgtccctcgtcatgtctacgggttataagtgagcaagacgtttaccacgtatcacacttctgggggctatttcatcgcccaagctggggctgcagaatggtttctgttctaatcctcccccgcgatttccacctctttacactcaactcacagaaaatagagtctgatgcattctgtgtttcatcaccggtcaaaagtgactttgagggtagggtggaggcctgagaagggcagcttcaggcaatagtaatcctgaaattcatcattgctcaaaataaatgtgctcaccttattaaaaagtacaacggaaagccacctttaagataagtagcaaccaagtcgttaaacagcagtcttcaaggaagaactcctgatctcataaggctggagaaaaaacggggttagcctttgctggtgaaa

SEQ ID NO: 91136 - DNA, 436 bp, Homo Sapiens
cagcggtgcccgcgataggcttctctggttttgtctttgctgttcctggcagcgctatattgggcaggcttctgtggtctccacatgcctgtgtgcagagtcccccaggccctgggttctggggcccatactgaggagtggggatggccaagccttggctgttgagtaggcagtgcccagttgtgctgtatgggatgctgtttctcacttaagaaatctttccctacctggggggtacaaaggcattatcctgtattcccaggttgtaactttctgcctttgacattcaaccttgagtccacctgtaagtgtaactgcggcagaagggaggggtctgctgtcatccttgatagcctgtgatgagcagagcccctctgccgaccgcgatgcacatgtaatatgagcaagaaataaatttttgatgtgcgaaaaaaaa

SEQ ID NO: 91137 - DNA, 429 bp, Homo Sapiens
caaggctggagcaaggcacagctcactctgacaagataaactgcaagaaatgtgagaggcgacaagagaaggaagaggcagaatgcccttatctggagacctggcttagaccacacccattccatgacgccaccccggattgcccctttcctgtgctttcagagcccaccagcccttctcagcctccaaggacacaggacatcagctcagggccttgaaggagccctagtcagcgtggtcctgagtcaccaagtctgtcaaggccaacaggactgagacctccacaaactgacgctgaagtctaaggacctttttccttgttccaccccactgcgcctcagatgtttccaggagtttctgaaggtcatgttaactagaatttactcttaaaaccaaagacacagaaataaacgttaagcatagtaaaaa

SEQ ID NO: 91138 - DNA, 678 bp, Homo Sapiens
ttacttaagtacctggactattgcatttaatcatgtattgtaattgtgttactctacctttttgcatcagagacaaatatacaatgaacattcagatatcacagactgcacactagatagtaattcttcaggtcttttacataaccaccaagaaacagatattggtttctgcaatatagtataaaagtccacaatcaatccagtcttagccagtatcttcaatttacttctgttgctgtacaaataattggccattactagggcttacaagttaataacaggacaaaaaatatacattgcactgacacaaaaagtcagctgtgttaagagtcatgcaacaagtaaccaaacttgctgaaattaaaaatactttctaaaaacagttttaacggcataaatattttatacacagttcatttaccaaaacaaaatgtatttaaatgatacaaagcaaaaataagtttctaccaactttatacataagaaagtgcaaaataacttatctagagtgttttgctattatccagacggatggctgctatgggcagctattctcttcttcaaaagcatgacattagagttgcacactacatagaaatgttagaatacatggatgaacaaatgaacaggtggatggatgaatgaacaaactacaaagatcaggcaggagccctatga

SEQ ID NO: 91139 - DNA, 387 bp, Homo Sapiens
  misc_feature (157)..(157): n is a, c, g, or t
  misc_feature (239)..(268): n is a, c, g, or t
ttgaaagaacttaaggtgttccacccctttagaccaagggttcatgtcacccaatatttaacagcagctttgtattacggtcaagattgtttgaagaattcagcatacaaacttaatttacagatgcaagcctacagatggaccctccccacccccnacttttttgctttagattaggttgtgactggaggaaatttagtatacctttgccttcagttatttgcagctgttcacatttnnnnnnnnnnnnnnnnnnnnnnnnnnnnnntatttaggattcagtgtgaggagaaaaaataaactagtttttctttcttccttatcagtttattcccattatcttattttcccttctctgtctctgccttcctttcctcctcgggaaaa

SEQ ID NO: 91140 - DNA, 479 bp, Homo Sapiens
tcgcgctgggggttagggcttcaacatatgaatattgcggggacacagacattcaatccataatagcaagtttcagtggatttcagaagcccctaaggcagaaaagcaaaagcaccttattttttgtccacttgacctgtgtcttatgttggactgaaatgtaggtctcctaattttagtgtagttttgtatatttctccctatatatctttaactttctgatatataaaggtagctgaaatacaacatcataatttttactggaaaatagccacaatgaaggaacaccacaatttcaccatgaaaaccagcacaaccttacacagatgacaaacatttcccctcaaaacttgttaaactgtatttgggctgaccaaattaaccagagttattctatttatgggggagcaggaagtaacttgataaaatgctttgagtttatatatcatgtcaaataaatagcataattttaaaggaaa

SEQ ID NO: 91141 - DNA, 685 bp, Homo Sapiens
tggagccagaggccaaaaagaaatgctagaaaatcgaacattgggaatcagacatcaccaaattcacgactttaaagccagtgtgttgatcacttgctgtcaaggcatatattctgtggacaaggccttttaggcaacagtcaatgtgcaaccgaaagccaccacaagtcacccccgggaacatcatatggaattcatcagactccaaaattatcctgaattgggatcaagtgaaggccctggataatgagtcggaagtaaaaggatacaaagtcttgtacagatggaacagacaaagcagcacatctgtcattgaaacaaataaaacatcggtggagctttctttgcctttcgatgaagattatataatagaaattaagccattcagcgacggaggagatggcagcagcagtgaacaaattcgaattccaaagatatcaaatgcctacgcgagaggatctggggcttccacttcgaatgcatgtacgctgtcagccatcagtacaataatgatttccctcacagctaggtccagtttatgacaaaagttatctgaaggacttgctgtttataatataagcaacatttagctagttgttttgaagacacccagtactaagtaatattgttgttcaagtacatcttattactggaataaaaatgttttttgcttcaaaaaaataaa

SEQ ID NO: 91142 - DNA, 753 bp, Homo Sapiens
  misc_feature (60)..(79): n is a, c, g, or t
aatccccccactccccctacccctttgcactccagcctgggtgataagagcaaaattccnnnnnnnnnnnnnnnnnnnnggaaaagagaaaaacccgggaacattatgtagggtcctgaattgggtcatggacccctggaccagcaggacaggagagagaaaactggcaaaaatagaagactgtacgttacttagtattataccagtgttaatttcttggttttaaaaatgtttttgggtggttacataaagtaagatgtcaacactggggagattctgggaagagtatatgggaactctacatattttacaacttttctacaaggttttttcctagtgtccaaagagctgttcctctttggacgaacagttaaatttacaaggggatttagagggttctgtggtcaaattctaatttgaattaagatttatgcttggacaaccagctatcaccaggctcggtaggctttgcgcctctacctattaatcttctcactattttgctacatagatcaggtgtgctctttggagctggtgctgtagtagctgcgtcgggtttgcgggggtcttagctttggctctgccttgcaaggtgtatttgctgagtgaattcatgatgcagaaggtatagggggtagtccttgctatattatgcttgcttagtatttgtctatctttcccttgcggtactatatgtacttgcgtccagttttctactttctatcgcctatacttgagttgggtaaatggctt

SEQ ID NO: 91143 - DNA, 626 bp, Homo Sapiens
  misc_feature (59)..(59): n is a, c, g, or t
accatggcattcatcataacaactaaaaagtacagcaaggtaggtttccaaagagtganatttaatcgagagtagacattgaacatgattgcagctagttccatcataacatgttggcagaaaacttcactctttttaattcacatcggaaccatttttggctaaagggcaactggagcatattaaagaaccaaaggataagcactttctccaatgtttccctgtactcatagggcaagtcatggatcataaattagaaaaagaatttgggaatcagaagtcaaggaggatgctacaggaggacaggtctcagagagctgggaagaatccagggatttagcaaggcctgaaggagcaagccaaacagctgtatccaggcatcttgattaaaacagtttcctgtcctgttcacagagttatcatcattattaggattctttcacagctgtaacaaatcctagcctttctgattcaggcaacttgaaaggccctattttaagtggagagtgtgcaggctttcaaaaatggacctgccttctgtcagccggctccatctttcacacatataataccagcaggattcaaggaagcagagttcctgacttccagaaggttttggtttggaa

SEQ ID NO: 91144 - DNA, 472 bp, Homo Sapiens
  misc_feature (386)..(395): n is a, c, g, or t
ggatgacctcattccaaagatctgcagagcccagataagcatcccagggttttggcagagggcccctccagggacaggaaggggacaggaagccggctttccgtgtttgtaccgccttccttgggaaggataggacacctgtggccatcaagtcatgatgccccatgctgtctcccgccaactccacaagaaaggcaaatgagtgtcacatcgcccccagagtcatgactttgctgatcccacatgggccccctaaagggcttttccttttaggtcttccccatagatttctcatattttcatttaaacagatttgtatgtaattcttgaatgtttcctttctttcatattctcaaaaaatacattaagactagtaagaataggtnnnnnnnnnnttggtacatctcagaagataatatgtgagactaatagctatagtttgcaataaagaaattaaatgaggtttttaagc

SEQ ID NO: 91145 - DNA, 532 bp, Homo Sapiens
  misc_feature (150)..(150): n is a, c, g, or t
agcccggggcggaacggtggaccctctctgaagcggctctccgtggagttggatgttgcccttcgcgggagggagtggcggtcaagacccctttatcctcggccccagaggggcaggtggcctcgggtcgccctccgccaactccgaggntttggggaaaggtgctgctgaagcaatggaagaaaaatcctcgcagtccgcctgagagagtagagaagaccccctcccagaaccttcctgtaaggtctccccgctgacttcctgtagtggatgtgactgtgtgccaggtgcctgccgaagacccctgtcactgactgtgccctttgggaaagagtcaacaatggcctcctcctatggctgacttcgttcatgttcaggctctccagcttgctagtgagaattgccaaggattggttcatggcaggatagaactaaactgatagatgaaagctccacagtgcttcaagacggggtcccgttcatgttaagcagttttccttccttcaaaataaaaaactagcagtccttaaaa

SEQ ID NO: 91146 - DNA, 605 bp, Homo Sapiens
aacctcgtttttcaactccagagttcagattttcattctgtctccaaactgagagttttgattctatgccataacagaattcaacagctggatctcaaaacctttgaattcaacaaggagttaagatatttagatttgtctaataacagactgaagagtgtaacttggtatttactggcaggtctcaggtatttagatctttcttttaatgactttgacaccatgcctatctgtgaggaagctggcaacatgtcacacctggaaatcctaggtttgagtggggcaaaaatacaaaaatcagatttccagaaaattgctcatctgcatctaaatactgtcttcttaggattcagaactcttcctcattatgaagaaggtagcctgcccatcttaaacacaacaaaactgcacattgttttaccaatggacacaaatttctgggttcttttgcgtgatggaatcaagacttcaaaaatattagaaatgacaaatatagatggcaaaagccaatttgtaagttatgaaatgcaacgaaatcttagtttagaacatgctaagacatcggttctattgcttaataaagttgatttactctgggaaaaaaa

SEQ ID NO: 91147 - DNA, 466 bp, Homo Sapiens
tggcttactctgtcagtagctgctaagctattttgtgattcctgaaacaattgctttgaataccagcactggacacttaaaactctcttcagctgtgctctgtgtggtttgtgattatacttcttgcctgaatttccaaatcttgatgacattttatttataaaaatataattaactagttatcagagtacttaccatttcttagtatcatagaaccactggactatagcttattgaattataaaggggtcttgaagatactttagtgagttccaatcccagatcccaccaagttagcaaaggagaatgatgtgctgttttcaaaaattcaaaatcctaatgaatactccaaatgtactcatgttaaaactacatagaaatgccaactgtgggctaccctctttgggtcacctccctttgtatgggagctctgttttcactctattaaatcttgcaacttgcaaaa

SEQ ID NO: 91148 - DNA, 380 bp, Homo Sapiens
ttttaaaaccactgtgtgaatatgaacaaactattctgggtaaattctcttcctccattaaacttgggaccccagattggctgctctccttttgggggggtggatggtgggaatgcatgactaagagctgttgctcatattagaaatacatgtctcagactttctgtggttatttttgctttattccaatacctagctgcataatacatctaaaatctatgggagtagcttccagacatgagtatttttcgggaactcttcagatgcctgcacacccggtaagaaactctactctagagaatttatgggtcgactgttccagaagcctcaggagtacagttctgccttttccttgatgctgtttgtagaaagaattgggc

SEQ ID NO: 91149 - DNA, 482 bp, Homo Sapiens
ggcacggaggaagccgtagaaggtgccgatgcacttttcctctctacagccctcctgactgctccaaagaattccatcgaacaagactcaaagaggcccagctgctctgcgttttgattcttctccctctctcagtccacactgacctgggaggggcttctcaaacaccacatttcctagcgtgctgtgagaagaggactgtgagctaagaagggagaaaaggcactccctcctcatcaacaaacacctgacctgggtagaccctctgcttaccaagatccagtccaccttttgacatcagcattcatgctgcctctttttacgaaccaagccaaagtggtcccttcctctggaaattataggatacttaatgtacatcatatccagcttcccgactccagactgtgggagatgacacagagccagcctgcctggatgtgactcagctctgcaacttattaaagaccttaggcaaatcccct

SEQ ID NO: 91150 - DNA, 505 bp, Homo Sapiens
cactgctctacggagcgagcgagatccatcatagtgggacaagcgagaggatgaggccatacagaccagggagagaggctccttacactgacattcaaagtcctcaatgacccggccccagcctacctctgcagccttatctccctacaaaccatcaaagcagaacaaaaacctgtccctccgatttaggttttagcaaaccacaagaagcacttcataaactggtgactcaagtagaaaagtactgttccacgcacttgacaccaatccacccatttcacctgcatgatcaccctgcctttgcatgagttgccggtgtggacagagcagggacacagtgagacagcggattccagctttgctcttacctagaacacactgcctctcaccaggaatcgtccttccattttatgcagttatcccagacaatgatgcacaagctttgggaaaaaaaccccacaagtccaaaggtgtacttcataataaaggcaagttatctgtcaaa

SEQ ID NO: 91151 - DNA, 644 bp, Homo Sapiens
tctcctccctagcgctctgggtccttaatggcagcagccgccgctaccaagatccttctgtgcctcccgcttctgctcctgctgtccagctggtccaggaccgggcgagccgaccctcactctctttgctatgacatcaccgtcatccctaagttcagacctggaccacggtggtgtgcggttcaaggccaggtggatgaaaagacttttcttcactatgactgtggcaacaagacagtcacacccgtcagtccccttggggaagaaactaaaatgtcacaacggcctggaaagcacagaacccagtactgagagaggtggtggacatacttacagagcaactgcttgacattcagctggagaattacatacccaaggaacccctcaccctgcaggccaggatgtcttgtgagcagaaagccgaaggacacggcagtggatcttggcagctcagtttcgatggacagatcttcctcctctttgactcagaaaacagaatgtggacaacggttcatcctggagccagaaagatgaaagaaaagtgggagaatgacaaggatatgaccatgtccttccattacatctcaatgggagactgcacaggatggcttgaggacttcttgatgggcatggacagcaccctg

SEQ ID NO: 91152 - DNA, 382 bp, Homo Sapiens
  misc_feature (239)..(264): n is a, c, g, or t
gcggccgcctactactactatacggctgcgagaagacgacagaaggggagcaagtgttcagaataacttgaaccatgcctaccagttatggaatggtggcaaccctctcaaactccgtgtttcctaacaccagctaaaggccagtcttataagcagtcctttctaagatttgcagtctcaggcctgttatattaactttttgtgcacatagtactagaaaactgttggctcagtcttcnnnnnnnnnnnnnnnnnnnnnnnnnnaactgtcaccgataccagaatagctcatctccaaggtaactgtaacagaacactcagcagattaaacagaaaatacttgcttattataattattaaaaagtttggtagggtctaaaaa

SEQ ID NO: 91153 - DNA, 414 bp, Homo Sapiens
cgttctggaaaatgtttatctgtgaataattgagaaggtggtgggacgcattatctgattgtgtaatgaaatatgtatgaggaacagctgtttgcaacagtcccctcccgccgcctcctcagccaaggcccttctctaggaagcaggagtcgcggcgaagttggtcgcctacttccgtccacttgggagccctcgcggcccctccccggctgctggcagaatggtggctccagcgcgccccagagtagtccggtttcccgacggacaacagcatggagtcctcctcagcctcgctctgtgggctccgtgcctgagtgaggctccaccgccggccgcgctgtccctcgcgccttcggggccggccgcgggctcggcctgcggggaccgaggggagcactggcccgggcggccgca

SEQ ID NO: 91154 - DNA, 1106 bp, Homo Sapiens
  misc_feature (922)..(952): n is a, c, g, or t
ctctttctcagccgtggccccagagccagaaggacgcctgtggtgaggagggttgctgtgacgcagtgggcaccgcatcactgaccctgccgcccaagaaacctacatgtccagccgagaagaacttgctctatgagttccttggggccaccaagaacccaagcgggcagccgagacttcgaaacaaagtggaagtggatgggccggagctgaaatttaacgcacctgtgacggttgctgacaagaacaacccgaagtacacagggaatgttttcactccacactttcctacagccatgacctcagcaaccctgaaccagccactctggctcaacctgaactatccacctccaccagtgttcacgaatcactctaccttcttgcagtatcagggcctgtacccacagcaggcagcgaggatgccctatcagcaggctttgcacccgcagctgggatgttactcccaacaggtgatgccatacaacccacagcagatgggacagcagatcttccgctcttcctacacccctctgctgagctacatcccttttgtccagcccaattatccctaccctcagaggacacctccaaagatgtctgccaacccccgagaccctcccctaatggcaggagatggaccgcagtacctctttccccaaggatatgggttcggctcgacatccggagggcccttgatgcacagcccctatttttcttccagtgggaatggcataaacttttagatctcctcttctcccttctcctcccttagcccttggatcaggactaggggctctgatttttggattctgcaaaagcttggtatgaagtttggaaaagcaaagttctgaccaggtcacagacaaaacagcaagaccagattcatctattggccaacactgacacaaaaatagccctcctnnnnnnnnnnnnnnnnnnnnnnnnnnnnnnngaccctcatattcatacttgcttgctcaaccacttatgcatctgtatttagctaacatgagtgatttttgttttcgtttttgttggtaaaatagaagtaacacacttaattttagaaagtttgtattttatgataaaagtatgagctacttgaa

SEQ ID NO: 91155 - DNA, 564 bp, Homo Sapiens
actgggggcgggccacgccaggaaagcaacgcccctgattgcttatgcgggtggtgggtaaaggaaatggaattccccaaactgtacctcttgacttgctactggtacctggaagagatgtaacacctgaccatgggacatcaagtgactgtgtgaatcaaactgcccatcatgaattgttgttatttgactcatcaaactgtacaactggatgaacacaggagcagtgcactacatatgggactggaaccatgaatgagcaggtgactcagactcctatagtacctgcctctactccttcagcacttctccctcaacccacataaactgtcatcataatgagttccctctgaccagttaatggaagagaaaaaagtatggatgttatggatatcctaacatatttctggccattggacccctagaaacctgtggcaagtcctggaagtttttcaaggttcatcttgcaccttctagcatgcatatgtcgtaccaaagcatgtagaatgctgcctacttctgctcttcagtttcatttaatataatttcattactctgataaaa

SEQ ID NO: 91156 - DNA, 495 bp, Homo Sapiens
cataaagttagctagtgctgagaccagtatataatctggatctcctcggcaggaaagtcaagggccttcaccctttgctcctatcttccgccagtcccctcacccatcctagtcaccaattacatgagacatctagttgctgcttgaatacattatgtggttccaagcttacatatggcttataccctattttctacccgattctaattgtccaactcttatcctttcttccagaatcagctcaaatccactgcctttttgaatccccatctacctggtgatctccttgcccccctgcgtctcgcttacaagcactgcctctgtggacccatctcccgcctcctgctttactattagggttagcctttcatgaactaaactacgttcttggagggaaggaatcagagactatttcttagatacctttatgtctgtcccccaatacccagcaaaggtcttgcacagtaataaaagtttccctgtatgattgacaaa

SEQ ID NO: 91157 - DNA, 761 bp, Homo Sapiens
agcaggctggtaccggtccggatattcccgggatatcgtcgacccacgcgtccgggtacttcttgactggttaagttctgcaaaagattgacagaatggaacaactctccggagtctgaaagatgcactgttcaagtgggaaagtaaaactgtcctgcgcaatgagcctttggttttagagggaggctatgaacactggctcctttgttatccccagtatacaacaaatgctaaggtcactccacccccacgacgccagaatgaagaggtgtctatctcattggattttacttatccctcattggaagaatcaattccttctaaacctgctgcccagacgccacctgcatctatagaagtagatgaaaatatagaattgataagtggtcaaaatgagagaatgggaccactgaatatatcaactccagttgaaccagttgctgcttctaaatctgatgtttcacccataattcagccagtgcctagtataaagaatgttccacagattgatcgtactaaaaaaccagcagtcaaattgcctgaagagcatagaataaaatctgaaagtacaaaccatgagcaacaatctcctcagagtggaaaagttattcctgatcgttccaccaagccagtagttttttctccaactctcatgttaacagatgaagaaaaggctcgtattcatgcagaaactgctcttctaatggaaaaaaacaaacaagaaaaagaacttcgggaaaggcagcaagaggaacagaaag

SEQ ID NO: 91158 - DNA, 462 bp, Homo Sapiens
ggctgtggcctgcactggcgcatttggagttgacagtgatgggacgcttggaagggattgaggcttacattggccggactttcaactgggatttctttggaaaataaaaagccttgttgcttcatatcacattgttcatagtaatctcactctctgggagagtcattttcttgaagcaccaggaagtagctatcacaaatccagaagaggatttgaattcaacccccactccccaatttcttctccactctctttcacactttagctggccacactggccttttgtttcagtttcagtctccctgatgtaaactgccttcttgattgcttctttacttttaaccacctctgctgtgatttgtattgttgaaataacttctacccactccaatagaatgctaaatgttagattaataagaggaatgcctgtttctggctcaaagaattagtggttagtgcaaa

SEQ ID NO: 91159 - DNA, 467 bp, Homo Sapiens
tgcatctttctgtaactttgtaacaaaattgcattgaaagttaccttaaacttatataaaataccattcttcgtgaagggacacatattccacgtataaaaattaattttgttttcttcaaaaaagattttaatatttcctttatttaacggttttacacattttatgttatacaaacttttaaaatataaatttgtggccgggtatggtggctcacacctggctggaattctcttttttatatattttctccatgtttctattgcatctggctcactgaatattaatataaggccaataaaatgactcacaattctcttccttctatttctatatccaatgtcaaaattaggcttatatgcgatgtttctgctctattataattttcctatattgtttaggttagacagtagcacaaagagaattttgaaaaaatttcaaatccacaaatttatattaataaaagc

SEQ ID NO: 91160 - DNA, 1282 bp, Homo Sapiens
  misc_feature (624)..(652): n is a, c, g, or t
  misc_feature (750)..(772): n is a, c, g, or t
gagtccagagttggtgctgtgggaacggactagagagagttgcgggagagagaaggagcaggcacgctgggcctcgcgtgtccccgagcagtgagggtcccagtgttccctccactcccgagtggccacaggctcgcgggctgggaaggattcactctctttagccccaggggagcagctcagcttagcccagcatgaagagatgggctctgctctgagagtagggcgggcttgaaggccctgatgggtggaccaccagcctgggcgcagtggtgctgggggcgtgcagctgggcccaggggctgtgcactcaggcctgacccgttgcactgaacaagaccaaatcgctggttgtgcgcttaacgtgagggtgggtccagtgtgccctgcgatgggtcccgtgtcactgtttacatgacctatttgtgtggttatatagccctttatttaaaagagagaagttccttttacaaagttattaaattaattatatgtttaaaagttaaagaaaaaagagctgcagagtatttataaaactgtcttttagaaaaaaaacaagcaagaagaccatttgaccatatgaatggaaaagggaagaaagtataatagaaactttgctagttnnnnnnnnnnnnnnnnnnnnnnnnnnnnntccctttcttgtaaacttacggacacctctttgtggctgttggagtttagtttttatatacacagagttatcagacattatttataaaacttagtttnnnnnnnnnnnnnnnnnnnnnnngccaagccgtgagccgaccagaaggccgtcctctttgatatcttttgcaattgtaccgaaagtgacttactcctctgcccttcctgcttccgtctcttgccggtgccgtggtgtcgtccgtgcctggtgaggtttagtgcagcggtaaagtgctggatgcttctggtgaccttatgacctgtgggtgtcacttcttgtgtctgttattcccgtgttcgttttttgggtttagttgtgcttttgcttctgctggcttgctggacctgggctggggtgccaagtggcgcctgctgcgtcagagctcaaggaatctgtgcccaccaccagctcctggtccgtaggaggtgagacatggggttctgtcatgcccccctccactgagccttggctacatctgtgtctagggcttgggctgatctagtggcgggggtaggtgaaaactggggtccccttggggcgcgcccacgctgcttccacacccaccacctctggccttgggtggtggcatta

SEQ ID NO: 91161 - DNA, 454 bp, Homo Sapiens
  misc_feature (231)..(255): n is a, c, g, or t
ttgtaggcctcccctttccccgcttaccccccattagttgctttcacccagaccgaaagaagtttagtctaaaatgaaagcttactactagcctgcaaaatagctccctttgtctgttcttatcagccagcccagctacttaggtcgtaagtgaaatacttgaagagcccctgagctgactaggactgcaatgcattgtgggctgtgacaaaatgcagcaagacaaccctnnnnnnnnnnnnnnnnnnnnnnnnncctaaagcccctgcctaacaatcaataggtgacgtccaggaaggttgtgaccccatagtactcagcctgtgggaaactgggggaggacccctgcacactagcggacaaattgcttgttgaaactgctgggtgtgcatgtccgtcagacacccgattttgcaagactgacaatatattaaaaatctcactttcgctgttc

SEQ ID NO: 91162 - DNA, 735 bp, Homo Sapiens
  misc_feature (162)..(162): n is a, c, g, or t
cacatatacccctcaagattggcaatggtatgcagaaattaatcaacatttggtagcttagccgcacaacttcagtctattcatgaaaatgtaaaggttctgaaagaacagtacctgggctacaggaaaatgttcttgggagatgctgttgatgtgtttganacaaggcgagcagaagccaagaagtggcagaacacacccagagttactactggacccactcctttcagcaccatgccaaacgcagcagccgttgccatggctgcaacacttacacagcagcacaagcctggaacagggccacagcatctttgggagttagttttgggaaccccattcggctcaggtattggcactggcttgcaatcaagtggcttaggttcttcaaaccttggaggatttggaactagctctggttttggatgcagcaccacaggggcctccacatttggatttggaacaacaaataaaccctcaggaagtcttagtgcaggcaacaaatcacaggttttaactgaatttcgaaaacccagtgttacagaaaccaatgaaataggaagaaaaatacagttctgagcagaccttgaatcaacaaatatctacctttaaggaacttcttaattcctcattttgtaaatcccattattcaagaaaagcacattaagcttagagtaggtttgatcaagatgtttagaattaaggaaataaaacttgcctttggtgtttaaggacaaa

SEQ ID NO: 91163 - DNA, 657 bp, Homo Sapiens
  misc_feature (453)..(461): n is a, c, g, or t
cgggaacccccgggaaggcggtgggaaatgacttccccactctgaaatagcacccaagacagatgatgcaggggaaccgggtgtccacctctttcttgttctcagagctcctgcagcaggcctgaatgaaccgcaagcggggcccatgcagcgtgtcctctgcaaagtgcaggtgttcagtccacacacagcagcaccagcactgctgatgtcacggttgtctgtccagaagatcccacgttagatcccaagagaaatccagacagggtttagcctccagaggcagagagcgggtgccaggcccagatgcaaaggcctctatactgacgccctcacatgacactgcaaaagtcaaattgtcaaaggtcaaaggtcttggcttaggactataagggagagataggacaaataatgaggtcaaggaacctctggattgctgaagagatgactttnnnnnnnnngtcatatctgcggctcacagtgctcaccagaagaacactgcttgggattctagacctgagcagggagaaacaaaccgggctaaaggagacagaactttcttcacagtagaacagtcctagtctaaaatgctagaatttaagtccaaagtcttttaagaatgagagttcttaaatctgtcagaccagctgacagggc

SEQ ID NO: 91164 - DNA, 473 bp, Homo Sapiens
  misc_feature (66)..(66): n is a, c, g, or t
  misc_feature (89)..(89): n is a, c, g, or t
tcggcgccggccccgggaggatctcaataaagaactcgagcgtcccagacccgtatctccttttgntgcccaaccccgaaagctggggnttggaaggcgacccgcccaccatcctgcccttcccagaacctgagaccgtctggggggcggaagccaaatgaacccctattgggcacctctgtgatgccaggagcgaactggtgagcccagcgccctgggaagagggccgagggcggggcggtggtgccgggacctctgaggtcctggggatttggggacccttggggtccacatgcacctggctgacctggctgaaagccgctgtctcggagccccccacagcattttgttcccctcccgctggcccgggggccccaccttcccacgggttcccacgctgctgtgactgccctgcctctacgacaaaagccaacgggtcttcagtacttttattaaaaaatagtcacgcaaaa

SEQ ID NO: 91165 - DNA, 466 bp, Homo Sapiens
cctttttggcatttaaaaagcatcagattacattgtgaataaatccatattgaaaggttatttaagtcataaagcaccagtctgccaaccacataagctgtatagtagcctctagcaggctgcttaaaggaaagcggcctgaagattgatccaggatgccaggacttgcatcctaaaagtcaggctctttgtattcttctgcctttactactgagggaaaggagtaggggaaaccaaggtagagtttcacgaacctccactttccccctcacatcagctctcagcaccaaagaggcaagttaggaaacaacacaagtgtccatcaacagactaaatggatgaacagaatgtactatatccacatagccgagtttcagccctagagaggaaggcaattctgacacatgctacaacatggatgaaccttgaggacattatgcaatggtgaaataaactcatcacaaac

SEQ ID NO: 91166 - DNA, 572 bp, Homo Sapiens
gcggccgcggcgcccgccctcgcccgcgccccatggggtcacagagtctgtagaagaggcgacaccagggcttccaaatgaacaaccgaaaggaagatatggaaatcacgtcccactaccggcacctgctgcgggagctcaacgagcagaggcagcacggcgtcctgtgcgacgtctgcgtggtcgtggagggcaaggtcttcaaggcgcacaagaacgtcctgctgggcagcagccgctacttcaagacgctctactgccaggtgcagaagacgtcggagcaggccacggtcacgcacctggacatcgtcacggcccagggcttcaaggccatcatcgacttcatgtactcagcgcacctggcgctcaccagcaggaacgtcatcgaggtgatgtcagccgccagcttcctgcagatgacggacatcgtgcaagcctgccacgacttcatcaaggcggcgctggacatcagcatcaagtccgacgcctcagatgagcttgcggagttcgagatcggcgcctcgtccagcagcagcacggaagctctcatctcggccgtgatggctgggagg

SEQ ID NO: 91167 - DNA, 524 bp, Homo Sapiens
ttttaatgcctgctgtcatgctctgtctaccagggtgaatttccaaaaatttctgcatagcaattttagccaaaactatatatgttctggggaggataggcataggcacattgaagaccaaaggaaagagtgaagaagtgtagttgggtcattgtgaatggatgtttagattgtcaagaaaagtgggccagaggccccacctcacactaggacggcaattgcctctcattagtatctcaggcaccatgggtcttatttggtgtcataagaaacaccctcaacaaagtaatgaaccctcagcctccagcttctcttcttcgggattcttcttagggcctcctttttccttttatgtttccagtaccctgaatttcttattcccatcccccattaaaatctgcttcaaagaaaaaacaagaaggacacattcactttaagatccaaatgaatgataagagcttaaaacattatacttatcagtattatttgcatttttatagaaaccaaaaccatatttcaacaac

SEQ ID NO: 91168 - DNA, 479 bp, Homo Sapiens
ctgattgtcattgatattcagggctcgctgtcaaccaggaccttccaggaactggctctgggccaagagcagtagaaatcactgggtggtccgcacagctcgcgggcatctaacctgcttcaaggctcagggctaaaagggagccagggcccttcctggaggcgggaacccaagtgggaggcagagcgcctgggcccgctcctcgatctgctgagtgacgaccctgtacaagtcatttctcttccgagagcttcagtttcctcacgtgccaagcggacgggttggaagttggtctttgccagctctgacaccttgtaagttttgagtcttgctgggaatccagggcggggctcacgaggaaaatcttggaaggggatttcatggctggatctcttccactcaagctcagtgccctaatttgacgccttaatagtagacgcaggcttttccattttccaggagccccctgacgcggccgc

SEQ ID NO: 91169 - DNA, 1076 bp, Homo Sapiens
  misc_feature (661)..(661): n is a, c, g, or t
gcggccgcggcctgctgcaaaaacatcggcaggctgggggtgatctggagaaccgaggggtcactgaggatcttggcctgcagtttggagatctccttgaccgacggtatcagcagcgccacgaggcccttgagcagcgcctggcgcacatcgtaaccgaccaggtctttgatcaactcgatggcttcatactggacttccaggtgcatcgtgcccagcaccttcagcacgcagtccacgatgctggggtgtgtggtcccaatgattggctggccagtcctgagagtctgcagggacagctgctgggcttttggggactcgcagggcagcaaagctattagacctttatacacttgattttggtacttgggattgccgtggaccaaagaatccaacagaacctgcacttcctcctgggtctcttctgacttagactttgccaaaaattctgctatggatcgtacaccatagctttcacaaatgagttccttgtatgtcctgccagagttcgcaataacctgaagtagtgtgacagattccttcttggcctcctccttgatcttctctagcccaagtatttccaagagggttaggacacctccaacctcaagaaattctataaggtaccgattactgcttacagctgataagaagatgccantggacctgagaagcttttctaaacatgagtcagtcatataggtgattctaagcgaggtggtcaagcgtaccaggaacaaactggctccctgggaaaactcctgctccagttcaggggcagtcttgccttggttggtttcaatgaacttgtcgaggatgtgactccttgcgactttgccagcgttgtcccactcctgtaaaaaacttaagagcctgctaattgctgcctgctcctttatagaagtcatgatcatcagtcctgaagttggctccagccctcgcagttgcggctggtagaggatggcagaggtaggtagacgatgcaagtcaaagggcacactcttccgccgcgtaggataggactctgttcggacgagtgacctgcccattcccagaatacagcaactcttcagccg

SEQ ID NO: 91170 - DNA, 285 bp, Homo Sapiens
tccctttcctcccctccttcactctccctctcttcctgcttctccgcaccccaacccccactttctgcctttccaggggcaagggcaggggtcgaggccaactctaagcctcttccaatcctaccacgccgccccgctccccccagcacacaaggggacttgcagcactaccaaaataaaacctgtgtcctcccggctccccagatgggtggcgctgtcagtccccggcttcctgacacccagctcattctcctcccagacgggactcgagcccgccgcggccgc

SEQ ID NO: 91171 - DNA, 518 bp, Homo Sapiens
tcagcaggacttaggatgaaggtgattaccagctgtagttattcagtgacatttcaattctcctctctcagactcccccttacaaagcttttctgccagcagcccaagacaccttgacttccaccaccccaacacccatggaataacttctaattgtctgcctttcaaagaagtgaactccatagctgtcaacatttgctgtactaattgtttgtacatttggagttagctgaaagggtccggaatctttcaagatgatctgtctcttctgttaacttcctcttattcttggtccacatgtgcttaaggaaaacctggctggatttcctccctatttgagaacacctagggatgaatcagtgaagaccacggttttctccctggccccaacaggctattcctttgaaggcgtttgttaattctgggtagtgaatacacacctgtttgttatagtattctttgtcctcttctgtatttttaaaaacatagattaaaatgaacatgttatatgaagcaaa

SEQ ID NO: 91172 - DNA, 546 bp, Homo Sapiens
ggggccgcccctcggcccggagcccctcggcggcgcaccatgtactcgggagccggccccgcacttgcacctcctgcgccgccgccccccatccaaggatatgccttcaagcctccacctagacccgactttgggacctccgggagaacaatcaaattacaggccaatttcttcgaaatggacatccccaaaattgacatctatcattatgaattggatatcaagccagagaagtgcccgaggagagttaacagggaaatcgtggaacacatggtccagcactttaaaacacagatctttggggatcggaagcccgtgtttgacggcaggaagaatctatacacagccatgccccttccgattgggagggacaaggtggagctggaggtcacgctgccaggagaaggcaaggatcgcatcttcaaggtgtccatcaagtgggtgtcctgcgtgacgttgcaggcgttacacgatgcactttcagggcggctgctagcgtcccttttgagacgatccaggccctggacgtggtcatgaggcacttgc

SEQ ID NO: 91173 - DNA, 463 bp, Homo Sapiens
ggaaggcgcctcttcgttctctcttccgcgcttcgctgagggactcactcgcgcatcacccgcggctgccggtcgagtgtcccaggcgctccggggccgcggtgaccctcgcggtgcggaccgaggaggaagcgccgtggggggcggggcggcgccgcacgatccggccttcagcttcacggacgtgggctgagaacccgcccgcgccgcgctgagcagggccgagggagccggccagggccccagaggagtccggaacggattcccgtcgctaccgaggtctgcgcgtgtaaggagaggacgtcggagatttgcctcgaggggtggggtatagatgactggagaggtcaggcgcgggttggtcatcgctgaggctgggtgatgggtggccggattcgttatactgttttctccacttttctgtatgtttgatatttttcataataaagtttgtaaaagtaaa

SEQ ID NO: 91174 - DNA, 1109 bp, Homo Sapiens
ggtgtgcgaaggcaactccacgtgctcagagaacgatcgtgtgcgtgaggcctggcgagtgccgctgccgccacggctacttcggtgccaactgcgacaccaagtgcccgcgccagttctggggccccgactgcaaggagctgtgtagctgccacccacacgggcagtgcgaggacgtgacaggccagtgtacttgtcacgcgcggcgctggggcgcgcgctgcgagcatgcgtgccagtgccagcacggcacgtgccacccgcggagcggcgcgtgccgctgtgagcccggctggtggggcgcgcagtgcgccagcgcgtgctactgcagcgccacgtcgcgctgcgacccacagaccggcgcctgcctgtgccacgcaggctggtggggccgcagctgcaacaaccagtgcgcctgcaactcgtctccctgcgagcaccagagcggccgctgtcagtgccgcgagcgtacgttcggcgcgcgctgcgatcgctactgccagtgcttccgcggccgctgccaccctgtggacggcacgtgtgcctgcgagccgggctaccgcggcaagtactgtcgcgagccgtgccccgccggcttctacggcttgggctgtcgccgccggtgtggccagtgcaagggccagcagccgtgcacggtggccgagggccgctgcttgacgtgcgagcccggctggaacggaaccaagtgcgaccagccttgcgccaccggtttctatggcgagggctgcagccaccgctgtccgccatgccgcgacgggcatgcctgtaaccatgtcaccggcaagtgtacgcgctgcaacgcgggctggatcggcgaccggtgcgagaccaagtgtagcaatggcacttacggcgaggactgcgccttcgtgtgcgccgactgcggcagcggacactgcgacttccagtcggggcgctgcctgtgcagccctggcgtccacgggccccactgtaacgtgacgtgcccgcccggactccacggcgcggactgtgctcaagcctgcagctgccacgaagacacgtgcgacccggtcactggtgcctgccacctagaaacaaccagcgcaagggcgtgatgggcgcgggcg

SEQ ID NO: 91175 - DNA, 592 bp, Homo Sapiens
ccgtgtccatcccctttcgtgggaagaggtagagggctgatccagagaccctgaccctacagcaagcctgtggtggctcggatgctcttgggatgtgtcagcttagctagcacacagtcaccagtaattcaatcagacactaatctaggtatttctgtgaaggtattttgtagatgtgacagaagtccattcccaattgactaagtaagtgagattatctcagataatctgggtcagcctgacctgattagtcagaaggcctaaagaacagagctaagggtttccctgaggaagaaattctgcctgaggacagcagcccagtgcttggcgagaggttcctgacatgtctgcccttcttgatagcctgcctcacagagtttagacatgactagccagctcctacaatcactgaagccaattcctcgcaataaatcccaatatatcccctccgggttctgcttctctagttgaatctgcctgatccagattttggtccaaaagtggttctagaaaaatagaatcttaaagatgagttttctgcattggttctgatttttttagattcttccctagttgacgagggggatgacac

SEQ ID NO: 91176 - DNA, 686 bp, Homo Sapiens
cgggattttaaattaagaagtgcactaatcaggaacaagcaactaggactgtgcccacaagaacatgtatatgataaaataaatggagttgggaatttatccagtgatcagggcaatttaggaaccttatttattaccaatgtgagaattgtgtggcatgcaaatatgaatgatagttttaatgtcagtataccatatctgcaaattcgttcaataaagattagagattcaaaatttggtttagctcttgtcatagaaagctctcagcagagtggtggatatgttcttggctttaaaatagatcctgtggaaaaactacaagaatcagttaaggaaatcaattcacttcacaaagtctattctgccagtcccatatttggagttgattatgagatggaagaaaagccccagccgctcgaagctctgacagtcgaacaaattcaagatgatgtagaaatagactctgatggtcacacggatgcttttgtggcttattttgctgatggcaataagcaacaagatcgtgaacctgtattttcagaagaactggggcttgcaatagagaaattgaaggatggattcaccctacagggactttgggaagtaatgagttgattgaccttgagttgagatggatttctattaaagatatctctagtttaaagatactagtcacctgccaaaaa

SEQ ID NO: 91177 - DNA, 831 bp, Homo Sapiens
ctggaccggtccggattcccgggatatcgtcgaccacgcgtccgggcgggacgtccggggagtgcgcacgcatcctgcccgcggcgcgcgcgcaggtcggtgcgtctgtcgggggcgcgctcgggtacctgtaccccatccgtagtctgccgggttaccgatcggactaagttccagaagcaagagataaagtaataatgggtactgtggggaaaaacacagaagaacaattcggtaatatagtggtgatttacaagtcaagttaaaatgtccccagaagtggccttaaaccgaatatctccaatgctctcccctttcatatctagcgtggtccggaatggaaaagtgggactggatgctacaaactgtttgaggataactgacttaaaatctggctgcacatcattgactcctgggcccaactgtgaccgatttaaactgcacataccatatgctggagagacattaaagtgggatatcattttcaatgcccaatacccagaactgcctcccgattttatctttggagaagatgctgaattcctgccagacccctcagctttgcagaatcttgcctcctggaatccttcaaatcctgaatgtctcttacttgtggtgaaggaacttgtgcaacaatatcaccaattccaatgtagccgcctccgggagagctcccgcctcatgtttgaataccagacattactggaggagccacagtatggagagaacatggaaatttatgctgggaaaaaaaacaactgggtaaggatttttgagaatggaaaaaaagatgacttcatccataataaaataatcaattcatatgtcaaa

SEQ ID NO: 91178 - DNA, 720 bp, Homo Sapiens
  misc_feature (581)..(590): n is a, c, g, or t
cggtgcgtctgtcgggggcgcgctcgggtacctgtaccccacgtagtcgccggttaccgatcggactaagttccagtggtgatttacaagtcaagttaaaatgtccccagaagtggccttgaaccgaatatctccaatgctctcccctttcatatctagcgtggtccggaatggaaaagtgggactggatgctacaaactgtttgaggataactgacttaaaatctggctgcacatcattgactcctgggcccaactgtgaccgatttaaactgcacataccatatgctggagagacattaaagtgggatatcattttcaatgcccaatacccagaactgcctcccgattttatctttggagaagatgctgaattcctgccagacccctcagctttgcagaatcttgcctcctggaatccttcaaatcctgaatgtctcttacttgtggtgaaggaacttgtgcaacaatatcaccaattccaatgtagccgcctccgggagagctcccgcctcatgtttgaataccagacattactggaggagccacagtatggagagaacatggaaatttatgctgggnnnnnnnnnncaactggaactgagtgaatttttcacctccgtttcccttttgaaagctcgcccggaaaaatttcccccaaatattcccccaacataacccttactccaagggaatggtaaaattgaaaaaaccccctggc

SEQ ID NO: 91179 - DNA, 520 bp, Homo Sapiens
ttaactgaggtctgctgtctggaaaggacaccacaggcccagaatgaaggggcatctggaccaatgacctagattcaacacagggcttggagctggtggtacaggctggttttggcccaatgtgtgttggaggctggaagcccctgaagacctaaactgcctggatgagcttattagggtgaattaatgagtctgtaatttgggaaccttaatgtgagacaccacttaaggagaggaacttggcccagcaagtgatcactctagaagtggacagctatgcactagactgcaccagaatctgttcaacagcgacaccttgtggtaaaaactgtagacgccccatcaggctggatgggaaactagaaacagactgtctcatctttggacagatatccctcaaatctcccaatctactccagggaaaagacacttcaagtgagagatattggacttcttgaaaatctaggcctatggaaaattaaagtgttaaatggaaaaattaaagagctatgagtctaaa

SEQ ID NO: 91180 - DNA, 549 bp, Homo Sapiens
cgccggcacctggcactgtggccgccacttccgccgcctgggcgcaccggctcatagttgagccgggcgtagaacccggccgaagcgatctacgcgggcgctgcagccaaaactgagccgaagacctactagagtcccagcctagggcgacgctggggagcctctgcgcaggcgctgaagttacttagacgcctgctgctgccgccctgccccttcggctgtgacacgccccaggctctggccacaccccctcaggcatctggctccacccccttggtaatatagtccatcccctcggaggggaatgttttccttccgagccaagaccctgaagggtaccccaggatccctaacattccacagcgagacactaggcagagttccctgctttagggtcggacggacctggattttcaatcccttttactgggcctgtgacgctggccaaatcactatctctatgaacctcggttgccttccgtaaaatgcagataaatgtattctcagataatcctaacctggatccagtaatgccattgagcaaccact

SEQ ID NO: 91181 - DNA, 562 bp, Homo Sapiens
atttcctccgcagcactgaacaattgaaaatatgtataatattcctaactttttttgcaagactttatttttctgatatgttattgtacaatatttaattctaaatttatttcaatttctcccccttcagtttaatgagtggtgttaagaataatgttggaagagggatcaatgttgccttggcaaatggaaaaacaggagaagtattagacactaaatattttgacatgtggggaggaggtaagcataaataacatgactgtgttcttttgctggcactgacttaatcacctcaatacaatgtagcccattaatgagagaatgatgatgctatttgcgttagttcattttgtttcccttactttctgttcactaaatgtccagctgtatttaagttatcattcatgttttatatactttcttcttcttagaaaaaaatttttgtggtgtataattgaagatagtaatatcaaaattgagatttttttaaaaaaagtcatcttgttttctacaggacaaccaattcaaaagttttgggctcctttaagtgtgtctaaaattt

SEQ ID NO: 91182 - DNA, 571 bp, Homo Sapiens
cgatttggtgtctttatagacatcgccatcccctgttagtgaatttggggtcttgagacgtcatctgatgaggacctgctgtttcacagaggaaatataactgtctgtgtgctttttattattgtcatgtttgctgctgacatttcacagctttcatttattgaattttgaagacattgattttttcttcatagcagaaattatggatcagataattggccaaataagaaaaattcagacagcattgtttttctaaacatactgaaaataacgcatgtacctggtgaaaagtgaagacgtcatgacagagggtccagccctgctgtccaggccacccccaggatgggagccctgaatcctcatgggatgtgcgctgagatacaaggaggtccctgcacacacctgcctttccccgctgctggactcttgcaaatcatttcctgtgagtgtcagccagcccactgcatgttccgaaagctctgcagagtgcgccaatattccagagtttcaaagtagtgccctttgaaaagatttaaacctgcaaataaaattaaatttgcatttggggatt

SEQ ID NO: 91183 - DNA, 559 bp, Homo Sapiens
  misc_feature (17)..(17): n is a, c, g, or t
gctaaaaggaatcttanattcccaatatgatatcatttttttcttctcaaaagtaagtagtaatgaggttttactataaactgttacagcattctttaaaacgacaatgacaataacattttcatcataatacaaattttcgcagatgagttgaatatatcaatgaaagaaaaaaatctactttttcttgtttcctttcacaggcaatgacaccgtctttatccaagttactctgccccatggcccaagttagtatatttggtttaagactcataattcttgctttggctttaaaaatcaaaccaagtgtaacctttcctgctaaaactcttcttgggtctggcagcattggtaccttgcttgcaacatcctagaagtgaggccttcacttgtgctatctttagatcataagtgatttgcttaaatttatatatttctcatgctttttataaaaccttgtttctctcttaaaagaacatattaaataagtggcttccacatttaaccatttcttttttccaactatagagttctaagtatattttaatgaaaaaatttg

SEQ ID NO: 91184 - DNA, 518 bp, Homo Sapiens
  misc_feature (132)..(132): n is a, c, g, or t
agcaaacctacaccagaagagtcagtgtcacagatatgatgcggccaatctctgtctccaaaaacctacctgaacttaatggtagaattcaaagatctggggactgagggcacccagccttctaaaacacanatgtattcatgtgtttagtgtaaactctctgcatggattctcagtgttaataataaaaggaagcattcttttacaactcctgctgtgtgcaaaagaaagtgcaaaggatttggagtggcattccgaagatcaccacacataccttggttctgatggctgctgaactccgacttcttcgctgagacatgactgtgggaacagcctccagctatctgctcatcagaggtgctttcctcaacctcctgcaccacctccaagagaaacagcctaaaaagaaaccccagctgtttacttatattggtctgtaaatccctggaagtaaaccccatgcatttttatctactgtctgaggacatacaataaatctgagaaagtctatgctgtca

SEQ ID NO: 91185 - DNA, 448 bp, Homo Sapiens
  misc_feature (328)..(407): n is a, c, g, or t
gtgtgagctattgtacctggaaatagtaaatttttaaaggcattgcattattattaaattggcaggctgagtactggattatgaattgaaggtctttttccatcagaagtgtaaaagcactgttccactgttttctaattttatttgttgcaagtgagaagtctgatccccttctaatttttaattcttgttctatgacctctttttatgtaaacatttatgtgaaaggctgaaaacaatttatatgtcaaataagaggtttatttatttctatcttttcattcaggtcaaataatataatgtctgtatacaattaagccattaaaannnnnnnnnnnnnnnnnnnnnnnnnnnnnnnnnnnnnnnnnnnnnnnnnnnnnnnnnnnnnnnnnnnnnnnnnnnnnnnncagaacaaaaaattatattttataaaaatatttaatgtcat

SEQ ID NO: 91186 - DNA, 563 bp, Homo Sapiens
caacccaaaaaagtgaaaaaaggtgcagacatcgccatgaaagttcactacacaagagagtgggactggcaaaggacacaaagttacatgcaaagaataagaagtcaaaatgaaatcaggcttctcaagagcaactctagaagctaaaaggttcagcaagcaatatctccaaaatgccaataaaaaatattcccaacatacaggtatttgcctgtataccaaggcaaactacactcaagtttgacagtattataaatacatttttcatacaatctagaacacaaaaagtttacctctgttgatatattaagaaataatttgtatgaccatactaggacaatggcagggagtagggaacagagcatatgggaacaaaagtttgtacactattgaaattaacttaatgctaatcccaactagattgttttaaaataaaatataattgtaattctaagggaaaccacgaagaaaataactcaaaaaatacagtaaaataaacagcaaaggaattaaaatggtacactagacaacaccattttaatacaaagaaggcagtaatggag

SEQ ID NO: 91187 - DNA, 477 bp, Homo Sapiens
tttaaacttgaaactattagtaattgtactgacgcgggcagggctgatgaacaacccagccattgtgcttgacttgccgagggtggcaatccctggtaagattttggcgacgaaggctatttctgttaagaggctgtctttcactgtgttcttttatccactgggaagggcgaaagctcttgggttgttccagaaaagttgtatgagcagcaagagctgcaacataacaatgaatatgctgccccatttcattttgagcttccacttctgtgcccgtgagtcttataagcagcttttcctggccctgggactacttgggctatgtaattcatcagtcccacgggtggcctcactgagaccagggcaggagttatgcacagcatagacagacatgctgggatgttcaatgagaaggttttccataggacttgtttccaccttgatagtggttaatccacctgcagtaaaacatggggg

SEQ ID NO: 91188 - DNA, 422 bp, Homo Sapiens
ctttggatttgtgagccctcacatcaggatctactaacagtttatgtccatgctgcagatataaaggatgaagttgtagggcaggaagtcttatgacacttggagcagctactcaatggaaatcacaaacagaatgagtttcatccacatgtcaagacactactaccaacagagctatttcaggacacctacctaaataactagctgtctcttccacttaaagcaaggagagtcttctcttatcttcaagaagaataaaaagtgaagctgacattacttggaaagagaataaacaaaatctgtcatgaggactgcagggatgaatgacacaaaccagccatttctttgagagtcaggaaatatctagtttatacaataagctgatctaccaataaaatacaattggtgttgaaatataaaaa

SEQ ID NO: 91189 - DNA, 465 bp, Homo Sapiens
gagacataacaggtagacacagagaatcacaatttaacagagcaggaacccacaagaagaaatttctgcaagaaccagtaccaagttcttttgttccctgtacatcatgactagtttccaacaaaaaaattacaaggcttaccaaaagacaaaaaacacagtttgaagaaacagagcaagcatgagaacaggctcagatatgacagggatgttggaattatcaggttgggaatttaaaataattatgctaaaggttctaatggaaaaataaacaatatgcaagaaccaacagataacgtacaaagagatgaaagttctgagaaaaaaatcaagcataaatgctagaaatcaagaacattgtgacatgaagaatgctttgatgggctcattactaggctagaccctgctgagtaaagaatcagcttgaggctatgtcactagaaacttctaaaactgaaaaacaaa

SEQ ID NO: 91190 - DNA, 415 bp, Homo Sapiens
  misc_feature (34)..(34): n is a, c, g, or t
  misc_feature (47)..(47): n is a, c, g, or t
ggaaactattcgccccactcagctggcccactgntgagttccccggnaggcttggagcagagggcagtgggcagcagcatcccactgagaactgcagaactctcagcacatgacaactctgtccaaacctctgaactaagagacttgaccaactctagattggcttttagcagcacaaggctgtatccctaggatggccccagcccctcttaaagtgctgtcttgagaaagctcagtgctgccagaaaaatttattatttgttccagccaacacctgatgataggcccctgacctcactttcttagaacatttggctcaaaatggcttgccattgtacatatgtatctcttgcaactcaaaagcatcaggtcttcctttaaaatctagtcatcaaggccaggcatggtggctcac

SEQ ID NO: 91191 - DNA, 410 bp, Homo Sapiens
cacattactaagccaaggtgagaaggctccataccggatcattccaatgatacattctggaaaagacaaagtgatggcaacagtaaaaagatcaggggttgtggggagagagggataaataggtggagtgcaggggatttgtaaggcagtgaaactcttctgtatgatactgcaatggtgggtacatgtcattacgtgcagtgaactccaaggtaaaccatgactttaggagatgatgtgtaagtgtaggttcagctgtaacaaatgtgccaccctggtgcaggatgttgaaggtggggaaggctgtgatgtgtaggggcaaggggtagaagggaactccctgtactttctgctcaattttgctttgaacctaaaactgctctgaaaaataaaaactattaaaaacaaac

SEQ ID NO: 91192 - DNA, 311 bp, Homo Sapiens
ctgcttgctgaatgagttccttatagggcagcgttaaagtctccagctataaaggtggacacctgtatttctcattaagttgtattaatttttgcctcacatatttttatgctttgttgttaaacatatacatgttaaagatcactatattttccttgagaaatgaccccattatgattaggtaatacccgtttagaaacctgataataggtaatacccgtttagaaacctgataactttccttgctctgaagttgactgcatctggcatcaatatttccattcctgctttcatttgattcatgttagcat

SEQ ID NO: 91193 - DNA, 503 bp, Homo Sapiens
tgcctgttccgagtctccggggtggggaaggagcctccttcatggaggagcaggtcaagttcctcctgcgctcatgcaatcgccttctcccatggtgaatctgggagaggggccagcatgctctgctgggcatgctggggtacttggtcagctggcttgctggggggtaagggagcactagggtttgttctttgcaaagagaggttcaggtgagtcgaaaccagtggtataaatgggtccgaactcaggcaggtgaagtattagcaaggcccttgggtgcagactcaaaggtgcattccacagctcttcctttatctgaaggaaaacctgactggctgaatcacacacaattagttctagaacaggaccagagggaagagtgtcactggcacctctcgtttctccatgtcctcctctcctgccctccctgccggagcccccagttggccctgggatgttgaaattcctgggctgctccaattctctacccagctagggagtct

SEQ ID NO: 91194 - DNA, 422 bp, Homo Sapiens
tttgccatcgaagggatcccagagctcttgcaggatccaagtctttattttttaatgggaaaatagatcagggagaagcagctgatgataactgcactttcagttgcttggcaggcagtggaattcaggatcttacacacttcgatttttggtcttatacccctcctgtctcagccagcagaatggggaggcactgtctgtctggagtcagaagctttgagaagattgagtcctgaagcaacacggccaatccatctctttgattctgcgtgacagccacaatccgttcccgagtttcatggcctgagaacagtgggggccactgccatagaaaataatatgcagttggccaagttgcctccatcctttaaaggagagctccagcgtccagccagtcatagagcccccggctttgaaattct

SEQ ID NO: 91195 - DNA, 644 bp, Homo Sapiens
  misc_feature (565)..(565): n is a, c, g, or t
cttgaaagaacacactgctggttgttgatggaatattgcttagctcagcctctgatttattagaagttcataaaaaaccacttcaggaagtggagatcgctgccattactcatggagccttgcatggactagcctacctacattctcatgcattgattcatagggatattaaagcaggaaatattcttctaacagagccaggtcaggtaaaactagctgattttggatctgcttcaatggcttctcctgccaactccttcgtgggcacaccttactggatggctccagaggtgatcttagctatggatgaaggacagtatgatgggaaagttgatatttggtcacttggcatcacttgtattgaattggcggaacggaagccgccccttttcaacatgaatgcaatgagtgccttatatcacattgcccagaatgactccccaacgttacagtctaatgaatggacagactcctttaggagatttgttgattactgcttgcagaaaatacctcaggaaaggccaacatcagcagaactattaaggcatgactttgttcgacgagnacccgcactacgtgtcctcattgacctcatacagaggacaaaagatgcagttcgtgagctagataacctacagtaccga

SEQ ID NO: 91196 - DNA, 540 bp, Homo Sapiens
ccaaagctgggctacggtccctcaggacgaggggcacacagggaatgctgcttgcatttcagctcaggcacagcatcatggagttctgcttcagcttgtactgaaacgccttcagaacatgccttgttccttttcaaggcagcagctccaacacgacccagctggtccctccgcagtcatacgccagtccctctcccacctgggtaactagggaagcacctgccaccccagcgctgcacccccaagctcagggcagcttcctggtcccggccacagggggcctctgcagggagtgggtgcagaaggcgcagatgaagacaggcccgagttgccaccacagctgctcattctcaggaggggaggggcggcaggcaaggccaccaaggcctgagcgctggtgcggaggcaaaggcagcccagactcagccgtcatgtgctgcagaatgaaagatctggggaaaaaagaccactgctatgtggatttcacagcaagtggaacttaattccctctaaaataaaaaatgcccacatatagtaaaa

SEQ ID NO: 91197 - DNA, 459 bp, Homo Sapiens
cgcatccaagcgggccccctcctgcaccataaatccccccgggactgacaaccgcctcgccacggcctcctctgctgacaaaaggggcagaaatcatcactctctctttcctccccgacgaagggcagcccctgccgactccaggtcctacacacctccccgccgggaggccaggctccgggacgcctgcggttccctggtcccgcgccaacggcctggccttccctgccggcccgcgtgcctcccgccacggcgctagcggtccgagccacgctccctcgccgtccgagcacagccgtgcctcggtccgccacggcctcgtccctgcaggcgtcggccatccggccatgaccgcacggcggcctggccaacactgacgtattccttctactccgtcagcaacaggaagagagaacaaaagccaagactttccaggtgtctgaagcgcagaggaaatgc

SEQ ID NO: 91198 - DNA, 506 bp, Homo Sapiens
  misc_feature (488)..(488): n is a, c, g, or t
caaacataaaaacatgcttctgctgattaaaacatacagcgcatgattgctattaatgctttggagagatggtttggggtcacaatcacccagatactctcattaggaggtcctatagatcatggcctgatggaagagtttgtgttacttgaaagtaaacgtcaagggaaaagaatagaaaaatctatcactaacaccactgttaactcaaatgaatcaaataataaaggatgttgatataaaaacatttgatcctctcaccatgctttttaggatctaccttctgctctcatcctgcctaaaagtcatagaaaaacgttgacactttaggatgctcccaggtcctgcagttctgttattcccagtaggggacaatgttgcattcaaaactgcaccatttgcagcacgtccctggccagacctgtgttcttctctattttcaagaatagatctatttaaagagtcgtatataaatatgtgttctgtanactctaagaaagtgagag

SEQ ID NO: 91199 - DNA, 1017 bp, Homo Sapiens
  misc_feature (117)..(125): n is a, c, g, or t
  misc_feature (627)..(627): n is a, c, g, or t
  misc_feature (645)..(646): n is a, c, g, or t
ccacgcgtccgggccacagcccggactccatcgactcccccggctcttagactaaaatcatgcccaagttcaaacaacgaagacgaaagctaaaagccaaagccgaaagattattcnnnnnnnnngaagcctctcactttcagtccaagctaattacacctcctcctccaccaccctcaccagaaagagtcggtatttcttcaatagatatatctcaaagcagaagctggctaacatcatcctggaacttcaattttcctaacatcagagatgcaataaaactttggacaaatagagtatggtctatatacagctggtgccagaactgcataacccagagtttagaagtattgaaagacaccatctttccatctcgtatctgccaccgagaactttacagtgtaaaacaacagttttgcattttggaaagtaaattatgcaagctccaggaagcactgaagaccatctcagaaagttcttcctgtccaagctgtggtcaaacatgtcacatgagtggtaaacttacaaatgtgcctgcctgcgttctgatcacccctgcagactccaaacctgtgcttcctcccacactcccacagccaaccagccattttcctcctcctcctcacnccttcacctctggcaccnntctcaccaccactagcacctgtgttgctcagaaaacccagtctcgctaaagcacttcaggctggaccattaaaaaaagatggacccatgcagataacagttaaagatctgctgactgtaaaattaaagaagacacagagtttagatgaaaagaggaagcttataccatcgccgaaagcacggaatccactagttaccgtctctgacttgcagcatgttaccctgaaacctaacttccaagcggctatcgcaatccagtttacaacgtcctcactcactactgtgacaaagtcagatggtctcgcgcgaaatggctagaaaaggtcgagttcaaaaagacccagtggaaaccttcttacaatagggaatatg

SEQ ID NO: 91200 - DNA, 893 bp, Homo Sapiens
atttggccctcgaggccaagaattcggcacgagggactcggccgacgcgagcgccgcgcttcgcttcagctgctagctggcccaagggaggcgaccgcggagggtggcgaggggcggccaggacccgcagccccggggccgggccggtccggaccgccagggagggcaggtcagtgggcagatcgcgtccgcgggattcaatctctgcccgctctgataacagtccttttccctggcgctcacttcgtgcctggcacccggctgggcgcctcaagaccgttgtctcttcgatcgcttctttggacttggcgaccatttcagagatgtcttccagaagtaccaaagatttaattaaaagtaagtggggatcgaagcctagtaactccaaatccgaaactacattagaaaaattaaagggagaaattgcacacttaaagacatcagtggatgaaatcacaagtgggaaaggaaagctgactgataaagagagacacagacttttggagaaaattcgagtccttgaggctgagaaggagaagaatgcttatcaactcacagagaaggacaaagaaatacagcgactgagagaccaactgaaggccagatatagtactaccgcattgcttgaacagctggaagagacaacgagagaaggagaaaggagggagcaggtgttgaaaagccttatctgaagagaaagacgtattgaaaccaacagttgtctggctgcacctcacgaattgctgaactttgaaagcaaaaccaatacactccggtttatcacagactgggggctcccaaactgcttccacttcatccattaaataaatatttccttgaaaatgggaaatacccgcttgaaaggaattgcttctggggaagaaaaaatccaa

SEQ ID NO: 91201 - DNA, 434 bp, Homo Sapiens
acctggacctgctgctcagcccctccctgcagaccgccggcgcccagctccagatcctgtttgcgggggaagccacacatcgcacgttttactccacgacgcacgggctctgctgtcgggatggaaggagccgaccgcctcctcagtctgtgggccccgcaggtgcagcagcccaggccgaggctctagctggcccagcctactctgttccacccgtgtcgggggtaggctgggaccgtcatttcttctgacagatttcagtctggcttgaaatttggggatgttaatgagggtcctctggtttttggtaaccagggccaccttctcagttcttgtgtctgttattggagtctggccagggttgacttgagctgagacaccagatgctcacggagatgctggacacataaagcaagttacagccacaaaaaaaa

SEQ ID NO: 91202 - DNA, 465 bp, Homo Sapiens
ccaatcaagaaactgacataagaacagttttattttaatcacttaagacttgtgcattattcaattttgagactgaaatacttgtttccctttcaactgattaggaaatggtctgagctggcagaagttaatcctcacattattcagctaatgagagacagaatcctaaaacctgattccaacttccgcctgtacctcacaatgcaagacaaagcctttcattttaatgttgtacacatataaggaccatataatctggattaactttaggtaacaataacttaaaagataggaaaatgtatcatattacagagatttaaaaattgtctatacaataaatgatgaagaaaactaacaataaacaggacgacgttcaaatactgaatacaattaacaaatggggccaaaagatcaacatttatctctcatcatctttcatgcaatgtctcagctttcttctcccaa

SEQ ID NO: 91203 - DNA, 186 bp, Homo Sapiens
agagggtaagagatgggtagaagagtatgcctctgaaaattttattagtttattcttgtggagaataccaagaaaatgtgtatttgcccattgctaaatatgatatatgccattttgtatttatttgtcccaagtgtctttttgtaagaggagaataaacaataaggaattactgatcaaaaaaaa

SEQ ID NO: 91204 - DNA, 464 bp, Homo Sapiens
gctgccccagtggattaggattagtgctgcagtcaaatgaaaaagatcaagacaaaaaattaggctaatataactagccgacaggctagcggcatttctctggggccgaggaattccacgaagaagatctctgcgaggcccagaaggccgcacaactacttcttcagaaacaaaattttttaaaaaagtaaaaatagaggaagtcagccagtttatcaccttggaaccagcgttttgtttggcttttccgcttttcactctacgaaaaagcccattggcggctacccaggttaccgtcctgttgccattgcgcctgcgcggcggtttgtttaccagtccaggcgaagcgctgtgtcgcggttctcgccgccccgagcgccttggtttgctcccttgacgtgtaattcgtaatgaaagtcatgttttcatttgggaacacggatcggaggtttaaaactggacag

SEQ ID NO: 91205 - DNA, 467 bp, Homo Sapiens
gacactgacagctgacttctccgcagtttcccacaatacgagagtttcattgtacagggaaggcaagatgagaaaaaaatgcaaacattaaaattcaagccaaaactgtatgatagcatcttctttggaagtacgcgtattgggttgaccatcatgtgagaaaaattattgaagtcttctagatgtaaatcttaatatgattaattattatttaaagatattttcagaatctgactataatagcaatgaaatgtgaatatggattactttgtaattaacattaaaatcttaattttttattacagaaaatttaaatcaacacaaaagtaacccatcactaatcttaaaccattatcttggctcatcttgtttcatctattcccctatccacacatcattttgaagcaaatcgtagacataatattgtatcattccctgtatttcatgttttctaaaagatgattcct

SEQ ID NO: 91206 - DNA, 611 bp, Homo Sapiens
tcaatgtaatctctgtgggaagcgcttcatgcagcttattagcctccaatttcaccagcgaacccacactggcgagaggccctacacgtgtgacgtctgccagaagcagttcacccagaagtcctacttgaagtgtcacaagagaagccacacaggggagaagcccttcgaatgtaaagactgcaagaaagttttcacctacagggggagcctgaaggagcaccagcgcatccactccggagagaaaccctacaaatgttccaagtgtccaagagccttcagtcggctgaaattgttaagacgccaccagaaaacacatccagaagctacttctcagtgattgcataatccggtctatgccttctgcaccaagaagaagtgaatgatatttttcatcaatgttatcagatgacatttgacacatgcaagggcgtctgacacacagagggagtgccctagatatgaattgccaggatgtttgagtaaatatgtgtcctccccactgagctttgttttctgtttcattatgtccattgttttcttataggtttattttggtttgtgttgctgttcttccaataaacgatcatcttattagttttcaatattgt

SEQ ID NO: 91207 - DNA, 500 bp, Homo Sapiens
aatttaactgaattgtatcatcaaaataaataaaacagggtaataaaaataacaattagggtgactgatgtcagacactcatatcaactcatcattttcttgtagcctctgattctgtactttcttgtgtattattaaagaggtaaatgctctcttaaaatgcctctagttcctcagaggtaggaaaaataaactcaacctgctttggacttgtgtatttacttgggttggtttccagaatctccttattcctgaaacagtatgatcatgtagttaaactactcctttatatctgtaagtactgtgcagccaacatgttcttttttgtccccaacttctgccatctttccaacctctgaggcatgctattttatagtggtttgctctttgaaaaattgtttttgtgccctctcttaatagtcacagatactgacacaaaacttaaaaatgaccagaaaacaatgtataaattatttaaaataaaacattctttttatatc

SEQ ID NO: 91208 - DNA, 375 bp, Homo Sapiens
tgtgagccactgcgcctggctgataccagcttgaattttacatatacttcctgtgtgccaaacactgtgctaggtgcagtatgtatattcctttcttcaaccctcatgacaactccaataatagcataggtaggtgctattattattctacttcacagatgaagaaactttagtacagagatgctaaataatgtgcccaagtgagagttggggttcagaaccaggcatgggtctgtccccagaatgcatgctcttaaccccaaactactgtacattgtatacagatatttttctgattaggcattgaacccattgggcaaaaagcacagaccagtgaggtgctgacattttaaggatgcatagggaggatgagta

SEQ ID NO: 91209 - DNA, 459 bp, Homo Sapiens
cggagaggtgcagcccccggccgcggagccctcccgggggcgccagaaagccactttgggcctgtccccaggaaaacgtggtctcagctgtggggccgtcgagcaggcctcgacccctcttcctgacctgaggagaggcccagcgcctcaccctcacccagtctttgtgcagggcgccggcggccattgtgtccgggcggggaatggaggacccggcaatccccaactgccacgttctgggcctttggggaattcagagcaaaccagcggcatttgttgggggtctccggccttcaacatcacagacaggcctgggggtggccttcccaaagtcagattgcagatctgaggcagtttccccctccctgcgtccctcactgaaaccttgaaccccattgagaagtccctttagggtttcggacgcctccacctcaccctgggctggtgcttaaatagaaa

SEQ ID NO: 91210 - DNA, 525 bp, Homo Sapiens
agcatttttagcatacaacaacatccaagtggattactatgaatgcctagacctctatggcaaacagtctcttcgtggcctgtgctgaggactacatcagtctcctgcaattatcatctacactgaaaaacaaagaggacagaggcaaagctagtggccctcaccatcccctgcaagctgattgcttcttactgcaagcacttgagcatcttcctgagagctttcttgggcaatgggaaccaggcttggcccaatcacaggcaggtgaaaagtatgaggaaatggagaaggcattgtccaaggagcagtcttcaaccttcaccccgcaagtgagacaactctgaataagatgtgttctacactctcttccaaaggtccccagttggatggagctctagctgctcatgtgataagctgcctattaatacacaaaagattgcctttcctccttgctctgtcttcctgctgctctcctactaatgtttcctgggattgcctccaaataaaccacttgaactcacaaaa

SEQ ID NO: 91211 - DNA, 823 bp, Homo Sapiens
ctcactgctcagtggacccaggcaattagctcagagacttcacggggcttgccaaggccttgctgagggagcggaaacaggcgcaccgccgtgccagcaggctcaccagccagatgcaagccacgctccaacaggcgtcccagcaggtgctggcgtctgaagcacgcagacaggagctggaggaagctgagcgggtgggtgctgggctgagcgagatggagcagcagatccgggaatcgcgtatctcactggagaaggacatcgagaccttgtcagagctgcttgccaggctggggtcgctggacacccatcaagccccagcccaggccctgaacgagactcagtgggcactagaacgcctgaggctgcagctgggctccccggggtccttgcagaggaaactcagtctgctggagcaggaatcccagcagcaggagctgcagatccagggcttcgagagtgacctcgccgagatccgcgccgacaaacagaacctggaggccattctgcacagcctgcccgagaactgtgccagctggcagtgagggctgcccagatccccggcacacactcccccacctgctgtttacatgacccagggggtgcacactaccccacaggtgtgcccatacagacattccccggagccggctgctgtgaactcgaccccgtgtggatagtcacactccctgccgattctgtctgtggcttcttccctgccagcaggactgagtgtgcgtacccagttcacctggacatgagtgcacactctcacccctgcacatgcataaacgggcacaccccagtgtcaataacatacaaa

SEQ ID NO: 91212 - DNA, 469 bp, Homo Sapiens
cttgcctgcgcgctggaagccaatctgggtgtgtagcgcgaagagcgaaagagaaacttctgcgtgactgactagatgaggctcctcccgagaagccgagataatagaggccccctctcccgccgcccgcctttttctcctcccccggccgctcgctcctgtcgccccacccctcgaaggctgcggaccagccccccacacttccccctacacctctggcgggttcgcgccgtggacgcccccgccctgcgggaggaggggctggcgcggattttagggacttcctgggatgcggagatcggctctgaaccatcccctttctgctgcccggagctggggaagctcgctgtggagcgtctcgcacgtggcaggcaggcagagaacttgctgcaccttctaggaaattgcaatcgatttgtaatgcactttcgctaattgggagttcaaaattaaactttaataaagcaaa

SEQ ID NO: 91213 - DNA, 713 bp, Homo Sapiens
gatacgatcgagctcggtaccgaacgggtgatgcggttgatgtgtatgaggcatactcaggcttctaacaggaaatggtactgaggcttccttagccaaatcaaaaagattactgacaccaattctcgaatcccgacctcctgtctttgaccactcgtggttaaactttctctccgagtacctcatgatccagcagactccatttgtgcgccgtcaagtccgcaaacttctgctcttcatctgtggatccaaagagaagtaccgccagctccgggatttgcacaccctggactctcacgtgcgtgggatcaagaagctgctagaagagcaggggatattcctccgggcaagtgtggttacagccagctcaggctccgccttgcaatatgacacactcatcagcctgatggagcacctgaaagcctgtgcagagattgccgcccagcgaaccatcaactggcagaaattctgcatcaaagatgactccgtcctgtacttcctcctccaaatcagtttccttgtggatgagggcgtgtccccagtgctgctgcaactgctctcctgtgctctgtgcggcagcaaggtgctcgctgcactggcagcctcttcgggatcctccagtgcttctacctcctcagcccctgtggctgccagttctggacaagccacaacacagtccaagtcttccactaaaaagagcaagaaagaagaaa

SEQ ID NO: 91214 - DNA, 466 bp, Homo Sapiens
tttaatataaaatctcaatctactaaaatctttcttctcactttaattaagtttggactccaactatggtgttctactcggtcagccaaggtttctagaaaagaggcaccttctgtaagaattgacagttgtaaaaagctgcatttatgtggcaactaataaagcacattcatatccattatccaattaattcttacataccctcctttgagattctcctcagaagcaatgcccagccccacggctatctctgtggcaccctcctggaccactcccaccacagccaccattatcttctgccacatacacatttgttataactcttttcacttaaactaattatctgtatctcttatccttagtgaaatataaacagcttgacagaagggacaagcctagcaccgtgtaaggcatagtaaatgctcgacaattatttgccaaagtgagttaaaaagaataattcata

SEQ ID NO: 91215 - DNA, 364 bp, Homo Sapiens
agttggagagaaagaacatcgggatgtttgaaaatatgccattgactatcttaactactgtaattttatcatttccaacgtcatctaactggggactagaacaaactgtgaattcactttcagcaaccagagggcgctaatccacacccacatcgctctgccctgttccacccagcaggggcaacaaggatataacttggggttctcggtattcttcctttagtcctgacacaggcagccttgcactttgtagcagcaggagggcacttgctttaagcatatctttcgaaaggcatccattgagagaataatgcattctccccttgctgtgtatgacatggaacagtatgaccattgcactaaa

SEQ ID NO: 91216 - DNA, 501 bp, Homo Sapiens
ctaggagctgtgcaacgccagcccttgaggaggaagccatctgtttctggaatcaccctccccgccacgtatatgagacatatccttgattgtccgtgaaatcaggtggtccagggccaggttggtccatagagatgttgacagaacaatgtaaaagttcatctagagaactgagtacttaaggaactatcacaaaagaagaatgagagggaatgtccactgccagacaccaaaatgtgttctaaggtgaaagtgttaaaacagcatgttgctagtgccactccaggcaaaatcctcaagtgctctaagggcttgggcaagtaccttgctctaagatagccctgactttgtgagctgcctaaaggcatgaaaattcacaatattcaaacacacttctgacaaaaaccaaaacaagatcaaaaacacatctggagccctgaaatggggtacagggacccagtttatgatccttgacacaataaacagaatagaaaatccaaa

SEQ ID NO: 91217 - DNA, 997 bp, Homo Sapiens
  misc_feature (192)..(200): n is a, c, g, or t
tttgtctccttgtggaggggctgtttgctggctcaggctgaggatggcccaaagtccagggtctggtggggaggagggaagcttaactcaagtttgggttagtgagttagcaagctctttgtgcagatggggatgtaggtaaatctttttaaaagtgaaattaacctcctgccaattttacaacccaagaannnnnnnnnaagggccttggagccatctctaaaacaaacctcaagggatttagtgccctgtctccctgtctctagaagccttagcctgggcacctggctcaatcttgtaactgcctgctagccatagattcctttcagccttgctgacttctccctataaaagtaaagcctttttctgccccagctctgagacacttgcagatcttaaggtctgagacttgctgattttctggttggagtgtttttttgtattgccatagtcccttccccctgaagcaatagcccctccccacctcctgcaatacgcctttccaatctttattggaagtctctccctgcctacttcctaatttattcttatttgacagagggtatggaagacttgcaatttgaaaactggggaccagttccaaagtcagtaattgtgttaaccacgtgtataacagctctgctggacacccaagaaagccatgggaacgccaactggaaaggtccccttccccaggggagcctgcgaaggagaggttctgtagaatccaagcccacatttccaaagtcacccccaacgcgtcctctcacaccgtccactgtgcgtttgtatgtgtctgggatccagggcaatgtgaattttctttttatttgggagattgttcacggaaaacagatcttcttctctcttgtccacctattaattgtttacaatatttgtacatctatgcaaaatacttgaatgggccatggtgccttttttccttgttagtatttaattaaaaatgaattgtttgtcatttgcaatgttaaaaaaa

SEQ ID NO: 91218 - DNA, 487 bp, Homo Sapiens
  misc_feature (186)..(226): n is a, c, g, or t
agtagattcgaatgacatgattgtctataatctcgctagccttgtactgtgtgtgcatagcaattacagggaagtaatctagctcctgactattatgttgaactatgtcgctgctttttacaaacttgtcttgatccaaagcagtcacaatgataaccctgcatatctgggaatcataagtcaacnnnnnnnnnnnnnnnnnnnnnnnnnnnnnnnnnnnnnnnnnattttcaaactgtgatttaatatttaaatattcctactgccatttttgtgactgaaaaactacacatgaggaaacgtcttagaattttccaatagaggaaaaataacacttgggcaatctgtcatgtttcacaacagttctcatttttctcatgatttgtgtagcgtggaatgtgtttgctcaatgtgaagggttttcattgctcaatttctctgtgcaagtcttttccttaaggtaataaaccaaaagcaaagtcaaaaa

SEQ ID NO: 91219 - DNA, 550 bp, Homo Sapiens
cagctgtcttttatgaaaatttctcagaagttacacacttccacttccacttcattgatggtgctgaataagatcaaggcataaggaaagagaaagatataggggcagacaaacaacagtctctgtagcagaacatgacgatgacacagcatatcatcttttctgattttaaagcaatcaacttagtatttaaattcaatcactcaagattttcctttgtatctttacttttcctcccttttcttaaagtaaacttaaatttccagagaacttacatattatgctgcaatcagaagaagggtctctgccttagctatagtgttgctgatcacagcaagactttttattgccatcatgaggccggtattactgctgagtctatgctttctctgtggtccttggtcgtgaagttcatacactccaaatcctactcattccaacctcaggtctctttagggccttcaatcttctgccgtttgtaaggttggagattctgcccttgcccatggttaggataggagaggctatgctgcagagaaaagaaaagaaa

SEQ ID NO: 91220 - DNA, 392 bp, Homo Sapiens
tctgtgagcacagctgcttgccattgcctgccttataggcatgtagagactgccaggccctcccagggcagccccaaccaggtctcctcccacctgccacacagcgctccggggcctgagggctccctcagccctgggaagacacattcccttccctgttccccaaagagcccacctccgccctgggcaggagcccctcggaggaagctcaatatcagctgggaaggaactgtgcctctgtctgactggccccacttcttaagcactgccctgccccatggggtggcacaggggtcccacagcaggtcttcctgcactgcccacccctggttggtttgtggcccaaggaaggccactccacattaagctgcccaataaactgcttttaagat

SEQ ID NO: 91221 - DNA, 912 bp, Homo Sapiens
cccgcaaaacctctgcagcagacaatggcgagccgaacatggaggaggaccgctacaggctcatgctcagtcggagcaacagtgaaaacattgccagcaactacttccgatctaagcgggccagccagatcctcagcacagacgccaggaagagcctcacacatcacaactcgccaccaggcctcagctgcccactcagcaacaactctgccatcccacccacccaggcccctgaaatgccccagccccggcccttccgcctcgagtccctcgacatccctttcaccaaggccaagcgtaagaaaagcaaaagcaactttggcagtgagcctctgtgagcacagctgcttgccattgcctgccttataggcatgtagagactgccaggccctcccagggcagccccaaccaggtctcctcccacctgccacacagcgctccggggcctgagggctccctcagccctgggaagacacattcccttccctgttccccagagagcccacctccgccctgggcaggagcccctcggaggctgtatagtcctccttagagaggcctgctccagctgttcataccacatcagtgtttccgtctgctcacctgccacagagcccacacccatgcccaccagtgttggtctttgcctcaaagcctgagacctgcttcacggccttcaccagccctgatggagagggcagcagctgccacgtgggaggaagctcaatatcagctgggaaggaactgtgcctctgtctgactggccccacttcctaagcactgccctgccccatggggtggcacaggggtcccacagcaggtcttcctgcactgcccacccctggctggtctgtggcccaaggaaggccactccacattaagctgcccaataaactgcttttaagataaaaa

SEQ ID NO: 91222 - DNA, 512 bp, Homo Sapiens
acgattgctatggctactctggtcttctgtggtcccatataaactttaagattttctatttctgtgaagaatgacattggtattttcatagggattgcattaaatctgtagattgctttggatgatacgaacattttaacaatatttattcttccaatccacaaacatggaatatctttccattttttgtgtgtcctcttcaatttcttgaatcgatgttttatgattcctattatagagctttttgcttctctgtttaaggtaatgcctaggtattttatttgtaactattataagtggaattactttcttgatttctatttcagattgtttactgttggcaatatagagatgctactgatttttctctgttgatttttgtatactgcaactttactgaatttatttatcagtcctaatagttctttcagtggaacattttggtttttccaagtataagatcacatcatctgcaaacaatttcacttcctccttttccaatttggatgccc

SEQ ID NO: 91223 - DNA, 497 bp, Homo Sapiens
gacatagacagcaataaaataataagagactgtagtatttcatgttcaataatggataggacatttagacagaaaatcaataaggaaacagcaggcttgaatggcactagagagtaaatggacctaacacagaacattctgcccaactgcagtagaatatacatctttcttaaatgcacatagaacattcttcaggatagaccacacattaggtcacaaaacaaagagtaacaaatttaagattattgaaatcatactaattatctttttcctaccataatggaataaaactagaaatgtatagcagaaggaaaacggaaatattcacaaatatgtgagaattaaacaacagactcctgaacaacaaataggtcaatgaagaaataaagaaaattagacttgagacaaatgaaaacaaaagcacataccaaaatctttgggatgtagaaaaagcagtactcctaagagggcattttatagtgataaacactaaaact

SEQ ID NO: 91224 - DNA, 453 bp, Homo Sapiens
gctgggaaccagctcctgggtcttagtcagaggttcacatccaccaactatcttcccagggttggactgagaaggggagcagagggtcccagggactctcctgagatcctggctctcctgccaaggaatttacatttccttgtcacagcaccatgtaagatatccaactactctgaaactaccacactgtgaagagtctaaccaagccacctggagagaccaaacggaagaaaactaaggcccctggccaacagccctagctgtgctcctactggccagtcagcaccagcctgccaggcatgtgactgagacagtcttggaagtggattttccagccctactcaagctgccgcagctgacaccacatggaacagagatgagcttttctccccagtgcccaaatagcagaattgtggaaaaataaataaaacagttgtattaagccactaaaaa

SEQ ID NO: 91225 - DNA, 352 bp, Homo Sapiens
ccattacaaaccccagtattcctcctacacacacacttacacacataccagatatgcttgctcattgaccccgaactaaactagtaaacatctctctttccctttaggtcaggatgtatgttcttccatttccacctcctggctcttgacctcatctcttgtaaatggatccctcgtggacccaccctacagtcctgcagacatgcccagacatggctaaatcccagagtgaacacagatcttgacatttactacactactaattagcaatgaagtactttccattatatacacacagcctcttttgcagattgttgctcatgatttacataacttgccctttatttctaaa

SEQ ID NO: 91226 - DNA, 957 bp, Homo Sapiens
  misc_feature (799)..(811): n is a, c, g, or t
ataatgcgctgccatctttgctgaatctaaaaccctttgatttagagtcatgatgcgataaaatttttcatatatgaaagctcattttttgaacttataaaaaaggaactaaggcaatgacttcagcccttagtgctgttgagcttaatattattgagaatataaccacggtgtatcaaaagtagaaatgataaatatatctcattttaatggtaccctctttatagatgtaagtgttgtattggcagaatgaattgtgccagaaattgaattttaattttattataaatgaagtagactgcttagatttttggatttcaaaatacaggtaaagttaataatgttgaagtagtaatagtttgtcaatatttcaagaaggtaggaatggccattaaaaaaataaagtttgaattgattgagttgtaatttataactaagtgaattaaatgctttctaaatttgagcagactgttaatttgtagcctaagctctgtaaagcaattgtggagaacatctaaaggcattctcctagaagaggactttatatgtacatttgaggagacagatttttcgttttatattaacatctgagaagtagtcctttctcaaaagtgctgtggatgctgtagcacttgctctagtattcaggacttttccagtcagtttattgttagcttttggtttccttgagaaagggtttgactacaattcttccttttcatttcagttattagttttatgtagatgtaagtgctgttatcttgatggaaaaggagcttgaagtcccctccccctgggnnnnnnnnnnnnngcccttcccaaataatacaattttgatcagagtacctggagtgttattgtgtctggagttcaaaacatttgcttaaattttgaactagagatgttctcaaacctaagtttaaagttacttctagtcagggccattatgtttgcatc

SEQ ID NO: 91227 - DNA, 474 bp, Homo Sapiens
tggtagtttcccatgaattaataactttccttcttgcccccgtgttatctccctcacgtgacccccgccaataaaacatccttaaaaggctcctctcaaattccttgcaaatattaggctcctctcaaattgcttgcacatgcttggagaagctcacagtggttagtacactcatacacaactgaacttgagcgacacaaagcttacaagacagcaaagacaacagcaaagctgggcccagcagccatcacctaaagaactcttcactcgttacattggagcaggtgatctctctggaaccaggaaccacagaacactgaaggacacggagctggtggctaaggattcaaggcctgcagtgaaaatgtaacatttccctccaagtgcttatttctgctataaactggtttagttttgcaatgaacaactagatttctacctgatattcacgttaataaacttttctttaataaa

SEQ ID NO: 91228 - DNA, 1525 bp, Homo Sapiens
  misc_feature (155)..(155): n is a, c, g, or t
  misc_feature (188)..(188): n is a, c, g, or t
  misc_feature (1181)..(1192): n is a, c, g, or t
aatcacttcccctctctgaacctgtttcatcctgtgttaaaaaagaaatgggagaggaagaggagaggatagaataaacctacaactgagataacacaggtgataactgaaagaacatgaatgaaatttcactgtgaataaaaaatattatatanaataaagtatcactaatacaaatagggttgtgnaggtaaaacagtctatgttcctggaagcctgcatgacagtagccaagatctaaatcctggggcaggacaaaggatattcatggccaagtctctaaactcactaaggaagtacctggctcaacaagccacttaatatgtacccagctacaccctagaaacactttgtcagttttattttaccttaatatacatttgtacaggcaataataaaaaggctattacacaacaattcagtgagttttacctagtttcaagaataatgcatgcagttacaaatgagaggtagaaacactgtattaaagacctaaaaatacaaacgtcatataaataaatgttcaaattaactactggaatttcatacagataaataaggtaaaaattacattactttgtcaaagtaaaggacaaccatgtttgtttttatcagtacattaaaattagattaatgccaaagagctctgtgcaatttgtcaaagagttcagattattttatgtaaaaggattaaaataaaaggattaaaattggtgaatggtttattcaagtattcaagcaggtaagtaaaagaaaccaaataatacacaacgtaggaaccattcctggagggatattaagttaactgcctgcattctccatgactagctatttggtgaactgtcagaattaacatgaaaaatacacattaggcagaagacagctgcccattttcctaagagaaaacgaacttcattttccactcactgcatgtaggaactccacatcactaacaagcctttaggtcaccaactttgttttggccctattcaaattatcaagagtatctcttgatccatgattttgtttctaatactgcccccaatgtaccctagccttgtagatgaacctaaggtcaccaggcatcacatggacacttctgcatgcacccatgaagaaatgggacccaaagcttaccaaaaccttactgagaaaatctgtaggtgtagataaagaagttnnnnnnnnnnnntgtgcaaaggttcacatgaatacaagttttaaccacttaaaagttcactggagattacatgtgaattctggaaagggtctatgtatacaatcaagtaaaatattttaaacaagtccattgtgccttagttaaattacaaaatccaatacacagttgttttaataaatttagtgcaatatgaaagattttggaagattaacatgtatccatattaggatcaaattgaagatttcaaaatttcttccaagatccatgtttcacttcttcttaagctatttcttcccccggccgtaatggccgaattcccgggcatatgtccggtaccgtcgactg

SEQ ID NO: 91229 - DNA, 577 bp, Homo Sapiens
ttgaacttgctattcagtctgcttttgctctggaggggggatttgttagccaagaagaggctgaaaacatgagtagtgtactttgggagactagaaggacgaacgttaaaagtatacgacctccaaggttgtgactctggtagaattctttggttagagatcctgaaggacagcatcctagggataatggtgaaacagaagtagaccattcacatagagtgtagtttagcattaaatcatcaaggtggattagtaaattgtgagattttggaagtggactaaggtgaccttaggtttctaatgcccctaggaacctgaaagatagaaacctggaggaagaatattttcctaggcctcaaattatttgggtactttttcaaatacagtatctccacataccctggatacaggaggagaaaggcggaatgaaaactggcagaaacagtagacccaaaggggcaccaaataattgcattgtgaggtagactttaagtatgtttactgtattcaaggagataaaagatggaaaatttccatatagaattggaaactataaaaaagtcacagcagatttgtt

SEQ ID NO: 91230 - DNA, 494 bp, Homo Sapiens
  misc_feature (111)..(111): n is a, c, g, or t
tgttttaaaagacagcgtttttattacaggaggttgtaaaactagtctgttttatctgtttcagattaatctcaacttaatttcagtaatgaaaaatttgctctatatgcnttcattctgcccatgctgttattgtcacaaactacatctttataataattatatgtccatcaacatagttttataattacgcagttttaaaaatcaggagggaagaacaagagttacgaacagatatacattgtcttgctgctccaaaatctgcaatgtaaaaggccccatgcacaagggcaatgtgctaattctgttggagtcatgagtgagaggcccagaggttgcacctcacttggctgctcactgggtcttggatgcagggttcaaccacttggccagtgggaatggtgtgctacgatctgctcctttattttattttttgctcaccacacgggaattgtgatgcacccttaaataaagcatttgtgttccaaattaaa

SEQ ID NO: 91231 - DNA, 521 bp, Homo Sapiens
gaccttgggaaactgattgatccttgccaaaaggttaaaaggcatggcggttgcaatgaacttggtgtccagtcagaagaccagaagtgggggtcaccatgcagcactgcacaaaggacaacacccccaagatcatggagaaatgcaccatgccgctgaccgggaagcggtgcgtggaccgcatcatcaccgagaaggccgtgtttgacgtgcacaggaagaaagagctgacgctgagggagctctgggagggcctgacggtggacgacatcaaaaagagcacggggtgtgcctttgctgtgtccccgaacctcaggcccatgcagcaggtggcaccctgacgggacctggatctgggcggggtggtgcgctcctcagggcgggtgccaccgggttccccaggggaatacatgtccccagctctgggaggggtttgccactggcctcctactttcctccctaggtggacagtgctcctctagagagctgcgactttaattaaaaacaacaggaaaacaaaa

SEQ ID NO: 91232 - DNA, 887 bp, Homo Sapiens
caagcgcttcctgcgcagcgcctaggcgactggagtttgtgacgctgtgatggtctaagaggctggagaatcaagatctgggtgccatcattttctggttctgttgatgaccctcttccaggttacatacagcttacatcttgcatcctcaagcgtttttcttataaggctaaaaattcacaaagcatatatcaatgaatcaggaggatctagatccggatagtactacagatgtgggagatgttacaaatactgaagaagaacttattagagaatgtgaagaaatgtggaaagatatggaagaatgtcacaataaattatcacttattggaactgaaacactcaccgattcaaatgctcagctatcattgttaattatgcaagtaaaatgtttaaccgctgaactcagtcaatggcagaaaaaaacacctgaaacaattcccttgactgaagacgttctcataacattaggaaaagaagagttccaaaagctgagacaagatcttgaaatggtactgtccactaaggagtcaaagaatgaaaagttaaaggaagacttacaaagggaacaacggtggttggatgaacagcaacagataatggaattctcttagtggactaccccgggaatttgaaaataaggggttgaacctttttcctgagtccagaaatcttttaatggcactgaaaaactcaaaatggctttaatattcagaggacttttgagggggaaagcttcttgggataccctttgggccgaagtgtccctagaaagaaccattgtttccctcctcggcctggcgataacaagcggggtgcatgcgacggaagcgcggataagaggctctttctacgtacattcctttctggtgaagaggaccattgac

SEQ ID NO: 91233 - DNA, 503 bp, Homo Sapiens
  misc_feature (12)..(12): n is a, c, g, or t
cacgcccttccngatggcagatctgaacacggcggccctgggaggaggcaacgcgaggacggctatttgctggggctggcaatctcattggcatcctggccagcctggctgagagatgaggctggactccggtccccgcgggccgctcacctgacatgtggacctgcagctttgtccccactgtgcatgccggcttgagactggagccccgcggtgcagggcagttcaccgggtcctgcaggaccaggtgccagccactaagggggggcaccgccgatgccaggggttttgcccacccgggccccagcgttcccagagccaaatgacactaacttatagaaggggagggggcaaagggcttcttcctcaggccagctcttctgaggaggctctgccctctccagaggtgccagaccgcggattttatttagcaagcccagaccttccggtctaacgtctcacaccacgacggactccccttcctaataaaactcaaagacaaa

SEQ ID NO: 91234 - DNA, 611 bp, Homo Sapiens
acatgaacacttgcataatctcgtacatgggactcacagaaaatgcaacccctaatatagatgagctcgcaatgaaaaattatccaccactgtggcaatgcagtcaccaaaaggaagactcaacagaccaatgagcatagacacgagctgtggagtatgatcagcttgtcgaaagaatgaatcaatgacactctgtcttcgtggagagcagcctgggtgtggaatcaggcacccccgggttcaaagccatcactggcgaactcacaaagagtgggactcaccgacctgagggtttgccagcacactcgtagcccgcgggactagagtatttgtgagagaggagtgtggtcttttgattgaagaacagaagtcattcgtgaaggacacagcacacacagcccagagagctcgcaggttaaaactgcacatggagcaatgtctgccagccattcagggtacttcaaaatagcaaacacagtattcacaatcaagttatttagaccttttagattgtatacaaatgacatagaaaaatgtacagccagtccactgggttgtaattttagaaacaaacatctcaagtcataataataaagtagagttttaaaaaa

SEQ ID NO: 91235 - DNA, 472 bp, Homo Sapiens
ttcagttctatcatctctggaaatggacaccccagggggaggacaagtggactgactgcgtagttgaatctggcaaccgagaggccttggaggtgtagaaatttggctctatttcttaagcagagcctattttagtaatcagcatcttaaagcagaaattatcttaacgtgaatcagcttgagttaggattttctcatggatgcggctgttcttttggtcctgcacaaatgtcccaaagactcgggcagctgaagtggtgagaacagcactctgacattgctggttaggtggtttagcttggaggaaaaaaattacaggacgacgtttgcattcattcgtccttcttatcacagtttgccatagcaaaatctcaagagtttgagcaaacgattacttttaactcttgtccaggacttaaagttccaaggaaatcacccaaactaaaactgtctttctataaatgcaaaaggt

SEQ ID NO: 91236 - DNA, 480 bp, Homo Sapiens
ctgccccagccccagcccccacctagccattcccgccctgcctgtcacggccctgcgccctcccgcgggaactcagtttaataattaattaagctctcattccacaaggcgccagttatttccagcacggagcagctgcccaagttacctgggagatgggaaaatcgtgtgaaagctggttaaccctttgaggattagagtaatggtggaagcagaaaggagaaggagtttcactccaggatgtacgtaggaccagccctccctgcagtcctgtccttcaagactcaagtattgtccactccaaatcaccactgggattcctaagtccaggacagagcttcaggcaaggaaaagaagagttgggaaagccagtttccaacatttatcagccacgtgtacctgcaaactatataccttgggtaaatcatcaatctcttgaaatgggaaaaaaaccatttgccttgttttttttaaaaaaaa

SEQ ID NO: 91237 - DNA, 420 bp, Homo Sapiens
tccccctcccctccccagaagtgggggccgagttgcccactccccttcctagcagcgggttatttccagcaaccggagcagctgcccaagttacctgggagatgggaaaatcgtgtgaaagctggttaaccctttgaggattagagtaatggtggaagcagaaaggagaaggagtttcactccaggatgtacgtaggaccagccctccctgcagtcctgtccttcaagactcaagtcttgtccactccaaatcaccactgggattcctaagtccaggacagagcttcaggcaaggaaaagaagagttgggaaagccagtttccaacatttatcagccacgtgtacctgcaaactatataccttgggtaaatcatcaatctcttgaaatgggaataaaaccatctgccttgtctccccccc

SEQ ID NO: 91238 - DNA, 787 bp, Homo Sapiens
agttggtcaacttgaagaaagctgggacgtttcagtctaaaataacattcttgctttccaaatgccagatgaacctatcattaactaagaccaattgggactagaagaaaccctgccatcatttccatttctccatcttggtgtttattctatgactacttgtcacttgcctggggctcttcaaagccaaaaggtgttgaacatgggaagcattgatactggaattagaggccagtaaggggttgaatccctagtcaagtcatcagagtttcattattttctgttacctaccaggtcatcggatcaaaaggatctcatttctcagcactcctctagtaatcttatggggctcgagaaatagtgaccataaaagctttcagaaatatggtggaaggataggaatttggggactagaagccagaaaacagaatctaaaaaatactggcagttaaaaaagtaaataaatagaaagctaagaaatatcaaacgtcagaaggaccgagacagaaaatacagtcatgtgttacttaatgatggggatatgttccaagaaatgtgtcattaggtggtttagttgttgtgcaaacgtcatggagtatacttctacaaacctagatggtatagcctaccggacacctggtctatatagtgtagcctattgctcctaggctacaaacctgtatagcaggttactgtactgaatactgtaggcaattgtaacacaatggtaagaatttgtatatccaaacatatctaaacatagaaaaggtacagtaaaaatacagta

SEQ ID NO: 91239 - DNA, 805 bp, Homo Sapiens
atcctcccaaagtgctaggattacaggcatgagccaccgcgcccggcccatatatagtcttttaaaatgtagtatcaggaggcaaaagaaagcaagaaaactttctggaggacagtttttcctaaagcaaaaaataaatggctttactaacaaatcacttcagaaattccatgtattcagttttgtaatcttggggagagaaggaatttctaaatgtcataaagataaaagccataaatgaaaatattaatgatttcactgcataaaaacttaataccacatcaaatgccagaaataaaatgaaaagtcatataacctgagatggatggcagaaaaatgggttaacatccttagtatacaggaacctcttgcatatgagttaatcagaagcagccacagataccaatagaaaaatgggctaacaatgaaaaattcaccccccaaaatgcagattgccattgaagataggaaatatgttcaaacttattagtagtcaaatgtaagctcaatttgcacctatagaattggcaaaaaatgagaaattaattataatacccgtgtagtaaaatggacactctgttgtactattggtcattgaatcaaagcagtcttgacagtatgcaaaatccttaaaatcatggacacttttgatcaagcaattccatatgtaagagtttatcctaagcaaatcattaggatgttggtcaaagtgtacagtgttaggaggaatacattttttgagataacactgcacaacatggtaactacagttaataatggtggtgctgggcacggtggctcacac

SEQ ID NO: 91240 - DNA, 889 bp, Homo Sapiens
tgcgtgttctgccggatcgcggggcggcaggacccgggcaccgaactcctgcactgcgagaatgaggacctaatttgcttcaaagatatcaaaccagcagcaactcatcattatcttgtggtgccaaagaagcatattggaaactgcagaactctaaggaaagatcaagtagaactggttgagaacatggtaactgttggaaaaaccattcttgaaagaaataatttcactgacttcacgaatgtgaggatgggttttcatatgccaccattctgttccatttcccacttgcaccttcatgttctggcaccagtggatcagcttggcttcttatccaagttggtttatagagtcaattcctattggtttatcacagctgatcacttgattgaaaaactaagaacatgaaaatgtcaagagtggaagatttttctaatcttggttcagcatgaagtggtatttaggtcccttttaagtctaattgcaattttaagatttgttgggttttatgagaggctgttacttagtggccttaaatcttttctgaatgtctgtttcctaagatctgtgatacagttatgtgaatattttgttactgacttgtttcaatggttacttgtataaggattttatatatatgatactatagataaaatcctatttaagacaaattctgttaatcaacaagggctctgtatttttttaagttaaaatattttcatttctcagtaagtagtcagttataatagtgatttatttatgaagaataaactactatagaaagtactttgtgggaacctttattactgtgaaggagaaaaatagctatttcttgacagttctatagttttacacataaattttcaaaataaagaataccatactaaaa

SEQ ID NO: 91241 - DNA, 373 bp, Homo Sapiens
ccaaacgagtttgtgcctcactttgtcgggttttggctgtgacttggagcctcaccaagctcccttttcctctgtctcccattctcctctccaggccagggtggcttccccagccctcctccccgggtcctgcctgtgccgagccttcctcccaggagggaggtgatactgacttgagatcttatgggtgttttgtttgtggctgggcctggccgaccctctctccacggccttagatcacactctggatggataggacagtcgtcctcaatactgagcctctttggagcatacccactgatggtggttcacaagctacccacgcccacaggctgacccagatctccgtgaaattaaaaaatactgtgaaagg

SEQ ID NO: 91242 - DNA, 595 bp, Homo Sapiens
gccaatctatgtgccccagcagccaacttacatagtactgtgtgcaggcttgtaaatagaccttccagttctgctataatcaagaccttattgtccataactcaatttggagaaggtttagctgtctaccaactcttgtggagagtttctatgaagttttgttttgggttgcaagaatctggaaaacagatgcagatgtttttgaggaagattttgaaatttctacttataaggtacccaaaatgggatccaaactcttgaatttggttgatcttctgaaatacatacctgtgttttaagatttgcttgagcaaaactttaaccatggaaatttgaaacaatgatttccaggttgaaacaattccagttttgtcatataaataccacaaatgaatctgttttagcacagagtacaaatatcttttttccttttgagcatttggcaatagtgtgttttggtaataaaacatagatctgcatattaatgaaacatagctctgcatattttgtctggggaaaattagcattctgtgaacaaagtcaacaatttctggcctcgcattagttttcctattataattaaaacttagttttg

SEQ ID NO: 91243 - DNA, 543 bp, Homo Sapiens
tttggcaagataataaagaggttaaagaggctacgtggatctgtcactgctttagcttaccattttcaattcagcaccaaagtgctcagaaagacaggctcagatcaggacgacttcttaaagggattcacaggcaatattactggcaaaatgattttccaaagctgagccacgcgccccaccctacagggaggggagtagaatcttatggcccagcattggcattgaggcatcttgctttttttcctcagaattccacaaaggcttaagagtgatctaaatgcctggctggaagctcaagtctaggagagctattttactgcactgttgagatgttctctgcaaggtagtcacagataataagcaatttagtagataattattctatacaagaattaatgttctctgaaacagtgattaatagaatcttcacatctggcctggctgggaggcttgggggcaggaaagggagggtggaaggatgggtagcacatcaaaatggtgatgaacctggcaaaacgacaatgctgctgtttttgtatc

SEQ ID NO: 91244 - DNA, 539 bp, Homo Sapiens
tgcggccgctgggacccagccaggtaccggtccggctcggccctgcccctttccggccgctctcactccttccctcggcctcgagttcctcgtgggcccgtgggggccgccgcggggtcggggctgcgaggcagcgcccgccgttccatggtaagcggtgctacgggacgttcggaaggaaacctcgctagagcaggggacgcctgggctcctggctgaccacggggcctttgcacggccagggctttgcgaccgcagtgtcttccttctgtccccggtcgtgcgccgtgcccctcagcgcggctcacgtttcggaacacgtctgcctttcatgcctcccgaagagcctccccgcatcccgtgccccctgctcgctgctgccgctgacccttgggcgctgcgctggtccagagcgtgttgtcctctgacgccgtcagaacctgagctccctgcgagctgggactccgccgtgtcttcattgcctccagtgcaaagcaactgcttgcaagagaacaaaagtgtgttcaggtgcacagagt

SEQ ID NO: 91245 - DNA, 620 bp, Homo Sapiens
gtctcttcaattagatttggctttagtttagaaaggggtttggtaagtcatgtcttccatatgacatttctactcatccccacactgccttccacttaacctgtacagacagccccaacacatgcacatgtgtgtacacaactgtatatgcagcagccagtgggctaacaaatatcagcaaagaacttttttaaaaagaatttgtaataatccgtgctgtctagaaatgtgagttacttaccttattaggaaaccggcttataatactatatatgactctgcctgcattttatagttaagaaatgtacataaaaattgctatattttcacagtttcattataatgtctgtttagtaacccatgtccactgatactttaaatatgctaattactgagcaattgcaatagaaatccagattttcataagaaaatgaaatagaaggatactgcatctttaaaaaatagagtgaagatattttactgtattcgtaacatatgtgatagtggaaaaagtattttcaaactcacaaattttacagaggttgtaaatagtttgatgaagtatgttgggaaagagagcttctagttttaatcacaataaaaagaaaaaacttgttcag

SEQ ID NO: 91246 - DNA, 425 bp, Homo Sapiens
ggcttagagggtggtaaactggaagcagttcaatgggacagtgcttgatgggactttggaggtgatgaggtttgatatagtttggatttttgtccctgcccaagtctcatgttgaattgtaatccccagcgctggcagttgggcctggtgggaagtgtttggatcatggtggtggatccctcatggtggatcccagttctcatgagatctggtcatttaaaagtgtgtggcacctccccaccacctctctctctcgctcgcttgctcgctcctgcttttaccatgtgatgtgcctgctccccctttgccttccgccatgattgtaagcttcctgaggcttccctagaagcagatgtcagcattatgcttcctatacagtctgcagaactgtgagccaattaaacttcttttcttataaaataaaa

SEQ ID NO: 91247 - DNA, 521 bp, Homo Sapiens
tttctgtacagacgtatagatgaatatctgaaccgtaaaaaagttataaaagtgacattaaagacgatgtgtatgcaaatgtttcatggtctaacatagaactgtaagacccatgaagaagtcctaggaacagagaaaatgtcaacaaagcttagaatgcttgaatccattgactgcttttcttcttactgctgttgtggtgtttgaatttctttccttgcaaacctgcatcaacagtggggctgagtccctggaaaccccttcccatctgtgtccttgggggcgggcgggggagctggggctgggagagaagcaggcatggggccccttgactccaagcctgtccgccagactgcttcggggcccatggccaccaaattcttgggggttgggcagggggctggggaggcagggcagggaaaccggttcaacttctccccaccttcactgagagaaagacctattgtgtccagttcccccaaataataatctagtcagaagcaatgagacctgtgtgcctg

SEQ ID NO: 91248 - DNA, 471 bp, Homo Sapiens
gcacagagctctccgggattgggggtcagggcagcgatgcagatagatctccagtttgggacagagggagaacgattggatggactctccccccctggcaccccgcccactcacacactcctccccaccattactgggcaccaagactgggcatcacgtgccgcgcggaccagcctggcggagccacagcgcggggactgcttagcacctcatagtggctgctgcgtgctcccgagctcctgctcccagcgcaatcttcctggagctcccctacggtcggtgcctacctccgcccccaccaccccgctaattcccgtgcaaattccaccccagtaaccactttcagcggtcttcccacccagcttgcactccagcccatttcctgaacagtctcccttgcagttcccttgctgggtattttcaatcccatcaactttcgaaaataatctctactcactcttccattcaaaa

SEQ ID NO: 91249 - DNA, 776 bp, Homo Sapiens
tgtgtttctctggaatggtacagtctcccaaagtcttttgaactgcaaatgtctattatcttttattatttaagtcagtatggtctaccactggcatgtcaaagcacatatttctagtcaaaattacaagtaatcagggtcatatggggttaggcattaatgtttctatctgattttgtgcaaaagcttcaaattaaaacagctgcattagaaaaagaggcgcttcttcccctcccctacacctaaaggtgtatttaaactatcttgtgtgattaacttatttagagatgctgtaacttaaaataggggatatttaaggtagcttcagctagcttttaggaaaatcactttgtctaactcagaattatttttaaaaagaaatctggtcttgttagaaaacaaaattttattttgtgctcatttaagtttcaaacttactattttgacagttattttgataacaatgacactagaaaacttgactccatttcatcattgtttctgcatgaatatcatacaaatcagttagtttttaggtcaagggcttactatttctgggtcttttgctactaagttcacattagaattagtgccagaattttaggaacttcagagatcgtgtattgagatttcttaaataatgcttcagatattattgctttattgcttttttgtattggttaaaactgtacatttaaaattgctatgttactattttctacaattaatagtttgtctattttaaaataaattagttgttaagagtcgagcaacgg

SEQ ID NO: 91250 - DNA, 1002 bp, Homo Sapiens
  misc_feature (17)..(17): n is a, c, g, or t
  misc_feature (24)..(24): n is a, c, g, or t
  misc_feature (698)..(698): n is a, c, g, or t
  misc_feature (862)..(879): n is a, c, g, or t
  misc_feature (891)..(891): n is a, c, g, or t
aactatagcggcctagngctagcnggaggcccctgcggcgtgtgttttacaactcggcacgaggcgcgtgggtctggtgaaggcgcgcggatttggcccctcttctcacatcagcgggtccaggcccaaccgacagactatgggggctccggcaaccaggcgctgcgtggagtggctgctgggcctctacttcctcagccacatccccatcaccctgttcatggacctgcaggcggtgctgccgcgcgagctctacccagtcgagtttagaaacctgctgaagtggtatgctaaggagttcaaagacccactgctacaggagcccccagcctggtttaagtcctttctgttttgcgagcttgtgtttcagctgcctttctttcccattgcaacgtatgccttcctcaaaggaagctgcaagtggattcgaactcctgcaatcatctactctgttcacaccatgacaaccttaattccgatactctccacatttctgtttgaggatttctccaaagccagtggtttcaagggacaaagacctgagactttgcatgaacggttaacccttgtgtctgtctatgccccctacttactcatcccattcatacttttaattttcatgttgcggagcccctactacaagtatgaagagaaaaagaaaaacacaatgaagggaacaaccactggcccagggggtnagctgcctaccagggtggtttggcttggctggataccaataccaggggaacacttgcctcaaaaccccccgtctttcagcggcattttgaaaccctggccaccattgcaccaagaccaaaatgggtgtccaggaaccatgggcaaaccccccccttccttccannnnnnnnnnnnnnnnnnataaagttctcnctccttttgccccagggttgggatataggggccgggtgcattatccccggcttcccctgaaaccctcccgccctccggggccgtcaaccctctccttccttaagcccccgc

SEQ ID NO: 91251 - DNA, 481 bp, Homo Sapiens
gaaatgttcgttttgtggaaaagaaactagttaaatttactattcctaacccgaatgaaattagcctttgccttattctgtgcatgggtaagtaacttatttctgcactgttttgttgaactttgtggaaacattctttcgagtttgtttttgtcattttcgtaacagtcgtcgaactaggcctcaaaaacatacgtaacgaaaaggcctagcgaggcaaattctgattgatttgaatctatatttttctttaaaaagtcaagggttctatattgtgagtaaattaaatttacatttgagttgtttgttgctaagaggtagtaaatgtaagagagtactggttccttcagtagtgagtatttctcatagtgcagctttatttatctccaggatgtttttgtggctgtatttgattgatatgtgcttcttctgattcttgctaatttccaaccatattgaataaatgtggtccaaacaaggg

SEQ ID NO: 91252 - DNA, 628 bp, Homo Sapiens
tttgccaagtttttgtttttaatcaaaataattaaaataaaatggaagtcaaggagataatttagacatgtacaaagaaggtccaggaaggatttcatcacattgcatcacattgagggcacaacagggtttgtacacctctgcattcagtacctcatttcttcactgctagtgcagagaatgtctaggtgcttggcttcccagtgggatgatggacaagactgaagggaagaagggaggtccatggaggcagggaggctcaaaggcagcactgaagcttgtcaaatgaggcagcaagaaggtcctaggaagacttaggcatccagatttgatcatgtgtgtgaaccattgagggctgaagggtgaaatgacagaaggaagtctggaaagctaagctggtgtcatatgcaggaagaaggaagctgaaggctgtggcctgggttggaactagtttgctggaagtgagtgtacaaaaaagtaggtgacaagtggccttgtggtgaaggaaaaacttccagtttcgtagtacaaggtttgtgaaccagaagggtggctatagaaatagaaggaaaacaaggaaaggttagacggaaatattttaagagatttcgtagattaaccattccca

SEQ ID NO: 91253 - DNA, 886 bp, Homo Sapiens
  misc_feature (14)..(14): n is a, c, g, or t
tctcggcgattttnacgatctaacttcgagataaaacccctatccatttgacatctaaatgtcatagcgacttttgggatagtttgctatcgacaaagggagacaaagtcaaggggtgaagggaaaggagggccaagtagagcctccacgaccctcggcttcctcctcaccagctccccctccctccaagtccagtaagaagttgggccaagctggaagggattgaccgggttgcttgtctggagatggagccactacaggcgggcctgggcgcctggagtcgggcatgaaagaaaatagcgcctcatcgctcttatctaagcccagaggtagacttcgcttgaaaagatccgagaatggaggaggggatcggcactcacttgcagacatcaacagtttccagaaaattcggttcaattccttcaccacggacccaccaaccaaggagctggcaaaacccactaaccaaccaggagaacacagacccgccgtttcctctccctcgccggcctcggcggagattccaggccctatagaaaccaggacgtcccttagcgccaccgcctcacatgccagtgctgccgggaacccagcgatatccgcaccagcggagaaggttccaggctgccggcggcggcgcagagagcgggaagagaggctcggaggaagccccgggcgtggcgtggtcaggctccgagagcggccgggatgcggccacaccggcctggtaaactcgcacctcttaggatcttgctcccggactcattcccttccccaccccctattttaaagttttatttgggtcgtctgtatcaatttagaacgagataaattaagacaaagaaagtaaaataaatcgaaataaaatataggaatagctcttggc

SEQ ID NO: 91254 - DNA, 454 bp, Homo Sapiens
ggaaaaagccggctgttctctaccgcttcttgctagaaacaatggcctatgttaaaaataacttgtcaagaatcagaatcgctgcttgcaacttggcaggaattattatgaagcagatgtctacacattatctgaaaaagctggacttcccagcattacggaattccctccaggaactacagctggacccggatcccggggtcaggagggcagccctggagacgctcacagtcttggatagctgtagtcagcatgggtttctggcttcaccccaaggaatgtcctaggtggtccaaacataagacgtaaactgtcttcttagtgccaaatgcaagccctttttaatttagtttgtaagaagtttagtttgtaggaaaaacactattgtaaaataactagtatccttttgtttccttccgttgaaataaacctccactgtcgttggagtaaaaaa

SEQ ID NO: 91255 - DNA, 472 bp, Homo Sapiens
tgcaaccacgagccactttctctctcaaagtgcccaaagttgctccagtgagttgtgttcctctcactcaagtgaggttgggagctgtttgcaatgcacttgctttatttcaaaccacttcctcatgtctctttcctccaggctaggaaagaccctgctatttatcagatgagcttgggaaccattaggaaaactcaaagtcagaagcaatcaacctgcaaatacttccccgggggtatgggttgaggtcaccagcaggggaagcccccttggacacagtcctgcttgttttgcacctaacatgggctgctgggcccagaatcaaaagttctgtgtggcacagcaggctgagccgagttgaggaaacacaagagtggaggtgtcagagagctcacatttgctgttgtttcctcttgggaatcaaacccaagcttaattgtggtatcaggtgctctaaagaaacaaactgaaa

SEQ ID NO: 91256 - DNA, 554 bp, Homo Sapiens
aatagattctgggctccctcttgctgaagcagtaacatttgaggatcggtgaatgtatgcggttttgaacccgatcaagtcaaagttcgagtgaaggatggaaaggtatgtgtgtcggctgagcgggagaacaggtacgactgccttggatcgaaaaagtacagctacatgaacatctgcaaagagttcagcttgccgccctgtgtggatgagaaggatgtaacatactcctatgggctcggcagctgtgtcaagatcgagtctccttgctacccttgcacttctccttgcagcccgtgcagcccgtgcaacccctgcaacccctgcagcccctgcaacccgtgcagcccatatgatccttgcaacccgtgttatccctgtggaagccgattttcctgtaggaagatgattttgtaaagtgcgcataggaacccattacttaatagaagtcagttactccagccaggcagctctcccaatgtttctcctctccttcccatggcccctgttgttgaagtacgtaggaaactgaatacataactgcaatctgaaaa

SEQ ID NO: 91257 - DNA, 478 bp, Homo Sapiens
tgaatcaagtttctagaggtaacaactaatgttggaactatgaaaagctcttctctacttttaacaaagcttagtcacaaacagttccccagttgataagaaaaactaaaacaacagaacaattgaaagtccgaatctgcaagttcatctctgagaaccgaattttacagccactccagatttgtactccaaatggatagtttgattgtagaaatcacatcccttcagtctgccaatgtgataactgcccaagagaaagtgatgcctacattcatagataatcccctttcccccatcctatatataactggagtcaacagcagctggaggaaaatggcaagaacttggaatcaagattaggttagaataacactgctgtagacagtttatcagctcttcagcatatgtccattttccttgaaggatgagcctttagaaacctctgacaataaagtttattttgcatccaaaaaaaaaa

SEQ ID NO: 91258 - DNA, 470 bp, Homo Sapiens
ttaactgtcagtcggcctgctttaaaagcttcatttccaaattaaagtatttttaatctactgtggttttgaaactaattaaccaggcttgttgagtaaaatagaataaatgtattctcgagtgaagatttcactcatcattttgcctgtcaatatcatgagagactttattatatgtattggctccttagagtgcttactgcatactctctgatttcaacctatgctctgggtagatggttcatgttttatttcatgagaacttattgtttctcattataacatgtagaattatactcttgagcccctctccccttttattaggtaataggtggtagaagataacagaataatcgggttatcattgccaaattatatatgacttagaaagtataaattacttctaccttttttcccctccaggtatttaacgagcagggttaacatgtctgacagtttgtctgagtctg

SEQ ID NO: 91259 - DNA, 961 bp, Homo Sapiens
gaacgtaggctaggtacgaggctgggtgttaatcggcacgaggggagatcactgattagtgtggcatcagcttacagtgcaaagacaccctgtccttacggcccccgcgcgccgggctgctctctgcgggcggcggcggcgcggggagccggttgcaggccgagatgctgcagatggacctgatcgacgcgacgggggacactcccggggccgaggacgacgaggaggacgacgacgaggagcgcgcggcccggcggccgggagcggggccgcccaaggccgagtccggccaggagccggcgtcccgcggccagggccagagccaaggccagagccaggcccgggcagcggggacacgtaccggcccaagcggcccaccacgctcaacctctttccgcaggtgccgcggtctcaggacacactgaataataattctctgggcaaaaagcacagttggcaggatcgggtgtctcgatcatcctcacccctgaagacaggggagcagacaccaccgcatgaacacatctgcctgagcgatgagctgcccccccagagcggccccgcccccaccacagatcgaggcacctccaccgacagcccttgccgccgcagcacagccacccagatggcacctccgggtggtccccctgctgccccgcctgggggtcggggccactcgcatcgagaccgaatccactaccaggccgatgtgcgactagaggccactgaggagatctacctgaccccagtgcagaggcccccagacgctgcagggggcccgtctccggcttctggccgcagactgataggcggattgtcgtcagtccgattcacaacgtggcaggtaccctccaggaggggggccggaccgtcgtcatgagggcgagaaaggtatagggttttaccgggcgggttggccaggagaggtgagggctgtggcgacaacaggcttagctgacgc

SEQ ID NO: 91260 - DNA, 509 bp, Homo Sapiens
  misc_feature (13)..(13): n is a, c, g, or t
  misc_feature (199)..(199): n is a, c, g, or t
  misc_feature (221)..(221): n is a, c, g, or t
caatggtgtaagntccagctcatagtcagcaggcttgagacccagcaagagtccaagtttcagtttgagtccaaaggcagaaaaaagctaatgttctagtttggaaacagtgcaagcatgaagaattgtcttttacttgggggagggccaccctttctgttcagctttcactcgattggataaagcccacccacattangaaggccaaagctttattgagncttccaatttaaatggtaatcttatcccaaaacaccctcacagacacactccgaataatgttctacctactgtctgggcatcctgtggcctagtcaatttgtgaaataaaattaaccatcacgctgactataaaacctcttgactataataatggatgcttgaaaagaaatcttcaaaggagtatcttcaaagtgctaaataataatatctgtgagcgaagttttgtaatctacaaaaatgtcctttaaaatgtagataaaataaagttccttatgttaaaacttaaa

SEQ ID NO: 91261 - DNA, 1758 bp, Homo Sapiens
ggacgttggggtggtcgtccatggcctaccggcccgggaccttgcccggcacttcatccagcgctggaacttcaccaagaccaccaaggccaagtacaagactcccatatacccctacctgcttcccaagtctaccagcacggccaatcagctccccttcacacttccaggagggcagtgcaccaccgtacaggtcttgcgatcagtggaccgctggtcagcagggactctggagaactccatcctcaatgcctacctgcacaccatcagggagagccagcacttcctctacattgagaatcagttcttcattagctgctcagatgggcggacggttctgaacaaggtgggcgatgagattgtggacagaatcctgaaggcccacaaacaggggtggtgttaccgagtctacgtgcttttgcccttactccctggcttcgagggtgacatctccacgggcggtggcaactccatccaggccattctgcactttacttacaggaccctgtgtcgtggggagtattcaatcctgcatcgccttaaagcagccatggggacagcatggcgggactatatttccatctgcgggcttcgtacacacggagagctgggcgggcaccccgtctcggagctcatctacatccacagcaaggtgctcatcgcagatgaccggacagtcatcattggttctgcaaacatcaatgaccggagcttgctggggaagcgggacagtgagctggccgtgctgatcgaggacacagagacggaaccatccctcatgaatggggcagagtatcagggcgggcaggttttgccttgagtctgcggaagcactgccttcggtgtggattctttggagcaaatacccggccagacttggatctccgagaccccatctgtgatgacttcttccagttgtggcaagacatggctgagagcaacgccaatatctatgagcagatcttccgctgcctgccatccaatgccacgcgttccctgcggactctccgggagtacgtggccgtggagcccttggccacggtcagtccccccttggctcggtctgagctcacccaggtccaggccacctggtccacttccccctcaagttcctagaggatgagtctttgctgcccccgctgggtagcaaggagggcatgatccccctagaagtgtggacatagttgaggcccccgtcagggagaggtcaccagctgctgtgccccaccacgtctggctccctgccccttaaccccaaggactgagggcagtgccctttgagatctggggaggcaggcattcctgaaggggaactagaggtgttacagaggacccttacgtgagaaatagctgaaaagggcactcccaaccctgggctggggaggaggagagagtcccagagctcatcccccctgctgcccagtgcaaaccacttctccatgctgcaaaggagaagcacagctcctgccagggtgagcagggtcaagcctcttattccaggagaagggggctctgccccaggccctactacccattgttcccttcctcttcctgcccttgaaccccctccctgtcccagggccctcccagcccattgctgccaaggtggagggaaggataaagccacttctggcttcagcccccaccaggggaaggaaggagggcacattaactccctccaccagcctgctgacagacactaactttgtatccgttcaataagcatttcataaataaaggtgtagaaaaggttaaaaa

SEQ ID NO: 91262 - DNA, 1133 bp, Homo Sapiens
tttttattttcagtgagttgtatatttttacacatcagtgaggtatgtatagtaaaacttgggggaaaaagttccaaatacaagcctgaagaattgctgcagcctcagaataaagctaagcagcattctttaaggttgtgccacccatgtgtgggaggaggttgacatctttatggaaacatcatccactgtagtcatttgttcatactttcagaatcttaacagaaattgttggatgaacatgcttctgctttgtagattttgccttagtgtcatgcccatacattgagtttacacagctggtccttcataggattccaaagttcaagggagtttttagagttagttgagaaacttgatgatctttcactgctgggaaaaactgactccttcttgcagcagattctttggctttacacacaagtctgaatgtccttattttaaagttttcctcaaaggtgcaacattcatggaatagcttgccaggaagatgtgaaacttttctacagacctttgaaatggatgagaaacattgtatgtagggatgtttagcaatcagtcttttaatagacagcccacattgtttcagcttatttcatgaagtgtctgaggcagaagctgatgataattttgggagcagtattcgtgtgtgatttaaaagactgcaggaatactgcaaaaatagaatccatttattttcaccacttaaggcagcttcatgtgatttcctcgtatcatagaaaatagagaaggaacatggatagcattagcactaataatacacacttgaagttctcagaatactgatgattgaaaactcaaacaactgcctctgttgaagtcttctttttgatgagatgcctatgtttagctgacgacatttcacttttaagggcttcttcactggattctttccctctcctggttataaggcagcaacggggtttttattttttcccctgtcctgaaaagccccagaattatctggttaaaaggctgaccttcttttcccccggctggggggggccttcaaggaaaacgttttcttccccccccggaataaaaaaattttgcctacaggcccctggatgaaccggccctgttttaaaaaatctggggaaatttttttcctg

SEQ ID NO: 91263 - DNA, 520 bp, Homo Sapiens
gagttggtgggcaaaactctaaaaatctaaatctgatgcttatgtaagggttgagcgaattagggagatggctagtggaaattggagggaatttgtttggcatcatttgtctaggatctatgcaaatatagctccactaaaggaccatagggaagagccagccttgcctttttttatatgattttgtttacaaaattttactgggacttttaaatctagctatagagttgggaaaaaatatttccacttagatattttacatggttttgtttaaaattaccattacttgttttttaaaaacacatgaccacatatgtatatgtatatctacctaaacattgtatcatggtttcagtatgttattcatgtattactgggagatgctaccaagaaaccaacccaaagaaaattctgaaaaatacatttctatttatagaataaatgtttcatttatataaaagcaaaagaacttagagttctaataaatgggatgtctaataaattatgaagttactgaaaa

SEQ ID NO: 91264 - DNA, 524 bp, Homo Sapiens
aagtttcaaggtggtaagaactttataataaccacatatgacagtaagagctcaaagaccatcagttaagagaagcctaaatgtccattcttctggcttccttcttggatcatgtctttggtgactatctcgtggagtatttcctaaaaccaggcataatgttccttcctgctctcttcgttctggatctcatctaagcttggctttctctaatctgatctgtcctgtgtgggtaaggagaaatttccccaaagattgaaaattatgagaaaatagagctaagattgtgactcagaagtgagtcttttcctgaccgtctgatgttataagtcagctaagacatgtgagcggcatgtatttgactcaatgtattgtatcctaggcattctttgtggaccacaactcccgcaccaccactgtcatagatccccggctcccacttcagagcagtagacccacaagtgcgctgggttcatcggcaacacctgacaaagcaacgcaaccacagtgcgggtgaggtgagt

SEQ ID NO: 91265 - DNA, 352 bp, Homo Sapiens
actcagctggcttaatgaaagacacgggtgtgggactttgtcagcagatgcaagcctggagccaccacacagcagagaggagtaggaaaccagagtatggaagccccttcctctcctgcaccaaatcactcacagcaccatgatgggcagcagtagaaggattagaaaccacaccgccctgataggagttgaacttttcttcaactggctcttaagctgacatgagattgcgctagttggaagataccaagatactcttaaaagagaagatgaagttctcatgtttcaacccctattactattgactgtcaacttcccaaaagaccccagaaaaacatgttactggaacaaa

SEQ ID NO: 91266 - DNA, 409 bp, Homo Sapiens
gggccgccctgagacgtggcgactacagagcctttggccgcctcatggtggagagccaccgctcactcagagacgactatgaggtgagctgcccagagctggaccagctggtggaggctgcgcttgctgtgcctggggtttatggcagccgcatgacgggcggtggcttcggtggctgcacggtgacactgctggaggcctccgctgctccccacgccatgcggcacatccaggagcactacggcgggactgccaccttctacctctctcaagcagccgatggagccaaggtgctgtgcttgtgaggcacccccaggacagcacacggtgagggtgcggggcctgcaggccagtcccacggctctgtgcccggtgccatcttccatatccgggtgctcaataaacttgt

SEQ ID NO: 91267 - DNA, 455 bp, Homo Sapiens
  misc_feature (309)..(360): n is a, c, g, or t
aaaaagtgcgtgggagccttgcttctcaaagtgaggtccaaggaccctcagcgtctgcatcatctggtttggggagcttgttagaaacgcccagcggcaagccgggcccagccctccagcaccagcaccgcattcaacctgatgccaccgattcctgtgcacctgagaggccccatggctgagccgtcccctcctccaccgcctcagccctgccagccccctggaaagatggtggaaactacagaccccctggcctcaccccggggatgcaggccgtgctggtttggctgagcctggtgcctctgtgcnnnnnnnnnnnnnnnnnnnnnnnnnnnnnnnnnnnnnnnnnnnnnnnnnnnnccctgggccagggccgtccaatagaaacacagcatgagccgaagatgtgcttttcattgtctagtggccacattaaaaagatgcagatgaaactc

SEQ ID NO: 91268 - DNA, 551 bp, Homo Sapiens
tatctgtagattaagacttagaagatatatcaaccaagtaaccacttacaaaacatagactggatttggatcctgaattgaacacattttcttttaaagagtcctgagggccaagatggcaaactggttccaccaagccaagcaagcccaaaccatcgctacccaggatggaagcctcatttcgccagggccacccatgaggcaagcgaatgaaatattcacctggactcaccatcatcaacacttcaagaaaactgtggtttggatgatcaaaaccatttaccatcccagccagcctgcccccttccaaaagaaagagcatgtttcagcaccaactcctacaaagaagagtgactgctttaaaacagggacggtcagatgggctaatttcctgaatgtttcccaaatatttcttttcatttcttcctataagagatgctttccacaaataccaaggtattgattttccaattgatcgaggtggagaatgtttcatacagttatgactcctgacaagtggggaataaaaagccaatcataatgagaaaaaa

SEQ ID NO: 91269 - DNA, 643 bp, Homo Sapiens
tgcagtatgcagctcatgtatgggagccaaactcatcagtcactaccagtgtccatctctactgtactccctcagcatcagagcatgcatcaggggtccacacaggctcagctctctccaccacccagctcttccttgaccttcacgaagggatggctctccagtccttgggccccgtagcacacagttacagtgtcctaagatactgctatcattcttcgctaatttgtatttgcattccctccaccatacaaaattatgagaccccagagggggaaggtctgggtcaaattcttcttttgtatgcccagtctcctgcacagcacctgcagcattgtaactgcttaataaatgacatctcactgaacgaatgagtgctgtgtaagtgatggagatacctgaggctattgctcaagcccaggccttggacatttagtgactgttagccggtccctttaagatcaagtggccatgccccctgcttcccatggttcactgtcattgtgtttcccagcctctccactcccccgccagaaaggagcctgagtgattctcttttcttcttgtttccctgattatgatgagcttccattgttctgttaagtcttgaagaggaatttaataaagcaaaaaaactttttaa

SEQ ID NO: 91270 - DNA, 443 bp, Homo Sapiens
gcccgccgctgagcacagccaatccgcggccgtccactcactgtttcggccaatcaccgagcagacggcccggaagctcgagaggctcgtgccaggtcggggggcgaaggagaggccagcccaccaagcaggggcgtcaccaagggaaagccaatcaccattatttctgaagcccaagggggggggacgagaagtcaacataatggtggtgctgctggaaatctagcaccaggggagagcctgagacttgtgtatctaattgcctattggacacctccatctgggtaaacccaggcatccagaactttccctcaagacttacctacctcagtgcaggtcgggctggcctcacgcatttcgcttggatgcctaaatctgtctccacgtggggccggtcgataaaacaacacttcccagaatacgctgcgatccattcgcggtct

SEQ ID NO: 91271 - DNA, 492 bp, Homo Sapiens
tacatgtgcatgctgtacatctaagccaagacacataaaaagaatcagtaggatgggtgcttagcttactcctctcactctctcttagttggttaagaaattaagttggtcctctgctcttagctggtcaagatttgtgtcaactggaaaaatgggaatctgcccactctgctgcaaaggtactgtgctttctaagatgggattttctttctgataacacagaacccacacatttcctctcccatcccgcagccttaggctagtctctcttacatctctctcctttctgatttgaaaggtattggcctctttttcttacctctctaaaattgttagcctgatcctagaatggatttagactttcacaggggatatagattcattgtttctgggtagattttgttttcagtcctgtagtacaaaccactcccaggacaaaagagcagagtttcttatttatcttcttaggaaggagggaaattacaggggaaa

SEQ ID NO: 91272 - DNA, 723 bp, Homo Sapiens
caagctataccaaagaaagtcaggtgcatggatcagccattagaattgaacataagcttaatagagcttcagagaagaagggagaattgttgaaaccacaaagcacaacctagcatttgtgaattggatgttgacaaatattaatcaaataactcaatggatgggttgaatatagctggacagttcactcatgacccggaagattagagcaaggaaggaactaagaaatggaaagcatgaaaggagagttaagaaatgtggaaggtagaagcataaatatttttctaatggaaattccagaagcggaaacaaagaacatgtgaaagaattattgctgagaatttccccagaattgaagactactttagaatgaaaaaggccaactctaactttgggatttctagcttcagagaaatgaaaatttagaatgaccaaggggagtgcacaggattttttgggcagtgaaactattctgcatgatactataatggtggatgcatgctattacacatttgtcaaaacccattgaatgtacatcactgagaatgaagcctaatgtatgcactttggatgattatgatgtgtcaatgtatgttcatcagttctaacaagtagaacatgctggtgcacgatgttgatatggaggctgtgcatatatgggggaggggatgaaaggaactgtgtactttctgctcgtttttctgtgcacctaaaattgttctg

SEQ ID NO: 91273 - DNA, 471 bp, Homo Sapiens
tatggggtttgtttatgatatgctttatgtagacaaagtttgaggtcttttaaaactgggatttgagttgaaaagagtcaggatgcacatatttccactatttcaggattttcagatgactaggcacatgttgtggatgatactggtaccaactaccaatgaccaactataaagtacccctgcaataagggagacttcctttttgtagaatagtcctgaaaatactgacagatctgtggttagtttgttattttattgcataaaaaacagtttaaacaaattttatagccaaagttttatccttgatgggtttggccagactgcaatttcttgactaaagcttttaatgccaggttaaacaggagaaactttttccactagaagaaaatccttgctatctattttttccaatagaagaaaatccttgctatttattttatttgatgaataaacaaatttattgcagtagct

SEQ ID NO: 91274 - DNA, 441 bp, Homo Sapiens
  misc_feature (24)..(24): n is a, c, g, or t
aagacatctggagcctggagatcncagggctgatatggcaacagtgcgatgccccccatggatatggggtcgttccatgtttcttccctgccttcctcagcatgttaacctttcagcttcacatccacatcctcatggtcacaagatggctgacaagctccagctctcccatccctagaaagacttcagctggcaaagcaacgcaaatggctgagcgtcgaggatagaagtggctgaacagcgagcagagaagcaactgagcatcggaggttggagatagatgcagctaacttcagatactgtggttttagagaggggcctggccagagacggctgggttccagggacagaccaccttcccatcccctttccagcctccctttccactgagagctgctcgctgctcaataaagtcttctacattcatcacccttcaaaaaa

SEQ ID NO: 91275 - DNA, 624 bp, Homo Sapiens
ggttggctgtccatcttgtaatggtgggagtaaatgtttccatagatgataaggcagttcttggctgaattcagcttgtgtttcttttggagggtgggcaaatcagagggcagagattatttagttgcattataggtattcttctataccacttgccctttgaaaccctcaacttgaggtaatgtgcagtctggggttttaattagtattaataatcttgtggatttacagaaatctataatgcacagagttgagttttaaccaatgatcgtattcatagaaaatatttcgaaccaccacattcttcatggtcattttagttagtacatagtcattgagtggccagccacacctgacacaatctcccagcatccaagattggagattcctggtctgtgtagagtatatggttttgcacgaaatctttctagtcttgtgattgcttcagtttaatttgtcacataaaaccacaagtatttaatattaatgtatcagtggtttggtgtttttgttcccagtactgggctttgcgccgggaaaaatctgaatactggagctacagagttaactctaaaagtgcttttattggtttctagaaactggaagaagagaaaggcaaaaaaa

SEQ ID NO: 91276 - DNA, 1222 bp, Homo Sapiens
  misc_feature (473)..(473): n is a, c, g, or t
  misc_feature (493)..(493): n is a, c, g, or t
  misc_feature (507)..(507): n is a, c, g, or t
  misc_feature (576)..(576): n is a, c, g, or t
  misc_feature (600)..(600): n is a, c, g, or t
cgcggggctgtcacctccgcctctgctccccgacccggccatgcgcggcctcgggctctggctgctgggcgcgatgatgctgcctgcgattgcccccagccggccctgggccctcatggagcagtatgaggtcgtgttgccgcggcgtctgccaggcccccgagtccgccgagctctgccctcccacttgggcctgcacccagagagggtgagctacgtccttggggccacagggcacaacttcaccctccacctgcggaagaacagggacctgctgggttccggctacacagagacctatacggctgccaatggctccgaggtgacggagcagcctcgcgggcaggaccactgcttctaccatggccacgtagaggggtacccggactcagccgccagcctcagcacctgtgccggccttcaggggtttcttccaggtggggttcagacctgcacctgatcgagcccctggnatgaaggtggcgagggcggnaccgcacgccgtgntaccaggctgagcacctgctgcagacggccggggacctccggggtcagcgacgacagcctgggcagccntcctgggaccccggacggcagccngtcttcaggcctcggcccggggactctctgccatcccgagagacccgctacgtgagcttgtatgtggtcgtggacaatgcagagttccagatgctggggagcgaagcagccgtgcgtcatcgggtgctggaggtggtgaatcacgtggacaagctatatcagaaactcaacttccgtgtggtcctggtgggcctggagatttggaatagtcaggacaggttccacgtcagccccgaccccagtgtcacactggagaacctcctgacctggcaggcacggcaacggacacggcggcacctgcatgacaacgtacagctcatcacgggtgtcgacttcaccgggactaccgtggggtttgccagggtgtccgccatgtgctcccacagctcaggggctgtgaaccaggaccacagcaagaaccccgtgggcgtggcctgtaccatggcccatgagatgggccacaacctgggcatggaccatgatgagaacgtccagggctgccgctgccaggaacgcttcgaggccggccgctgcatcatggcgggcagcattggctccagtttccccaggatgttcagtgactgcagccaggcctacctggagagctttttggagcggccgc

SEQ ID NO: 91277 - DNA, 379 bp, Homo Sapiens
gcaagaacaggatatccaggtaactagagagtgggcattgataaaaatatctggtggagaagcctaggatttcaactttttgtcagaggattcctgttgggacagctttaccagaaaagaataatagcggatatgttcatccaaactaagaactttcatgcatcttgcattgttacatagcctgtggaatgaattcattttttctcccttgagtccaggaatgacttccctggaaaaactcaatctatatacagctgtgccaaaatgaaggatacctgcctctccgaaactttcactgctgcttctgtcattgttcacttgtcagataaaattttattatctcaggatgcaaatttaaaataaagtgtaaatctatgtt

SEQ ID NO: 91278 - DNA, 455 bp, Homo Sapiens
cgagagcggagcgcaggacagcgcagagccccggcgcatcgcggcgcgcacagacccagatttgtaagaggtgacccaaattcaagacaatgttggatgcaaacggatttgccagcaattgcatcactgtcaaaaccagctctgcccgtgtcttccgaagataccaagtgaaatacatgtagatgggatttacatctgaaaaaccaagtgagaaactgaagaccagagagggtgagtggtttacccagtttggcacaactgaccccaacctagccctccatgaggactgagcgcatgagagatcctgagccacagccgcccagccctgctcctctcgaatttctgacctacaggaactgcaagaagtaatgaaagactgctgtttaaagccactgcattttggcatgatttgttatgcagtcgtagataaccagaaaacatcggatttacatttt

SEQ ID NO: 91279 - DNA, 413 bp, Homo Sapiens
ccaggctgaagaggtagaagttggcagaagttaaaagcaatgtctccacaatggagaagtgacatgctaaaggaacctggcatctagacatttcctaacccccaatccctccttacatatgacctgctcttagaggagtacagcgtggtggttaggagtgtggactcggcagccagaaatcctgggatctgttgcttgttagctgtgggccttaagctaagaacttaacctctctgtgcctcagttgctccatctgttcaaatgaagataatgataatgaagatgatatcacctgctgtgtaggattgttatgaaaaatcaacaattaatatttgtaaatcacttacagggtctggcacataataagtgctgtgtgggtgtttgttaaataaaataatatacaatgacatagg

SEQ ID NO: 91280 - DNA, 491 bp, Homo Sapiens
  misc_feature (31)..(31): n is a, c, g, or t
accctcactggagaagtcagggtagaaattnagccttcagagcccaactcaaggcttctacatcctggggtgcagctgcaaaaggccagacgtggaaaggcctgtatcctgccagtttccctccgtcccagggggctgtgctggcacagacctgagaatggggacacaggtcattcagagctccaggcctggaagcagtgcctcttggtgcaacaagaaacttctccctcaccccctcctttaccctcagatttggagatggtaaccaaaggaagcagctgggacaggtggagaaggaagtaggaatgagtgcacggcgaccccgtgctcctcagggccctcccctgcctctgggtggcactgctttttatagggtggggcaaaattagcaaaaaacaaaaaccaatgacaaccaaactgaaaccgaaacgaaaaatcaacgaacactctgtcctctatccctccaaagaatgaaaatcagaaaaagaaaa

SEQ ID NO: 91281 - DNA, 374 bp, Homo Sapiens
gatgaagtactgatatgcaccacaacatggaaaaaccttgaaaacatatcaagtgaagaatgccagaaatgaaaggccacatattatatgatttcatttatatgaaatgtccagaacaggcgaatatatatagagagaaggcagattagtggttgcttaggctgaagggttggggaggacaaaggggtgactgctaattagtatggggtttcttttttggggtgatgtaaacgttgtaaagttgattgtggtaatggtggcacaactctgaatatactaaaaaccactgaattgtatactttgaatgtttgaactgtgtggtatgtagattttatctcaagttgttataaaaaattaaattacaaatgcaaaaa

SEQ ID NO: 91282 - DNA, 1665 bp, Homo Sapiens
  misc_feature (753)..(753): n is a, c, g, or t
  misc_feature (1310)..(1373): n is a, c, g, or t
cgacacctgctgtgcctggatggaggaggagtgaaaggcctcatcatcatccagctcctcatcgccatcgagaaggcctcgggtgtggccaccaaggacctgtttgactgggtggcgggcaccagcactggaggcatcctggccctggccattctgcacagtaagtccatggcctacatgcgcggcatgtactttcgcatgaaggatgaggtgttccggggctccaggccctacgagtcggggcccctggaggagttcctgaagcgggagtttggggagcacaccaagatgacggacgtcaggaaacccaaggtgatgctgacagggacactgtctgaccggcagccggctgaactccacctcttccggaactacgatgctccagaaactgtccgggagcctcgtttcaaccagaacgttaacctcaggcctccagctcagccctcagaccagctggtgtggcgggcggcccgaagcagcggggcagctcctacttacttccgacccaatgggcgcttcctggacggtgggctgctggccaacaaccccacgctggatgccatgaccgagatccatgagtacaatcaggacctgatccgcaagggtcaggccaacaaggtgaagaaactctccatcgttgtctccctggggcacagggaggtccccacaagtgcctgtgacctgtgtggatgtcttccgtcccagcaacccctgggagctggccaagactgtttttggggccaaggaactggngcaagatggtggtggactgttgcaccggatccagacgggcgggctgtggaccgggcacgggcctggtgcgagatggtcggcatccagtacttcagattgaacccccagctggggacggacatcatggctggatgaggtcagtgacacagtgctggtcaacgccctctgggagaccgaggtctacatctatgagcaccgcgaggagttccagaagctcatccagctgctgctctcaccctgagggtccccagcctctcaccggccccagctgacctcgtccattcagcccctgccaggccaagcccagccactgccctcccgggcagatctgggcccaggcacctctgagtccatagaccaggcctgggagaatgccaagctgcctgcccgaggctggtcctgaaggcctgtctcccactaaccccgccttccagcactttctgtcattccaggctgggaaagtctagagccccctttggcccctttccctgactgtcaaggacaactgtactcccccatcagctcaaacattaagggtacccgggcacaacgcgtannnnnnnnnnnnnnnnnnnnnnnnnnnnnnnnnnnnnnnnnnnnnnnnnnnnnnnnnnnnnnnnagggcactcccaggcttcctggtgggtgcagcccactccctctgccctctgctccgttccctgggggctgggactaaagaaatgggtgtcccccaccccatcagctgggaaagcccaggccgcaggagtgggatgcccgttggactttgcccctcacactggcccagcccctcacactgccccaccccgagaaccctcagctctcaaaggtcactcctgggagtttcttcttcccaatggaagtggcttaagagccaaaactgaaataaatcatttggattcaagttcaaaa

SEQ ID NO: 91283 - DNA, 699 bp, Homo Sapiens
  misc_feature (500)..(500): n is a, c, g, or t
  misc_feature (502)..(571): n is a, c, g, or t
  misc_feature (576)..(577): n is a, c, g, or t
  misc_feature (581)..(581): n is a, c, g, or t
  misc_feature (583)..(587): n is a, c, g, or t
  misc_feature (589)..(592): n is a, c, g, or t
  misc_feature (596)..(597): n is a, c, g, or t
  misc_feature (609)..(609): n is a, c, g, or t
tttgactggctctttaaatagtctacaagacattcacgtttaacatcacttttagtgaaataaaatgtgccatactagtatgtgcttcaaaagggcaaatgtgctttagtgccctaaggctaaattttggtcatttgacatcagagatgttgtaagtattgcacttaatacgcacctatttctcaatagtgttattttttggctagcattttctttaccactatcttgttgatagctttttgttctctaaggttgaaacatgacagtgcttatctcaaacagattacccatctgcagaactaaggaaagcaatttatgtatgaaagaaattcttgaattcgtcattctcaacctttgaattaaagcttagactaaatagtaatatatcgtgggaaggattttggttttgtgatatttctgtgaattaaggaatagatgttaaccattattttgtagaaaagtgatttgtatgtggttaattataaataaaactggtaccngnnnnnnnnnnnnnnnnnnnnnnnnnnnnnnnnnnnnnnnnnnnnnnnnnnnnnnnnnnnnnnnnnnnnnnaaaannaaanannnnnannnntttnnaaaaaactatanaccctcaaaaaaatctttcttacacccatctctttggggcccccggggcccccggaaggggaaagggcaaaccggggcaaaaaccgggtt

SEQ ID NO: 91284 - DNA, 506 bp, Homo Sapiens
  misc_feature (418)..(451): n is a, c, g, or t
gggatgatggacatgcatggtgagtgcccatggcctgccagcctctcctgcccagcccggggccttggccaagcactcggtcatgtttttgtttctccagcaggtttgttcacattccaggcaaggggtaggagggctgggcagggcccggcggcctctgtgccaaggagaagagtcagcggaggagaggatgtttcttttcccagcgtaccaagccaagagacataaactaagccagagacatagaaattagaccctctcctcacccagggacaagaaccccgcaggagatgtttctctcagcctcgtgtgtccaggaagattgtttgggcgtatgtttcttcgccctctcatataaattatataaatggctgtgtttcccattttgctttggctgctgggaatctccaaactggannnnnnnnnnnnnnnnnnnnnnnnnnnnnnnnnnagatggagttttgctctgttgaccagcctgggcaagagagtgaggccgtgtctcc

SEQ ID NO: 91285 - DNA, 522 bp, Homo Sapiens
  misc_feature (282)..(290): n is a, c, g, or t
cttcaaggtgcgtaaagtcccttggggtagggtttagtgggtagagacttatttgtttcctgataggttatgtttgtaattgtttgttaagcacagcctgtttcttggaagttatgctgtagaggcagcctgtgatccgtagtatgctagggtgtgacagcagccagccacagctggatctgatgtcttgtctgccccgcccagctttgcatatccatgttctaccacaggaaggtggcctgccaagagtctgctcaaagttttcaacataaagaataaagnnnnnnnnntgccaaagtgcttttcaatctagtaaatctagagggttgttttgtcttagccacaagaattccgaggtcttgaccctgatgatcaacctgcctcccctccatagtcttgttggagaagcccagagagaatgggactccaactaagggaacctgaaatcaactcaatggaggcacttcagagctaaaataattatggcttccttgcttaataaacattttcgttcactgcaaa

SEQ ID NO: 91286 - DNA, 726 bp, Homo Sapiens
  misc_feature (495)..(503): n is a, c, g, or t
  misc_feature (726)..(726): n is a, c, g, or t
atttctcatggtcaacattttttattattaaatcaaactctttcagattgcctttctgggcctgacctcccatagagaatcagcctgcagaagcagagcaagcatatgaaacagacgttgtccctcaggaagacaccatacaatcttggattcatgcagaacctggcagatttctttcagtgtggctgctttggcttggtgaagccctgtgtggtagattggacatcacagtacaccatggtctttcacccagccagggagaaggttcttcgctcagtatgaagaaaagcaacccaaaactctcaatctgatttgtttttgtttatgtcgatgccctgtagtttgaaagtgaagtaaagatttagaattcacctaagtccaaaggaaaacacgtggtttttaaagccattaggtaaaaaaagttctcaataaaggcattacaattttttaggtttagaaagatggacttttctgataaatcttggcagacatctnnnnnnnnncccatatttttcacaagaaaatgcaagttactttttttggaaataatactcactgattatggataaaatggaatattttcagatactatattggctgtttcaaaatagtactattctttaaacttgtaatttttgctaagttatttgtctttgttgtatctataaatatgtaaaaaatatttaaatagatgtacctgttttgctttcacacttaataaaaaan

SEQ ID NO: 91287 - DNA, 347 bp, Homo Sapiens
tgccacagcttaggacagaactgggcccagggcaaaggcctctccccagaggatggactagaaggcctgggccacactcgggcatggacctttggggctggggagcaggggctgcgcctgttgaatgtaagaggactgctgaccagagggccttcaagagggtctctctgtcctttgctgtggtcagatcaggctctgcacttatcagccggtcctttgtggcaacgcagccctgttctgtttttgcttttcctcttcttgaccaaagcatgtgccactagctgtccttgaggacctcgtctttatgaaacacacacctggaataaaaccacttcttacatgtcaac

SEQ ID NO: 91288 - DNA, 353 bp, Homo Sapiens
cctgcacaccccaagcctcgtctgctgtctctgctgtgcctgcttcccttagcccctgataccaccttccccaggtctcccaactgccctgcctggacacagagaggggtcctgtgaagtcaggccttgaaggagtgggcgtctctcagcccctctggaagcctcgcaccaggactgtcccctctcccgcagagcattcaggaccagcagccctcagccctgcagtctccagacctggttctggggagcttggggagctggggaggtgggtcaggacccagacacctttgattgggacccatttgacatgagacagtgagtgtcatccctaaattaaatcttgatttcagaaa

SEQ ID NO: 91289 - DNA, 496 bp, Homo Sapiens
aattgactaaatccagaacacggaacattctgggcactgggaaggacaattgcttttaggccttccttattttgaggcatttttaataaagctgtaaaataatacgtttttaaagagagggaaaaactcatgagttcccactgatatatccaattctaatttgaaatttaaagatttcaattctctgattttacatgtgtgtttcatttcctgtgtgtgaattgttaacacaaccttagctcaagccatcatgtcctcctccctaggattcttcggtagtctcctaactggccttcctaaatttactcatgccattctccgcagcaaagaatggattttttttacactgtgattttgtattttgaatttaacctacagtttatacaagagatttataagacatgaacttggaaaacagaacaaaatgtaattgaggtataagagcacagtatgtcatgtttcaataaatataattcaaaatttttaaatgatcaaa

SEQ ID NO: 91290 - DNA, 443 bp, Homo Sapiens
ggaactatttctaaaccctcctagctggaggcaatgtacaccagaccagtgggatgggagcaataaagaagaaatgcagtaaagaacaaattcttttcagattagctgattggcagttgtgaataatgcagctccagcactaaagcaagaaagagcagcctcaaccttggcactcattatttagctgtaagccttttttgctaggaacatttttctctttcaagtcttaaactaggttaactccttatgatccagctattcgtccaaaaaagtgaactctaaagaccctttgttgaaacttccaagtcctggatgtgaattgatagcaagaaaccacggcatcctcaagcaactttcttacctgcactgaaattatgacagaaaaaacttacccagtgagttaaatagcatgcgttctacatcagacctgacaggcattaaaa

SEQ ID NO: 91291 - DNA, 609 bp, Homo Sapiens
ggaagaattgttcatctcttaggcttccatttggatgggcctgccttaacattgtttgaaatgcagcgtgagtagctcttttgtttactgtttacaccccttattggcatgtcaactcctgtacttcccttactctgttgcctttcttgagatgcattgtcctgctaacccacaaacctgtttggaaataaacatggaagaatatctggcaggcttacttttagaagacgacaaatcggtaaggcttattcatggttcattgccaggagcagatatgcttttgagatcacttttatttttgaaatggcctttgttcattgtattgtgatccaataacactttgtattaaattgtttagcagccatttgtgttgtgaaggggtagaagatctctgaaacttgtcttgagattgaactcattccctgttccacaaacccatatgtatcctttcctctacctcctcctttcccaattaatttcaaccatagtacgatgtttggggttgtatattttgttaaaaagattaaagaatttatgagttggcttggacaagtttaactttatttttaatgtgttaattacttggaataaatgcattaatctcaaaaa

SEQ ID NO: 91292 - DNA, 437 bp, Homo Sapiens
ctaagtgcccatcaacagacagttggataagaagatgtggtgcatatatacacaatggaatactgtccagccataaaaaagaatgaaactgtcctttgcagcaacatggatgcaaacagaggccatcatcctaagcgaaacaactcggacacagaaagacaaacaccgcacattctcacccgtaagcgggagctaactcacacgtccacacagatgtgtggaatgagagacactggaaacttggaagggtacagggtgaggggagggtagatgctcagtgggtgtgattacattattcccataacggctgcactgaaagcccagactttgccaccacgaagtatgtccatgcaacaaaactgctcctgtaccccataagtttatagcgaaaaagttggatatgttaaaaaaaattaaagcttgccattaaatctaaa

SEQ ID NO: 91293 - DNA, 915 bp, Homo Sapiens
taagaatgtagataaatttattgccacttgaaaactaaatataactcagatgagtcagacaaaaaaaatcattgacattaaaattattattatttgaccaggctttgtcttttgaagatttctctcacaggcacttctgcaacaaatatgtataaattaatataaatattttgtgattatctcttaaaggccaagcacatagggcattaatgatggctaatcataaatacacaataatatatattacatagtactatattaacttgcaacaggttgcatatatgctctttagagcttatacacttttggcaaaaagtctaccttttataaatactcaagttggatattcttgtctgttgcatttgctaaataagagtcaatagattaagaatctgtcaacttttatatatgtcggatagtatccatttggaatacagaatcccctgcataacaactagcatgtcttcgctcgaagtacttgttaactatgagctctagaatattgagattttcctaatatatagcatttattctttaaaagattgatccctaacagcccaattttactgcaacgggctctatattgtaagctcaagacagattaccagaaacgggcaacaggaaaggtccatcccagagtcgccgatatgtaagcaaagttaccgttgagaaagttagagggtcctgaaaagctttgtaactggtaaaaggggatcctgccagacgattcttagtgtcaagctccttgacaggttagctaggatgcgaaaagcccgcgttgagaacagataggcaggagtagaagtggggtgttggggaattgttgtgagctccaggggttgataggtgttgcctggccatgttggctagagggtgcattctcagatggaacaggaggtcatagtaaaatgttcg

SEQ ID NO: 91294 - DNA, 441 bp, Homo Sapiens
gagaccaaaatagggtccaacgcatcctgagacctcgagctggtaacgtacagggaaggtgaacagtgagtcagcccttccttccgctaagtcaacatagtggccttattcccaccactccaggctgggaaaggacaaacatacaagaaatgcttttaatcacggaataagactaagcctcaagccccctcatctgccaaagagtgtgctctgctgtcaaacctcaaagtcattgagaaacaaaccctgataatctcacccagcttcaagaccaagggagtcctagtgtcatggagaagagcaaggaggggcccagggctgccgaagatagatgtctaccaactaggaagagagccctcaccaggaaccaaatctgctgacacctggatcttgaacttcccagccaacagaattgtgaggaataaatgtatgtatttttaa

SEQ ID NO: 91295 - DNA, 147 bp, Homo Sapiens
gattgggggagaacaagagatggacttttgagttttaggtatctgtatgtatgtactttcttgacctctgttatatttctccagataagtactgtttaaataacatataaagatgtcagatgagcaatagatagataagaatggtgc

SEQ ID NO: 91296 - DNA, 457 bp, Homo Sapiens
agccccaggggaggtgatggaccctagggaggccgctcaggccattttcccctccatggccagggctctccagaagtacctgcgcatcacccggcagcagaactaccacagcatggagagcatcctgcagcacctggccttctgcatcaccaacggcatgacccccaaggccttcctagaacggtacctcagtgcgggccccaccctgcaatatgacaaggaccgctggctctctacacagtggaggcttgtcagtgatgaggctgtgactaatggattacgggatggaattgtgttcgtccttaagtgcttggacttcagcctcgtagtcaatgtgaagaaaattccattcatcatactctctgaagagttcatagaccccaaatctcacaaatttgtccttcgcttacagtctgagacatccgtttaaaagttctatatttgtggctttattaaa

SEQ ID NO: 91297 - DNA, 435 bp, Homo Sapiens
  misc_feature (348)..(348): n is a, c, g, or t
  misc_feature (355)..(364): n is a, c, g, or t
gccatatctttggagcatgaaattagcagaaagggaagatgttggtatgtccctaaaatatcttactttttgattgcttggacacttttatcactagatttggatccaaattctatcctcctattaacccttacttctcaacaaaaatgaatctctgtgaaagtcttgatgaacctgctttggaagaagatgcaataattcacacaaggagtccattcattggttctcgccttgcacaaagggtggactctgtctcaaacacttcaaatttctagagatgaaatccagaaagaaaaagtactgaggcgaactgtgttccccccaaaaacccctttaattgttgggatncttgccnnnnnnnnnncccaagaaaccccctttctacttcaagttgtggtttttttgtggagaaattattgcttgtgaaacccaatt

SEQ ID NO: 91298 - DNA, 529 bp, Homo Sapiens
tggtttggggtctggtcatttccctttcaatttttgaatctccttctctgttcagttggcttggcaaagtaccctctgttctcatgtcactaattcctgctctaggtcatctttcctttgtgcagcccacattcccaccatcctgtgaactttgttgtacttggtgttgggcaactggtgagtgttgtgacaggctcagacctgatccttcctcaggagcaattggagaccacaaatttaaagcagaaatacctgttaaaagcttggctttccttatatgagtgaggctcccagcttgggtgtggcctcctgggctcacggatcagcttgctgggccagagggggtcttagtaatgtgctagagagacacatgctcccttctcatcgtagagagcctgcatgctgagaggctccctttagacacctgcctctcgctggcttttcctttagacctagccaccagtgttttgaatcatggttttgttttgtttttgcatgcaaaaaccagaacatgacttagaaattaaaa

SEQ ID NO: 91299 - DNA, 490 bp, Homo Sapiens
cagctggggtggggaagtggtgcaagccctacaaatttgcaaccctggccactgacttcagcagctttcctgagaactaccccatccagatcaccgtgcggcgcaaggaaccccggcaaaagatcgtgtccatcgggccggaggagatgcggaggctggaggatctggaatacctatttccctgttaagggggagggccccaggacacccctcacctactttcagcttcaaccccaggccctcagaaaccagagccatgagacctaccataccaccagcaccctgcgggcccggggtctggcagagtggtatgggcaccccacccctgggctggggccaaggctacataggggccccattcacctggaggcatctcaggccaggccatgccaggctcagccactgcccacagctgctagactccctcctcctccaaatctgggctgggtctaggtccctcattaaagaactgcaggtcatccagcaaaaa

SEQ ID NO: 91300 - DNA, 449 bp, Homo Sapiens
taaattgtttagcaatcagagtttctatgactgtccatcatcactgcatctcttctatgacatgagacattggtgcgatgtgtcattatgttcaaatgtgtgggtcggccagggtgtatctgtatggactgaatgtgtccccataaaatttgtatgttgaagccctaacccccaatatgaggatatttggagctggggcctttgggaggtaattaagttagatgaggtcagatggacatggcccctgtggttgagattagccctaataccaagagatagcagagagctccaccctactgttggccacgtgcacacatagggagaagggggccgtctataagcaaggaagagagccctcatcagaaaccgatcgcgccagcatgctgatcttggatctgaggcctccagaactgagggaaaataaatgtctgctgttgaagtcaaaaaaa

SEQ ID NO: 91301 - DNA, 413 bp, Homo Sapiens
  misc_feature (197)..(298): n is a, c, g, or t
agaaatgcaatgactatgtctgctatcaccactgttactactgagaacatgtctcgatgaaagcaattctggaaaataggggagcaaaagaccctctgtttgatactttgaggggtcttctgtggcataatcttcccaggaagatcacagatttccactgctgctctaatttaacgggattcactctttttctgtannnnnnnnnnnnnnnnnnnnnnnnnnnnnnnnnnnnnnnnnnnnnnnnnnnnnnnnnnnnnnnnnnnnnnnnnnnnnnnnnnnnnnnnnnnnnnnnnnnnnngtcgatgggaaaccacaacatggtaaaaagtgcctgatagcgaatgcacgagcccatggatgtacaaaagaaacacctaaacaaattttagaggtgaagccctggaagaaataga

SEQ ID NO: 91302 - DNA, 466 bp, Homo Sapiens
gcggccgctttaagaaccactgtggggactgcctgcgaaacgccttggaggccgctgtgtgaagctgcggctccgggctggtggccacgcgagggtgtccgccctcttcgacctgcctggatttttgtgctgcagaatggcagggcaaacagcgtgtccttcaccatctagagccccttaaggggttgtccaattcctattgggctaatcagtttgagactcatttacttttcgtgcctgggtctgtttgctggctgcaggcttctttagggaccaagatgtaattaaaatatgtgaaccaatacattgaaagttggtgttgtcatgtaagtgactgctgtagctattctgagtgcctcacaagggcgatgtgacagtgagggggctctctgctgatgattctgcccactagttcttacattttgtgtttctttgtttagcagagcagtttctttcgcccaatgca

SEQ ID NO: 91303 - DNA, 671 bp, Homo Sapiens
gggacaggacacagctaggttctgaagcttctgagttctgcagcctcacctctgagaaaacctcttttccaccaataccatgaagctctgcgtgactgtcctgtctctcctcatgctagtagctgccttctgctctccagcgctctcagcaccaatgggctcagaccctcccaccgcctgctgcttttcttacaccgcgaggaagcttcctcgcaactttgtggtagattactatgagaccagcagcctctgctcccagccagctgtggtattccaaaccaaaagaagcaagcaagtctgtgctgatcccagtgaatcctgggtccaggagtacgtgtatgacctggaactgaactgagctgctcagagacaggaagtcttcagggaaggtcacctgagcccggatgcttctccatgagacacatctcctccatactcaggactcctctccgcagttcctgtcccttctcttaatttaatcttttttatgtgccgtgttattgtattaggtgtcatttccattatttatattagtttagccaaaggataagtgtcccctatggggatggtccactgtcactgtttctctgctgttgcaaatacatggataacacatttgattctgtgtgttttcataataaaactttaaaataaaatgccccccccaccaa

SEQ ID NO: 91304 - DNA, 490 bp, Homo Sapiens
  misc_feature (378)..(378): n is a, c, g, or t
  misc_feature (380)..(380): n is a, c, g, or t
  misc_feature (382)..(383): n is a, c, g, or t
  misc_feature (387)..(387): n is a, c, g, or t
  misc_feature (389)..(389): n is a, c, g, or t
  misc_feature (395)..(395): n is a, c, g, or t
  misc_feature (404)..(404): n is a, c, g, or t
gcggccgccggacgggccgctcccggcctcgcggcctcgcctccccacactacaactcccacggggcagcgggcgcggctccccgtacccaccagctggccgggcagggcagccacttcgcggtcgggcccgccggctgcgggcacccgcgcgacgggcgggaagatggcggacgtggtcgtgggtaaagacaagggcggggagcaacggctcatctcgctgcctctatcccgcatccgggtcatcatgaagagctcccccgaggtgtccagcatcaaccaggaggcgttggtgctcacggccaaggccacggagctctttgttcaatgcctagccacctaattcctaaaaccccaaaggggcaacccaaaccgggcnangnntggngnaaaaanaaggggggncaaaaaaagaaagtctgacttacaggattagcaaacactgcacagcaatcagaaacttttcagtttcttgcagatatattaccaaa

SEQ ID NO: 91305 - DNA, 1006 bp, Homo Sapiens
  misc_feature (42)..(76): n is a, c, g, or t
tactaaccgagcgcaggagtatttgagcgaggaagcggccgnnnnnnnnnnnnnnnnnnnnnnnnnnnnnnnnnnncagtcgacggtaccggacatatgcccgggaattcggccattacggccggggacggagctcgtagtttcccggacgggccgctcccggcctcgcggcctcgcctccccacactacaactcccacggggcagcgggcgcggctccccgtacccaccagctggccgggcagggcagccacttcgcggtcgggcccgccggctgcgggcacccgcgcgacgggcgggaagatggcggacgtggtcgtgggtaaagacaagggcggggagcagcggctcatctcgctgcctctatcccgcatccgggtcatcatgaagagctcccccgaggtgtccagcatcaaccaggaggcgttggtgctcacggccaaggccacggagctctttgttcaatgcctagccacctattcctacagacacggcagtggaaaggaaaagaaagtactgacttacagtgatttagcaaacactgcacagcaatcagaaacttttcagtttcttgcagatatattaccaaagaagattttagctagtaaatacctgaaaatgcttaaagaggaacaagagggaagaagatgaggagaatgacaatgataatgaaagtgaccatgatgaagctgactcctaaaccaaaagtgctttaaaaaccagcctggcgaggacagccctggacccactccactgtctctaagtaaacacagcactgcccgcttttagcgtcttcacttcttcacagagttccagtgcgtggtattctttcgaggtattctttccaggccgagattgagcacctcatgtacctacgccacagacagccagagggaaagcgaccagacagcagccctcctcgacaggcccaccctgcagctcaggcaccaagaaaacagccgatactgggcagccattgcagctccaaactgcagaggcaaggccaa

SEQ ID NO: 91306 - DNA, 445 bp, Homo Sapiens
  misc_feature (63)..(71): n is a, c, g, or t
  misc_feature (84)..(84): n is a, c, g, or t
  misc_feature (106)..(116): n is a, c, g, or t
gggttcggggccccggctcggagctccacttgcgcatctccacccgtccgaaaaggggccccnnnnnnnnnaaaaccttccggngaaaaaaaacccctgggggggnnnnnnnnnnncgaaggagccaggggcgtgaagtactcggtggcggcagccagtaccgagcggtgggcccggaactcgcggcctccagccccgccgaagcacagggtaatgtcgcagaagaggccctggcgccgctgctcgttctgccgccaggacagctctgagcagtgagagctgcactcgaaatcctcggcttctgggcccggatcgcccccgctcgcctccattgcagagatcccccgcccaggcccgaagtccaccgtgccgctgcctcggacctcggcggccagtcctgccgagccggcggcggccgtctccatgctctccatctccagtacct

SEQ ID NO: 91307 - DNA, 532 bp, Homo Sapiens
gtgcccctttcccttagatcatggtaaatttttcttattgaggtaattatgtactacttatatttgaaggaagcttatgacattttacagtagctaaaatgttgagattagaggtacttttactattcttctcaaaggtaactgatcagataattacccaaattattcaagaaaatagatcagaaataaagaacaacataattttctaagaattcattgaaatttatggaatcagctctcgcactgcccatctttgcagttttgaaaaagaaattgcttaatcacaaatgttctacagtctttaaatgtagtagaattagacagtgagatcatctgagtaaattgattggtgattccagagataagactaatattttaaattatttatgatactgattagtataaaaacgtactcatcacagaatttgaagcaaaatacatgtacacttcaaagagtaaatgacaaatgtataaatgctgtagctcaggattatatgtacctttaaaaatacactaataaagattattgttc

SEQ ID NO: 91308 - DNA, 1422 bp, Homo Sapiens
  misc_feature (807)..(807): n is a, c, g, or t
  misc_feature (855)..(855): n is a, c, g, or t
  misc_feature (1086)..(1086): n is a, c, g, or t
  misc_feature (1377)..(1377): n is a, c, g, or t
caacactcaacatacgtcctaggtagcgaggcctgggtggcgttttcagcacgaggggccccacaagtgcccggtgtgcgccaagggcttcggccagggctctgcgctgctcaaacacctgcgcacgcacacgggcgagcggccctacccgtgtccgcagtgcggcaaggccttcgggcagagctcggcgctgctgcagcaccagcgcacacacacggccgagcgcccctaccgctgcccccactgcggcaaagccttcgggcagagctccaacttgcaacaccacctgcgcatccacacgggcgagcggccctacgcctgcccgcactgctccaaggccttcggccagagctcagcgctgctccagcacctgcacgtgcattcgggcgagcgtccctatcgctgtcagctctgcgggaaggccttcggccaggcctccagcctcaccaagcacaaacgggtgcatgagggtgcagccgcctgactgcagctgccgcggccgctgccgctgcagcagcgccccgccggcctgggccccagccctgcccctaagccccgccttcccttgcatgaggccggcgggcaggccctccccttcctggggtccttcgaggccccgtcctctcgcggcccccgcctcccgggcctctgcgaccctcaagtcccattggacattaaccactcctcgcgctcagccaaaccactatcacccccttcgcgcccccggcggcctcgcgcgcgaacctccctgtgacctgcggattcggcccaagccgattctcataaaaacaccactcctttccccanccccgttctcgtcccccacgcactatgcgtccacaccgtctcgcgccnatgacacccgcctcttcaaccctttccccccctcggctgtcgtggggaacatatctcgacggtctcttcttcgcgaaatcctatcacaactacccaaacgtgggctactttgatcgcctgccccaccctctcataatcacaccctcttttagtcgaccctccccacagggagcgcctattttggcggcggggacgcccaccagagaaagccaccgacaacatctaaccacnttctccacaaaccccaccccacgcaggagtgccccctcagagactgcacacgccgaaaaagcagacccctgtcaaggaaccgctcgggtaaggctcgcactcgtagtctactcagttgaacgatagtacccacactccccaccagctcgcgaccatcctattgcgtacgccgtgtggacaaaatccccactcatgcgcttcgtgttaccccgatcaacatccactaagtttacataccattgactctcatagagcctagtacgacccccaccctccccatagatgcctcgngcgctctatcgcaacacctacaatctatatacacacaagtctctc

SEQ ID NO: 91309 - DNA, 589 bp, Homo Sapiens
atagctgcacttaggacccagaaacaggcattgatgagaacagacagaacattggaccttactctccgtcttccttcctcaccagcagtggactgagaagggagtgtgtggccagggccatcaggctggctgtgccattgatgagctcatccttgtgcaagacaatggctgagcatagaaatattataggtatggcttgagtattaaatctaacactgtatgagaaggtaccaggaagatggtaattggctgtacaaatatcaaattgctactattgatgctggctccccacctactcccaatggaatttaagccctatgagaatggggacttggcagtccaggtattactagaattcaatacttagtgaaggccccaataatactgccacctactccatattgggatactgttcaaagtatggaattggaaatttcaaacccattccaattgcagattgggaccccattctccttctgtggtagtccttattattgactattgaaggtggaaggttgtttcaaaaagcagtggaattctgtggcaaaaggaaatctaaccttcatggattaaagacacctttttaaaa

SEQ ID NO: 91310 - DNA, 640 bp, Homo Sapiens
  misc_feature (40)..(40): n is a, c, g, or t
catttcctgcaccaacaaggccaacctgtcccaagtggcngaccatctggatcacatcaaggaggtggcaggagccagagccgtgggttttggtggggactttgatggtgttccaagggtccttgaggggctggaggacgtctccaagtatccagacctgatcgctgagctgctcaggaggaactggacggaggcggaggtcaagggcgcactggctgacaacctgctgagggtcttcgaggctgtggaacaggccagcaacctcacacaggctcccgaggaggagcccatcccgctggaccagctgggtggctcctgcaggacccattacggctactcctctggggcttccagcctccatcgccactgggggctcctgctggcctccctcgctcccctggtcctctgtctgtctctcctgtgaaacctgggagaccagagtcccctttagggttcccggagctccgggaagacccgcccatcccaggactccagatgccaggagccctgctgcccacatgcaaggaccagcatctcctgagaggacgcctgggcttacctggggggcaggatgcctggggacagttcaggacacacacacagtaggcccgcaataaaagcaacaccccttcacatcaaa

SEQ ID NO: 91311 - DNA, 582 bp, Homo Sapiens
aattcagattgcagcaaaatcacttatctgttcttttcggctaaaacactctaggtgaattttctaaacttccatggtttacatatttatatatgactaccaagatggagcaatccacggatggacttttgaataaactcaaatatttgatactgcttcctccaaggaatggagagtgtcaggcaggtaggtaagaaccactcctacacttatttctagctcctgaagccaactgcagccttggagccaatggctgtatttggctgtgtgttacaggttggccaaactgattgccatcaggtcagacaaaactgccttttatggtgtagtctgccagcttcagacatatgctgtattgttgttattggctagactatttattagactattgttggactattttttatcaaatgctttaccccacgcctgtttgtattgggagctctggaccaatagtgtctctcctagtgacagaaatatgagcatctgtggattacacagcctcatccctctttacaatattccagcccatccaaaatgctatattatgaattaaataaatatatatgtattcatgaaaaa

SEQ ID NO: 91312 - DNA, 429 bp, Homo Sapiens
  misc_feature (404)..(404): n is a, c, g, or t
caaagttcacaacctgagctcttgctcactctttattcaggggaagggaggcccagtcctaggcaaactgaacctctcctgaggaaacgtggagccaaaggctggaagcttccaaaatccttaggttcggatcccccttggggtcaccctgaggcctgtctcaccaaagcattcttctgtccacagatgtctcattggatctgcaaaggaaacctcacagatgtctggggcccagcatggtcatccctactgaatgtcgaaaaggcgaaggccaagaacccagggaaataccaggtctggtccttccagtcccagccagagcaggatgcataggccggaccgtgtcaaaagccccgttacccaaatggagggaaagtcaaccccaagggggcaaaaggggtcantcacaaatcctgggcagacagtggc

SEQ ID NO: 91313 - DNA, 527 bp, Homo Sapiens
gttgactcgggcgcccagatgaccattatgagccaggcttgtgccgagcgatgtaacatcatgaggctggtggaccgacggtgggctggggttgctaaaggagtgggcacacagagaattattggccgtgttcatctagctcagattcaaattgaaggtgatttcttacagtgctctttctccatacttgaggatcaacccatggatatgcttctaggcctagatatgctccggagacatcaatgttccatcgatttgaagaaaaatgtgctggtcatcggcaccactggcacgcagacttattttcttcctgagggagagttgcccttatgctctaggatggtaagtgggcaagatgagtcttcggacaaggaaattacacattcagtcatggattcaggacgaaaagagcattaaagcacgttataaatatgttaccaccttgagggagcctcaggtccccggcaattataagttaagagcttactggcaatgtaatcattaaaaaacatcagtatcacctaaaa

SEQ ID NO: 91314 - DNA, 682 bp, Homo Sapiens
agaggcaagtatcacttcaaattggaacgttgagaatgtccaattatcttctccctttctaacaaaatgttcttttaataattatgtttaaggcaaagagaactagcctctatttttccatatttcaaggatctaatttgaaactagatacttgccagttcattatttgtgtatataaacactgattataatatttcatattaatattttaatggcataaggacttgcattattgcattagggagcgggtcatgctgggggtcaggaagcctgtgtagagtaccaaattatatgctgaaagagatgcataaccattctgtcaatatttgcagaaatatagttcctttcatattacagttgttttgcaagcaatttccacatttataggtgtaacaaaagctaaatgttgtaaatgttgttgccctcaggtataactaaaaacattccagtaaatatatttttgactgtgtaagagaatgtgtagtaatttttttggcattggattatggaaatggaaatttttaaacagtgtgaaaaaacatggtatggcatcataaaactggagataataaagttattgaagagtgtcattggagtatttgaaaatgaccaatatatagctgccagtcatggtccagtctgttttctgttaaactccaataaagagagaccagtcagtcct

SEQ ID NO: 91315 - DNA, 524 bp, Homo Sapiens
acacatttttaaaagaagcaaatcagcaactgccaagtccaaaggagctggccaaagataagaccaaggtgcgggtgtgtagaagagatgtccgtgcacaggtgtgcttccgcgtggccatccaattgtggacatggtgatggtgcactgagccccagagagcctgccaaacatttcccattcaggatgcctttgggatctcagtaatgctttgcagtgcccctaaactaaaagaaataactagtagttctgttaatacatagttaggtccaaacaactcaacacctggtatctgacagatgccactgttgccactttgaaattttttaaatattctttggcagttctgtgagcttgctgcagtgtcctagcggcatatcagtgcaaaatttgagaaccacaaactgtggattaggaaccctggttgagtacggcaccccttactccctactaccaaagtgagagatggcagacatgtttgtctccaattttaatagagtaaaatttgtttaaaagagccaaaa

SEQ ID NO: 91316 - DNA, 869 bp, Homo Sapiens
tttcaatactgaggaacctgtttttaaaagcaaccatgtaagttgccattaccagtgtactgcatacttgatagacatggacagggaaaacaaacttttggcacaagaatggcaaattattgccttgtttgggacacataaacacaaattatccctgcaggcccaaaaaaaattgcaaaagttaaacgaccatcatcttatctcaacatgaggatacaacccctgcccttaaatagtttagaaagtacctcgtattgctagagacatacatccagtccaaatttaataaaatacattttaaaacattacaggtctaataatatagaaacaaaaatcacaccattagtcaaatgaacaaatgcaaacattttcagccactagacgtagaaagagcatgaatatgtcaatagcaaggcataagaaaatggttaatcaataacaagatctttcctttaattttacaaggaaaacttcttggagttgcaacagtattgatacaatgccctcagcctccactttcttaaaatgaaagcagagctaccaccttgctattgagcaagaaaatatcacagcacattcacaaaaggtcgttaggacagggtggagagggtgagccttgttaaacagtggattatattttcccacttgaagggtaggcagctttgccaggtaggcaagctctgatagaggctgggcaccagatcctaaaacacagaccatatagaacatgtctgcttgaaaatcatcacctttggaagcagcaaatagaatttacagtaagaatgaatatgttctgctgcccagaacgctggctgcattcccggccgtaatggccgaattcccgggcatatgtccggtaccgtcgactg

SEQ ID NO: 91317 - DNA, 589 bp, Homo Sapiens
ctttctcaggaaggagggaagagaaaaagggatgtgagctcatttcaactcctgatcaagaccacactgactttactaagtgccttaaaatgctccaaaagaagatagaagaaaaagacttaaaggttgatgtgatcgtgacactgggaggccttgctgggcgttttgaccagattatggcatctgtgaataccttgttccaagcgactcacatcactccttttccaattataataatccaagaggaatcgctgatctacctgctccaaccaggaaagcacaggttgcatgtagacactggaatggagggtgattggtgtggccttattcctgttggacagccttgtatgcaggttacaaccacaggcctcaagtggaacctcacaaatgatgtgcttgcttttggaacattggtcagtacttccaatacctacgacgggtctggtgttgtgactgtggaaactgaccacccactcctttggaccatggccatcaaaagctaacctgttgactggcatccataagtgtgcctctgccttatctcatttctcaacagttcattgctcaacaagaacgattcacctaaaaa

SEQ ID NO: 91318 - DNA, 481 bp, Homo Sapiens
actgaggtcatgaactgaggagtgattcaaatagggtgaggcaggaaggcgctccgtcttgagcactaggctggcttctgccaggaaccagggtgagaaggagggtacagctcccagagccatgcttgcagcctgaccacccaccaaccaggcgagcgccaggggtggtgggaagcaggtgtgtcagagccagttataaccacaaccacagcaacagcggcggcggacatttattgggtggccactgcaggcctgttctgttttacatgcatttaaataatcacaacagcctcttaacccactctcttcacccttcggtgtctgtatgaccttgcgtgggtggctgagctgatgccttcctgggtgactgtgaagtgggtatgtgcacatgtgaaagtgatgggacatattcgtgtgtgagtccagtgcccagtagagtccgtggcacatagtacatcgtattaaatctttgaggaataaa

SEQ ID NO: 91319 - DNA, 716 bp, Homo Sapiens
  misc_feature (65)..(92): n is a, c, g, or t
tgcctacggaatctgatatattacacacccccaaccttcttttttcagtctggaaaggggtaaannnnnnnnnnnnnnnnnnnnnnnnnnnngatggggaaggtagttttaatttggcaagtgttgctcttcttaaaacactgctcaaattaattagctgaagatacttagtatcctcggctgcttgttagcagagaaaggactcaccttagtggtgactggtttcacaaatataaatatatatcatttgtacacgaagaactcttcccagtggaaactggctgtgtttccgtatttctatgttctattcggagtgatcgtgaaatctaaggctgcttgatgttctgatgcttgtcaatgccgtcgtgctctgtgactccacgaaacgccaagggagcttcttccggacgcctcctcttcctctgtaacatacgtgtgaatagtcaaggtttaattttgctttaatctaataaagtcgaagtgggacttttatttttctgaaacagctttctaaaatccgcatcttccccagctgcgaggttgggggtctggggtgccaaagggcgaggttccgaaaggcaggagacttgggggaacgcaaccatagaaaggcctgggcgcgagggcttccttgcaaagccggccttgcgctccttcctgcgccaggccggggaccagcactgcattcgcctgtgttcacagctttggcggaaacg

SEQ ID NO: 91320 - DNA, 303 bp, Homo Sapiens
  misc_feature (188)..(188): n is a, c, g, or t
cgtttttaaccaaactcggctgttgttggtctaaaacctgccctgggtttgagggagcggtgcttttgtgagcccagcttgccttgagtgcatggatgggaacctgaaaccagccagttttgcctcccaccctttcaacttttccagtaaaaaatgtgacgggcactttttttccagtaaaactgttncccccagcaggacagcctatatgcagctaggttcctggcaaatgagcagggaataatagctggctaaaggtgggcgggactgaaatacagctgtccacctttccggaaaacatca

SEQ ID NO: 91321 - DNA, 469 bp, Homo Sapiens
taggcatcatttgtataacccaacctggaggagttctgtgattctttatatgttattttcgatggtggtagggaggggcagattagcttcctgaatatgctgtgtcatggtgtgtggagccatcttggactgtagctttgtatctgtcactggaagaaactgcagagaagtaattatatttaagcagaagaattttagcctgaggtttcttactgagtaattcgtagtcatttataattaaacaaaaaagtataccaaatagcggatggcttaggctttctggtagggagttaggtgcctttctaactccttgtccctgcaactgccctaatggagagttcagaagcaggaaagaacaaacttctttttcattctggatagagaggagatgtcattagtatcaaagttaaattgaaaaaaggccagtacactcaagcctgggcaacagagcgagaccctgtctcttaaa

SEQ ID NO: 91322 - DNA, 482 bp, Homo Sapiens
caactgtctgactctatgtcagacactgtatctgacagacaaggaaattcttaccttctgatcaaatcttgtatgactgtgaaggaagcagggagtgtgaggaaaggtgtctctcctttcccattcccttggtatacacatactgaagtactgaagttgaagaaaacaagactgctttcgtggttattttcaaacaaatataaatgtctgtaagcgtgtgctttggtaagtcactcaataagcataatgtacactttaggctctggttgagtatggaatatctccaagtagctgcttcttcaaggatatatcacaatgttcagtaataagggcatgttttcatattaatcagatgaatgatgacattttaaaaactaatagtaaaagaggccatttccatcctcaactgggttttataaaaaagaagacatttaccttctgagccagtttattcaagtatgaaatatagaaaaaaaattcaa

SEQ ID NO: 91323 - DNA, 471 bp, Homo Sapiens
  misc_feature (185)..(223): n is a, c, g, or t
tggaatttgctcctgggtcccctaggccctagtgaggggaggagagagaacccatcctctctccttcttacactgtaaggccaagcagaagccaggggtgctgccctctcccacggtgccaacgcctttgtgtgttgtgtatgtgagccatcccacatgtgagggaaataaacccctggcacttnnnnnnnnnnnnnnnnnnnnnnnnnnnnnnnnnnnnnnntagtaatgtaatttgcccaaggatacagttcttaaagttaggatttgaatccagatcagtgttgctccaaaacctgttaaatcacacaatccctatcatcttgtgcattcgtttgcttctgaattgttagtcaaggaatttttaactgccaacaacatgatgaaaacaatgttactgcacagagttgatacaattttagacagaaaaaagaaacttgatattttggttacctaatccattcattcatt

SEQ ID NO: 91324 - DNA, 451 bp, Homo Sapiens
aacttggtaagttataggcaccaatcagaacacatgatgtcaacactaaaggagacagaggatgactgtcctggcataagcagagggtcattaaacaatgggtccccatgtcaatctcacagcctcccaacaatctgagggcctttgaatcctctagcagacatggaagtgtgggaggaggacaaggctaattaagggtgagtaataagaacccaagcctttttgtagccacctttgaaaggcagatgcagaatgccccagcaatgaaaattcaaaacaaaaggtccagcccaccttcttcccttaagcccttgtcaaagattaaacagcataccccaaagccacagacaagtcataatatgcccatattttatctgggtcgtattgtgtgcagcataattaatgtttaaaaagcatttctgcaataaaatgtctccatgataaatggaaa

SEQ ID NO: 91325 - DNA, 530 bp, Homo Sapiens
taaatttcaggtgtggctttaaagtttaaaggtacccgtattgctctgtgattctgtgctgggaagccgagctcaccacacctcttttgggttacagggcatactcactcccatactctgagccacagggagagctgtgcaggcagccactgctgaaacaggaggcagtattaattttgaaaacgatccatgctgtaatgtcatgaaccaggaagctggaatcctttaccagctctttatgcaaatatttggctgcagcttgagctgaaggacttggaaggagtgggtattaaaaaatctgcctcattgtagagctttccttaactccattcctcccccggattggcctgtttgtctgcctccaccccatgttatctccctgaggtgtgtttacaatatcctacttgatattatctttctagtcatgggttcactttctactttgctccaagaatacaaagaaaggcaactctctcttagatttcaaacagcacaaaaattcacagtctacaatttataaaaacacatca

SEQ ID NO: 91326 - DNA, 820 bp, Homo Sapiens
  misc_feature (756)..(768): n is a, c, g, or t
  misc_feature (770)..(780): n is a, c, g, or t
tcaaagaatgatatttccaaagtttgcagaaaagaatatgagcctgtcctccgttattttagtgtgcttccttctcttgtctggatttctgcattgccctaggaagtctgccagtatgtgttgatgaaggacaagacaggaaagaatgctcttttcagttgcattagcagaaatgaaatgggctcggtttgttgcagttatgcaggtcatcacacaaactgccgagaatactgtcaagccatttttcgaacagactcttctcctggtccatctcagataaaagcagtggaaaattattgcgcctctattagtccacaattaatacattgtgtgaacaattatactcaatcttatccaatgaggaacccaacggatagcagatctgtgctctctgacatttagtctatacgagatactgctggagctaaggagatggcagctcaataaaaaagcagaaagaggttttaagggtagaacaaccgtctccatctttgccaatacagaggaatctggaaaagaaggcgccaaacagatatgcacagatttcttccaaagtcagagaaaactacttcaaagaagcccttctgaattctgtaatatggttgaaagtgtttttttatttctgattctttgagaaaattaaaggcagagccaaactgatatcttgtcagagttcgctactgtactatttatgttacaacttagattaattagcataagatatataaaagctttatgtggtccctggatgtagannnnnnnnnnnnnannnnnnnnnnnaaattggcggccgccctcggccctcccaaaacctttctaa

SEQ ID NO: 91327 - DNA, 157 bp, Homo Sapiens
attgaccacacacctcttctgataaaaggaaaaagtgtgaaaatatgtgttccaggaaagaaaaaagcccagaccaaagaggtgaagaaaaagactttagagtcaaagaaagtatcggcatccaccttaaaaagagaggcagatgcttcaaaagctg

SEQ ID NO: 91328 - DNA, 429 bp, Homo Sapiens
cacaaccctcctttccatttcaagaaatctttctgttcccacaagcctgggagggcctttgagtggggcatattgggacccgtgttcacaccagcacttagtttggaggaagcacctggaggagatgcagagtccagatgtgcgccctctgccggaagcctactgcaccaggacgtaggcctggagtggcccttaacgcattttggaaatcagtcttcactaaaaaaacttcctccaaaatgttctttaacagccctttaaaagccattgtttcaaaacagtccaaggtggtgaacaattaatattttcgatttacatgaagactctggagtaggaattacctgagttggaaactcagttctactctattggtatcaggttgcattctgtatcatcattaaaattttcagaaaaactatcatcaaaaaa

SEQ ID NO: 91329 - DNA, 437 bp, Homo Sapiens
gagccaatgcaagcatttttaaatcttcctgggtcccaaggaattagaattgtttaatcttattaatcttgctggaatagactctgctacttcaaagcagaaggccaaggagacagacatctgacaaagcatttccttgagctcttctgagaaaaacctgaacgttggatgtactatgggcattacaactatggacagagtgactactggcagaaatgaacaccatgtgagaattctgggaacaaagatctacacagaacaacaaggaactaaaggaagtcagcttgataatacaggagggagactcttttttctgaggtcattgccagatgaagcactgaagaattagcaggctttcgctccatttgctttggacagatttaaagactaggcacagccatttgtgttaattaaaatctctcgcacctttaaaaaaa

SEQ ID NO: 91330 - DNA, 1000 bp, Homo Sapiens
  misc_feature (587)..(601): n is a, c, g, or t
  misc_feature (742)..(779): n is a, c, g, or t
  misc_feature (796)..(812): n is a, c, g, or t
acacagtgccccaaactagaagactcagaaaaagaatatgttcttgatcccaaaccgccgccgttgactttggcacagaagttgggcctcattgggcctccaccacctccactgtcatcagatgaatgggagaaggtgaaacagcgctctctcctgcaaggggactccgtgcaaccatgccccatctgtaaagaagaattcgagcttcgtcctcaggtgtttagcatacgagggtgagctagagagctcctgggctgtttcctagggacgaggcccagagctggagcctaagattccaagcttcctttttccagtttcatcctcctgtgtgagcctcacacacttccattttgttttccattaattaaagtgtgtgaagagctaaacaccctcattaaatagtttttgtttgtttacctaactggtatttctcaagtactaaagttttgtacaaaaggaatgtttctggtcaacaggccccatgcggctgtgcagacaactggggggcttcccaggagcagctgtgtcccagcgcgggaaggatgaaagcacagggactcttaagtggttttgtgatttgagtcagnnnnnnnnnnnnnnnctgtgcttgaatgtctccaaagaatttgtgagagaatctttaagaaaagtaaaatcttttaatgatttttattcatgaaactttaccatagtaagactgatgatactactctgggttaacagataatatacacgcgcgcgnnnnnnnnnnnnnnnnnnnnnnnnnnnnnnnnnnnnnnatgcatatatatatatnnnnnnnnnnnnnnnnnatgcatatagggttttttctatacatattttgtctgcctaactaaactattgtcccctgaagttggggacacttagatttatcagaagtgtgtgtgtgcgtgcacgtgcgtgcgtggttgccctgtaacaatttcccacgtgcggacgcgtgggtcgacgatatcccgggaattccggaccggtccag

SEQ ID NO: 91331 - DNA, 422 bp, Homo Sapiens
attatccaataccatttgtaccaccacatctccaagctggggactgtgcctctgtgacaatcccaacagacactcacagcccagcatatcacctcattacctcacattatgatttagagcaaatcatgttcgattataagaataaagtgatgttttcgaacgacctttttttaaagtgctcttagaacacctctgttgtttggatacttcccagataaacaatattctgatatattagacaagtagttcaaatagaatgtacttttataaatttttcccatatgatcagcagttgaatgtaggtataaattatttctaaaatgcataatatagcttgcatcagaaaattgttatacatcaatctcataccttaagtttaagataactgaattgtggggaaaaagcctttgtaccataaggca

SEQ ID NO: 91332 - DNA, 508 bp, Homo Sapiens
acgcagagcagtgctttttgtgtggctgaagcgatgtgctgacgaaaaaaggaaaattctaggacaatcgttggctaaaaatcaccttaggatgaaaaatttgaggcaaatttttttaaatgacagaaaaagataatcatctcacttgcttgaaacaggagccagcatgatctctggaagcatcaactatccctcgtcgtgattgttgaaagctctttcactgttttgcattctagtttgaatagtttgtattgaaattggattcctatcttgtgtatgtttttggtgcgtaaaagggaaaaattggtgtcattacttttgaaatttgcaggacgaagggcatgcttttggtttgctgtaagattgtattctgtatatatgttttcatgtaaataaatgaaaatctatatcagagttatattttaatttttattctaaatgaaaaaaaccctttttacttcaaaaaaattgtaagccacattgttaataaagtaaaaataaattctaa

SEQ ID NO: 91333 - DNA, 536 bp, Homo Sapiens
cttattggctctctgctttgtatttaaatgaagaatcttacatcttgggtaggtaaactgctgataaaatttgtgtacagtatgtacttacctaatgcagttgcatcatcacgtactgaaagatatgtgtttggaggtttatttccaggatgcatttgcttgttttggtcatggcagcagtgagttggtaatcctaaaccatcacttccagcagtattcatggtatagagctgatctgtgttcatatgttgaattgtgatagtagcaaacatgaacatatgaactattgttgctcttaatagaaatacaatataaatatgggcttgtatattttcttccttacatttaaatataaagtagaatacgcagttttattattttcaagaaaaagaaagagaagctgctgacctttctcccccataaagtttttcaggatgatcaggtcacagtgtgtacgtaagagtcagctaattatggatattgtcatctcggtaactttgtaaaaaaacaaacaaaactggcattgttaattccaa

SEQ ID NO: 91334 - DNA, 466 bp, Homo Sapiens
aacttctctacactcacgagactcttatctttgaatattttcccttggttatgcttctgtgaacaatagacgtgaaaagggagtctgttgtgtgcacttatggggcacacttttatgtgtgaaggatttttcagccagccttatatatggatgaccttatagtttaagagataaaagacaaagacccaatggaggtaagaaactttggtggtacatatgttgcctgatagtcagtaagaaacagaacattgattcattcctcttaacccacattatgggttaaagagaacattgccaggaggccttcactcttctagaagggcacagcatcattcattaggttctttttccatggtttaaagtagaagaggcaatgattaaaaaatgtatcccttatgataggctctatagcagattctactgtaaaggctatgatttcaaaataaaatttaagttatgtaaaaaa

SEQ ID NO: 91335 - DNA, 1036 bp, Homo Sapiens
ttaggctaggtacgaggcctcggtttaaattcggcacgagggccgggtggatctcgagcaggtgcggagccccgggcggcgggcgcgggtgcgagggatccctgacgcctctgtccctgtttctttgtcgctcccagcctgtctgtcgtcgttttggcgcccccgcctccccgcggtgcggggttgcacaccgatcctgggcttcgctcgatttgccgccgaggcgcctcccagacctagaggggcgctggcctggagcagcgggtcgtctgtgtcctctctcctctgcgccgcgcccggggatccgaagggtgcggggctctgaggaggtgacgcgcggggcctcccgcaccctggccttgcccgcattctccctctctcccaggtgtgagcagcctatcagtcaccatgtccgcagcctggatcccggctctcggcctcggtgtgtgtctgctgctgctgccggggcccgcgggcagcgagggagccgctcccattgctatcacatgttttaccagaggcttggacatcaggaaagagaaagcagatgtcctctgcccaaggggctgccctcttgaggaattctctgtgtatgggaacatagtatatgcttctgtatcgagcatatgtggggctgctgtccacaggggagtaatcagcaactcagggggaccttgtacgagtctatagcctacctggtcgagaaaactattcctcagtagatgccaatggcatccagtctcaaatgctttctagatggtctgcttctttcacagtaactaaaggcaaaagtagtacaccaggaggccacaggacaagcagtgtccacagcacattcaccaacggtaacgataagaaaaccgagaagaaactgccataaggatgtcagcgactgcttctgatgacacgtaaaatgggggccgttattacgaaaatgtgggaaggccttcgtggatggacaaggcctgtggcgtccgacccaattttaacctccgttttgcgggtcgcggcccacacactagaagaccggtttctc

SEQ ID NO: 91336 - DNA, 476 bp, Homo Sapiens
agccagctactgcagaaggggttcaggcagacctttccttaatgtccatgttgaacaggaccctaggtgctgttactttcccatggcatctcctcttccacagtagaacagaggcatgcccagggagccccccaccatcctcctggacccaaacactaagtcaggtactttgctcccaatcttaggaaggggcttcagagaccaaaatgtggccttctttcagacgtcatgaacatcagctagactcacagacattttgacagacatatcagggtcaacagatccaaaacagtctcatcccactcccctgaatctagttctttcttgcctgtttactcttccctataaaagaaaattcctttatgcctgacctttgctatgcttgcagatcttatggctggagtattctcccaattacaacacctcctcccttactgcagtgttcctgtgaataaagtcattccttaccaaaaaaa

SEQ ID NO: 91337 - DNA, 371 bp, Homo Sapiens
ggtggagaatgggcaaacagcaaagtcacttctgtgtccaaatgagagctctggagttgtggtggaaaaaggacagaccacacttcctgcaacaagggagcactttttcaaggcaacacttgtctttagaggatgttgacgatgcctcaaacttactgtagctgtcagggaaattagatttgaaaatgacaattgcagtactcatagaagaataaaacaccggcatagccaaagcatttctgccacagaactgaattcttgaatttccatgactctgaaatgaaatggaagccaagtcatgttagatttattttagaagagaacagcataacagaaattaaactgcctataaaagtatggcttaaatattt

SEQ ID NO: 91338 - DNA, 138 bp, Homo Sapiens
agagtaaagaatgcagcaggcagggtacatggtgtagaagagatggctgattttcactgggaaagattacccacagccctggagttcactctctgggctccctgatgtgcgtactatcccacagattgttctccaaat

SEQ ID NO: 91339 - DNA, 521 bp, Homo Sapiens
atgattgcaccactgcactccagcctgagtgacagagcaagaccctgtctctaaaaatatatataaaaagtacaactaaagaacttcttgcctaaacctgaattaccgcaatttgctgagtgactttgagaaaaatcagactgtttagttcagtcgggatgaaaagcttgcgattgcttcccacaagaatgggcaatagtgacggctgcaaggtacttttatttgttcatgaaagaacgacaatttttcaaaatgtaattaaacataatagaatgttttaaactactgggcactgaaactggaagaaaaaggaggctttattgaacattcccctttttcagttggttcaaagttcagcactgtggttatcattggtgatgccagaaaacattagtagacttagacaattgctatggcagtttctaaacagagctttttctatacactatttgcaactggagtgcaatattgtatattctgtgttaaagaaataaagtatttttatcatttattaaaaaaaa

SEQ ID NO: 91340 - DNA, 896 bp, Homo Sapiens
  misc_feature (53)..(87): n is a, c, g, or t
  misc_feature (708)..(711): n is a, c, g, or t
  misc_feature (715)..(715): n is a, c, g, or t
  misc_feature (719)..(719): n is a, c, g, or t
  misc_feature (721)..(721): n is a, c, g, or t
  misc_feature (732)..(734): n is a, c, g, or t
  misc_feature (736)..(736): n is a, c, g, or t
  misc_feature (792)..(802): n is a, c, g, or t
tccgggagagccgcaccgagcgcagcgagtgttttatgcgaggaagcggccgnnnnnnnnnnnnnnnnnnnnnnnnnnnnnnnnnnncagtcgacggtaccggacatatgcccgggaattcggccattacggccggggaggcgcaagataagctaggagccgcgcgagtcgtagtgtcgctgtttgcgggtctccgcgcgggaccggggcgcagcggggtcgctgaggcgagggtgtcatgtcagacaacgaggacaattttgatggcgacgactttgatgatgtggaggaggatgaagggctagatgacttggagaatgccgaagaggaaggccaggagaatgtcgagatcctcccctctggggagcgaccgcaggccaaccagaagcgaatcaccacaccatacatgaccaagtacgagcgagcccgcgtgctgggcacccgagcgctccagattgcgatgtgtgcccctgtgatggtggagctggagggggagacagatcctctgctcattgccatgaaggaactcaaggcccgaaagatccccatcatcattcgccgttacctgccagatgggagctatgaagactggggggtggacgagctcatcatcaccgactgagctggagtcatcttcctgcccttgccccatgcccaattttcattctcactttatatgtgtaaataataaaatattcaactttctannnnagcncaananaaaagaaaaannnanccctgtcgggccgccctcggcccttcgagaaacttttctaagaccatttccgtttnnnnnnnnnnncccccgttaggtaaagtggacatgggcccatagcctgttttcctagggagatcctggggccattgactaaggggtttgggtttcctcccccaat

SEQ ID NO: 91341 - DNA, 548 bp, Homo Sapiens
acatagaatctgtattccagtttggtgggatatcttacccaaagccacgtggctgtcttgtgacagataccgtagtagaattcaagttgtctggctcctaggccggattcattcactgtgctaggtgttgggtcttttattttgttattcttcttttgatcggatttctctcatgccatgtgttgataaagccggaagtctgagatggtctgttttcaagaaactaagttctaaatgtagagctgcttgttgttgttgtcggtggtggtgtatgcattcaatttgaaggaaaatttaccaggtcaataatacacacgtttccacacatttttaaagcaatcagtgagctggccttttaaaatttcatctgcgttaaaacatccctctgccgaggcaaggaagtggacattgaggtattaagcctgtccttcagccaagcactgagggcccaagtgttagaattaaaggaaaaaaaatttcccattgtattaatatatttacaaaagaaaagtcataaataaaagcagtggccatgcctccatacaaaa

SEQ ID NO: 91342 - DNA, 464 bp, Homo Sapiens
tgcattggaactagtgacagttgatggtgagtgttacaaatactaaaattaaaaagtataccaagatattactttattttctgtcaactcttgtcattgtatcttgtacttggcgagacggagtgttcgaatatgattgaaatgccaacatatgcatttaggaaatattgtataaagaaagttcagattgtttggctattcaatataaaaatattattatgtaatttattattgctctaaattgatcaaatatgcattgagtaccttcaagttgtgtggtatgttactggaaaatggcatatcccaatgaacacagagggcatgattaggaaatgttaagagatctattcaaattttataataacagtacttggaatattcatactgttttgttgaaataggcttttatttaatttggtagaaaaacacacctgctgatagctaccacctctataaagcaagtt

SEQ ID NO: 91343 - DNA, 521 bp, Homo Sapiens
  misc_feature (271)..(279): n is a, c, g, or t
gcttttatttgtagatgagacatttatgtgattgagtgaattagccattagacattttcattctagctctacagctgcaaagagggagggggaagatgtcttgagtcttgttcccaatttatcactaagtgcatcagaaatctgtcttccaacacccttggaaagaacagggtggtttttagatgtttgtgctcagacagcgggcaacagcagattaaataacaaggcaaaaatactaggaatgctggtagaaatctatgaccgcaggttnnnnnnnnngaccactcaagtaggccagacccaggagacctgggaatctagaacctggtaagcagtctggaattgggaaaggagaaaatctacttttggacccaggcattagaccgcttaagagaatctatcagtccaggtgatgagtgtgtggctgcaggccagcaggctgtggaatggcaagcagataccttttatatatttcttttaaaatatcagttaaaaaaaggctatttatattccataaaact

SEQ ID NO: 91344 - DNA, 562 bp, Homo Sapiens
aaatatagttgaaaaaaactactgcttagcagcaaccacactaaaagtatttcctttcatattagaggctataattttatttcttctatttcagctctccttgcctagatgatcatgtttgagtttcacaaatttcacgttatattgacataattttccttttcaagaattgcatatgaggtacttaatgttacagaaacactttgtggcaggccaggatggattttaagttgtcgtgactcagatgtcttcccttgaatctggatgttgtttcccaaggaatccttgccctgaatatctcctctactataataatgattctgagagtgggacacgtgggttttctaaactaatgaaaatgtgtcaacctggagttgcatcctaaagtcgccgagtcttcaagtctatgtgaggaagagaggggaagtaagtacacctctattctaaaaaaagcataaaatgaaaaacattttaggtatgagaaagaaagactaagtgcagtacttcctgatcattgtcccttgcattatcggtgtatcatgaaaaataaattctcattcta

SEQ ID NO: 91345 - DNA, 557 bp, Homo Sapiens
taaattagatgaagaaggatttgtattgccatccacagctaatgaagatatccataaaaggatagcactgtgtattgatggtccaaaaaggttttgctccaatagcaaacacttactggggaaagaagctattaaacaaagacacctacagttactcggttatcaagttgttcagatcccctatcatgagattgggatgctaaaatcaagacgtgaattggtggaatatttacaaagaaaactgttttctcaaaacactgttcattggttgcaagaatgaatactgacttcagaactcaaacaatggaagaacttgcatttttatggaactcagtattaaaagaaaaatataatgtgaattagccactttgcagaatatgttctagactggtggtctgaaagcatctgtagttttccttatactatgtatacatttattgtggtaaaatttaaaattaattttaatttaatactagtgtcatagatactttttgtacatcaaacaattgatcatgtcctcgtaaaggaattcaatgaataaatgtaatttttaagta

SEQ ID NO: 91346 - DNA, 551 bp, Homo Sapiens
tagttgcttttgtagggtggacagcaggactgcatgagaatagctgtgcttctggaccctatggtgaaagctctagtgaactgcaattaggcccagggtcccggaggaagaaggggagagaaaaaggggggtagttttccaaaagataagtaggggacaaaaaagtccacggggcctatgagcggtgagactcctgccctgattgtggcaaagcacctggagatgatagaacttcctagggaaaaggctgcatggagtccccagggatgctgggccctggtcaccaaggctccctgggaaggtctcttgtacctggggcacacagaccaacacttctgaatttgcaagcttaagagcatgtatgagcagaacctgtgcagaccaaggcttagagggctcacctcaatgttttgcactgtgtgagaccccaggaccttttcgtgattctggagaggggaacaaaccataataacaacaaaccaggtagcaggatagagactcattctcatctattttggttaaaagaaaataaatgtatttcttccacaaaa

SEQ ID NO: 91347 - DNA, 671 bp, Homo Sapiens
tttaaacctgagaaactaaaaatctttgttagcacattatatccaattgcatgctaattcaccagtgttcttcattattttacacatactacaaagaagaaaaaaagttcttttcatcataatctatgaaatagaattcattaatacctgaacaatagtgaagtgagcaacagagggtagtcctgagaattcagaagctgaacaactacataggaaatgcaactatttggttataattgaaatcagattaaaaacagtatgtttaggtcaggcacagtgactcatgcctgtaatctgccccttcatgctaaggtaaagctgctcctggctcccaggctatatgagtgctctgatctcatctctggaaccggcctgtaagcctggcaaacatcaagacctgaccccactgcttacctcaatgggagccgtaatgccttgacactttcgtcccaagccagagccttcccgccagcccatggcctgcagcatcttgttgccaatgttactgtggtcaatgccatctttggtgggttgctcgtaattcctgccagtggcaaacacacagttacttaaaacagccagggccccagcttacgaactggaaaatgtgcacatcacatacacagtgccggcatcaaactgcttcttgcgcttgggctctggaggttctg

SEQ ID NO: 91348 - DNA, 523 bp, Homo Sapiens
tgatgctacctttgctaaaaatggccatagattaggaactagctatgtttttagaatcaaagatgaaccggtaagctgtctcatgtaccaaacgtgaaatttacagtgtttacaaatgtctggaattttgcactgccatagggaatgttaaggttacttggctggaatttatcagacttgtgagtaaacaagttgaagtttagcagatgagggggaatattgaggcccctaaggctaaacaaaataatcagtatctgagatagtggctaatgtggctccccaggcctaatttgggaacagtttttcctgattgctttgagaagtactttcttttgacagaaattttcattctgcttgccattgctatattctccctttataggagccattggatttctttccttttgtgggaaatgtcccattagcattttcagatcttttgatgtgcactaatgccattattggtaatgccgttattggtgaatacagcatagttaaataaactgttacagtaaatctaaaa

SEQ ID NO: 91349 - DNA, 1068 bp, Homo Sapiens
cgaaggcattgtaactatgaaccaggtgttacaaaaagcaggctggtaccggtccggatattcccgggatatcgtcgacccacgcgttcgaaggcgaggaggacggcttcggggaagcagaaagaatacgctgccatcaactccatgctggaccagatcaactccatgtctggaccacctggtaggagaagaatgaccaccgtccacgcccgcctccaggagctgctggagtccaaccggcagacacgcctggagttccagcagacagctcggggaggcccccagtgatgccagcccctaggctccaagagcccccaaccgggacccaaccctgcctccctgggctaggctctggcctgggcactcaccccctggcttagacaccttctcaagggctggccttcagggacccctggtgggtctgcctgcctgggccacccttcctgcctgggcctccccttggcctacctgggccagccccgcaacaccgtggcatgccctcctggggccaagagtgggcctgcaacccacccacttgcctgcccacccaactcctgggcgctccccactctgcccaggccttgcagtgtccacattaaactgggtctcccagcaaaaaaagaaacagaaacggggggggcggcacaaagagtttcccctaggggggccaaaggttaaggggtaccccagagtcttgggcacacggtggccccatatatggtagagcctattaacaggctaggcatgtgaccaggcgttaacaaggccgaacgtggcacaacgcgaacgctggaaccctgggacaaggaacgaaaaccggggggtgtgccatatgtggaccaatcttacgtcacaggaaaatttcaagggtcataggggtaaattatacgagaatttgaaaaggggatatacggggggtaaacacagcgggacatatgcctgggtggcatggaacaatttgaggctcaagggaattttatctagggaacaaatttttcgcgagggcggaagacgagaagaaaagcatgagaaagaaagaggagacagtgtaggatgtgagaacaaggt

SEQ ID NO: 91350 - DNA, 844 bp, Homo Sapiens
  misc_feature (687)..(687): n is a, c, g, or t
tgcgcgttctacccttccggcccgtgttctatccgccgcctccaccttccatccggcgccggctttcggcgcgacggtcgccgcgttccatcgtcgcgcggcccttcgggcgcccgagcccgcaatgtcgggccccaacggagacctggggatgccggtggaggcgggagcggaaggcgaggaggacggcttcggggaagcagaatacgctgccatcaactccatgctggaccagatcaactcctgtctggaccacctggaggagaagaatgaccacctccacgcccgcctccaggagctgctggagtccaaccggcagacacgcctggagttccagcagcagctcggggaggcccccagtgatgccagcccctaggctccaagagcccccaaccgggacccaaccctgcctccctgggctaggctctggcctgggcactcaccccctggcttagacaccttctcaagggctggccttcagggacccctggtgggtctgcctgcctgggccacccttcctgcctgggcctccccttggcctacctgggccagcccccaccacctggcatgccctcctggggccaagagtgggcctgcaacccacccacttgcctgcccacccaactcctgggcgctccccactctgcccaggccttgagtgtccacattaaatgggtctcccaccantacaccactcccacttgcgcccttttggcctttccaaatacgcttaccatccaacccctgttgggcgccttcggcccttaaaaaattttcaaaaaccctctttttgggccgcgggcccccatagggaacgggacaagggctaaaaccgtgttcccca

SEQ ID NO: 91351 - DNA, 636 bp, Homo Sapiens
  misc_feature (478)..(517): n is a, c, g, or t
ctgcagagtcccagctgctgctctctgccaggttccgggaggggcatggtgacaggggcttaagcctataactgctggtgatctgacagccaaaagaaaaccctgatgagagattcctgcctggcaaagagttgcccaaggagaagggtgggacagggtgttggctgctttccttcaggaaaaattcttccaccccagctccaagacgccaggattggacagaacaggctggcgagctggcagagtgcctgcccagtacacaaccttggtgctactccaaagaacattgtctatcgagacctgaatcatacccttctcgagtctatgctcagcgctcctccccattcctccccatctcagttgctcacaggtagacctattggagcaaggtagcttttatttctggaaaatccatcgtaaccatcaaacttgataaacagctggcatttgaggaatcattggagtcttcctttcattnnnnnnnnnnnnnnnnnnnnnnnnnnnnnnnnnnnnnnnngtctcttgtcctttttcagaagaggagttgccaaggggaagggaccagtaacattgaatgactgcttgttgtcggaccccactagctctttacataaatgatgtcatcctctcaaaaaa

SEQ ID NO: 91352 - DNA, 505 bp, Homo Sapiens
cagcacagctatgtgggaagaacacaggctggtctgcaggtctagatttggatcctagctctgttacttactactttgtgactttgagcaaattcacgtctctgaaagaccaggaccagagaccatgctgggaagcctggctgctctttgaggactgagatgaacttagcaatgcagagaagaacaaagagaggcttgtgctcaccgtgttccagagggatcaccgtgttccctttgttcatttgaggacatgaatacaactatggtctttggacaaaaggcatatgccaggcagtatgaatggtctctcttgtctgtgcaattagtatgtaagagcacgtgaactggtgcctgggacctctacctgttttagtatgatagcaccacagtaaagggcctggactttgtatgagcttgggaaaatcatgtcacctctgcaagtcttggtttccctgggtgttaaatgtcaatttaagtaaaatgctatctactttgtattggaaaa

SEQ ID NO: 91353 - DNA, 582 bp, Homo Sapiens
aaagagaccagataataagcatttaagctctagtcaatcccatagaagcgatccaaattctgagtctttatattttgaggatgaagatgggtttcaagaactaaatgagaatggaaatgctaaggatgagaatattcaacaaaaactttcttctaaagtattggatgatttacctgaaaactcaccaatcaatatagttcagactccaattcctattaccacctcagttcccaaacgtgcaaaaagtcagaagaagaaagctttagcagcagcccttgccacagctcaagagtattcagaaataagtatggagcaaaaaaaattacaggaagctttatcaaaagcagctggaaaaaagaataaaacacctgtgcagctagatttaggggacatgttagctgctctggaaaaacaacagcaagcaatgaaagcacggcaaattactaacaccagacctctgtcatatacagtggttactgcagcttcttttcacactaaagactctactaatagaaaacctttaaccaaaagtcagccctgtttgacatcctttaattctgtggacattgcttctaataaagc

SEQ ID NO: 91354 - DNA, 270 bp, Homo Sapiens
gcacactgcatattaaagttattagataaggacagtagttgtatgatttacgaaggtgttctgttcttgacggtttgacgaaggtgaagtggagagctttcctgagtgtgtgtttttagtagaataagacaaattggtgagatcttaatacttgtctcttgggagagaatgagactaaagatcttaaatattccttggccacatcattcagtatctgatgctatttataaaagcatagaacaatcagacaagaatacctataaaattaaa

SEQ ID NO: 91355 - DNA, 382 bp, Homo Sapiens
aagttctttctactccattggaaacaataatattcagcagagggattattcttcttaatataaatgtttatcaaatactgtgttaatacaaaatagcaatttcacaaacacagaaagggtccaataccagcaggacatttttttaaaagtcatgccgcaaacgccactctcagacattgtagacattataggtctataaaagtgaatatgaaagacaatcatacagtttccgtttcctcccaccccagagaaaggccttaagaagcagcgaggcctgcacctgcagaggtgggaaagctcctagcggaacctggcagtgtaaacaggactggtgggaagtgcattcggtgaaaggccagaccctgaaatttgaaaatgctga

SEQ ID NO: 91356 - DNA, 398 bp, Homo Sapiens
aggcacagatgatctctgaatgaatgcttatagggaaccatatgtatatgcttaaagatttctctaataaatatggttgctgcaactttagagttaattctgcaaattcaatttaaaagtgatgattacagatctggcattgccagatgtttcagaagctttatgacaattttgtgaatatttaagttaccaatgactaaattcagttcaagtatcaacactacatttttaaagcaatgaagcaggtcttgtaagggttgaaaaggaactgtatgcagagcagtgacctgtggctgatgctatactgactgatggctgctgagctagagtaggggaattttaggtcacttgcagcctgtaactgaatttcttgatttgcattttagggttttctattt

SEQ ID NO: 91357 - DNA, 114 bp, Homo Sapiens
aacacaagtactacattctagtctttctgtggtgtcattgtaactattgtttcttaatatgctatccactgacttcaagggatcaataaataggaatcaaggtgtcccagaaaa

SEQ ID NO: 91358 - DNA, 1882 bp, Homo Sapiens
caccctcggctaggtgcgaggctgggtgtcgaattcggcacgagggttgagcgccggcggctcgcgcccacgctgggccgggagtcgaaatgcttcccggtgccgggagtgagcgatgagctggcttctgttcctggcccacagagtcgccttggccgccttgccctgccgccgcggctctcgcgggttcgggatgttctatgccgtgaggaggggccgcaagaccggggtctttctgacctggaatgagtgcagagcacaggtggaccggtttcctgctgccagatttaagaagtttgccacagaggatgaggcctgggcctttgtcaggaaatctgcaagcccggaagtttcagaagggcatgaaaatcaacatggacaagaatcggaggcgaaagccagcaagcgactccgtgagccactggatggagatggacatgaaagcgcagagccgtatgcaaagcacatgaagccgagcgtggagccggcgcctccagttagcagagacacgttttcctacatgggagacttcgtcgtcgtctacactgatggctgctgctccagtaatgggcgtagaaggccgcgagcaggaatcggcgtttactgggggccgggccatcctttaaatgtaggcattagacttcctgggcggcagacaaaccaaagagcggaaattcatgcagcctgcaaagccattgaacaagcaaagactcaaaacatcaataaactggttctgtatacagacagtatgtttacgataaatggtataactaactgggttcaaggttggaagaaaaatgggtggaagacaagtgcagggaaagaggtgatcaacaaagaggactttgtggcactggagaggcttacccaggggatggacattcagtggatgcatgttcctggtcattcgggatttataggcaatgaagaagctgacagattagccagagaaggagctaaacaatcggaagactgagccatgtgactttagtccttgggagaacttgagccagcggctgtcttgctgcctgtacttactggtgtggaaaatagcctgcaggtaggaccattgcagtgatgggcagatgcgtctttcacacggaatcaggcacagtggccttctgtgacatgtgtttataaaaaatggttaagtatataataaattgaacatctttgagattggagaattatgtgagatttccacattatgtttactgggttcaatactgtccttgcttgttttattgcaggcaagcaaggcaaatggcctaaaatgctgtggcttatattttgataagaaatcaaaaaaccattggttaaaagatgcaactcagaagtctggaagtattctgaaagcatccatttaccgtccagttgacaggtttgagtctcctgcttgtataggtgacttgtgcccatgggtacattaaaggaacatgctgcccagggcctgggcggacagctcagtgggcaggatgtgtgctgggtctcagccccatgtgcctgcttgctgggcagttagtatagggcaaagcctgcctgcggcgaccctggctgctaggccattctctaggaacagctgcgactcataaagaccaagaagcataaataaactttcaaaaatttatttgggctctttcgttaaaaactgtgcaaattacaaaccaccaaacacacacacaaaaactttgttggccggctgggacccgaaaaagttttaacccctccgtggggccgggggccccgtggtacgtggccccgggccaagcgggcccaaggagaccgcgcacacacggcgccggtccccccttaaaaaccgcggcgaccccgctgcgacatcccaaggtccgaggcaccgggctcacagagccagagctatacg

SEQ ID NO: 91359 - DNA, 420 bp, Homo Sapiens
cttacccaggggatggacattcagtggatgcatgttcctggtcattcgggatttataggcaatgaagaagctgacagattagccagagaaggagcatcattataaactgctgatctactgtttctttgtcaaacgggaggagataacatgagggtcatgagaaatgtttgcagacggagtgaatgccttgaaagtgctgcgaccaggtgctgacacccggaggtctggctgctcaaagtgttagctgacacggaagacacacggactttccctccattccccaaaactccccttccctgactcgtcagctgcataaaaaccctctccttatctctttgtcaaggggatttgagaaatcttgctgtcttgtcttcttgctttggccaaatggaataaacctttctctgtctccagacacct

SEQ ID NO: 91360 - DNA, 383 bp, Homo Sapiens
gtatcatcttagaagtgaaagaagcccctttatcctgcagtgcccctctaccaccacctactgacaaagaacatggtgctatctggcatgggagaaatgttcagtttgctatggcttgtatgtgtcccctcaaattcaagtgttgccaatgtgacagcatcaagaggtggggtctttaagagatcactaggccatgagggattctcttaggactgggatgaaggcccataataaaagaggtttcggggagcatcctgctagcttgccttctgtatgtgagaacacagcaagaaagccctagtcaacaagtgccagctccttgatcttagacttcccatcctccagaactgtgagaaatacatttctgttccttacaaattaaa

SEQ ID NO: 91361 - DNA, 566 bp, Homo Sapiens
  misc_feature (177)..(194): n is a, c, g, or t
  misc_feature (403)..(513): n is a, c, g, or t
ctcttcagaccttcacctgactggatcaagcccactaacatcgaggaggacagtctgcattactcagagttcactgattgatttaaatgtcaatctcatataaaacaccctcacagaaacacctagaataatgtttgaccttataattggaaaatcagagcaaaagttaaatctctnnnnnnnnnnnnnnnnnngtatgacccagtagctaggcacctgtggccccgccaagttgacacataaaattaactgtcacagtatcatcttagaagtgaaagaagcccctttatcctgcagtgcccctctaccaccacctactgacaaagaacatggtgctatctggcatgggagaaatgttcagtttgctatggcttgtatgtgtcccctcaaattcaagtgttgnnnnnnnnnnnnnnnnnnnnnnnnnnnnnnnnnnnnnnnnnnnnnnnnnnnnnnnnnnnnnnnnnnnnnnnnnnnnnnnnnnnnnnnnnnnnnnnnnnnnnnnnnnnnnnngctagcttgccttctgtatgtgagaacacagcaagaaagccctagtcaacaag

SEQ ID NO: 91362 - DNA, 324 bp, Homo Sapiens
ggggaggaggggaaggatatgagttttccatccatctccctggagaaggccatgacgggctctccaggccctggggagatctggcgagggactagccaagtcagggtgacctcttgacctgactagtttttctaacccacatgaacaccagggtgcctctctcttcctctagcccagggtagggggacctgagtgagagagagagtgagacagacagcaagattgagacacgcgggcccccactggtctctgagtgggaaaggcaagtgcgagagataaaggcctccaagagaaaaaagaaacaaaccaaagatttaaccattt

SEQ ID NO: 91363 - DNA, 508 bp, Homo Sapiens
ggggagaggaggcagcgcgcggcgcggagaggcgaggaccggtatctggagactggggacggaagcggggagctcagaccggcatccattctctcctcgcctcccaatgccacctggttacaactggaagatccagacttcaaaccatggtctgtttaattccaaaatctgtgcacttcttatcactttcttcaaggacagagccaaacaggaacagaggctgcccaactcccttctgtactgagctctgttttcctggtttgccatctgtgtaacaaaatggtgagtgcaaatgttagtcgggcctaagcaagtcatggtcctcttcctaacaaagtgaagagttttatttgaatttagagttatattaagaaaactaaagagatgggatgagaaggtaagaactccctcttaaggataataggaaggaaataatgtgttaacaacatcaatagttactatagtgctcgctgtgcaccaaacacatgctaggagtagggcatgaatg

SEQ ID NO: 91364 - DNA, 495 bp, Homo Sapiens
aacaaaaatgttacaatagtaagagctacaacagtaacatcaacaaccacgtcctaccccacgagtggctcattctagcaaaattgacaatgaagggcttgaaagcgattcgcatttaggaggccagagcccagacgacgaccagctccgaaccccacaagccttgtcgtgaccgcgccccgcaggcggggggccccctcgcgggtcacccgcaggggcgcacctccaatttaccaaacaaggtcgcatgccccagccgggctctagtccccgcccagtctggggcgcacctgtgcagggcgcgtgggcaagcgagggcgggcggctgcgcgccgctccgtgtgcacgttcctgttccggactttctgggcgtcccgttacgaagcctttcctcggcccttcctcaggtgcgcagcgcctccgggagccggtcccggcggcaccgggcacgacgccatcttccctcttttaagggcaccggggctgtgcggccgc

SEQ ID NO: 91365 - DNA, 534 bp, Homo Sapiens
atggtttagttttgcttttactttttcattaaaataggcaatgtgagatcgcagttaatttttttacactttcatttatttgtcataaatcagacaaatgtagaagttcaactgaaaattctctaagtcaaagaagatggggagaaggatctaacatttacaagatgccaattatttatatattgtattcatcctttcaagaattttataaaataaatattattgcagttttatagatgagtaaactacactcagtgggcttaaatatcaccctcaggttcacaaagctagtacattcagagataggagtcaaagtccatactctcaccattctaaccatgctgccgccactcaatgtagacttagccaactttaacaaatagccagttgatccttatccctatgttgtactttaccttttggggggctttacctcttatgtgtacttgaactgtaatttgtggaagatataattttaatttataccagccttattacccgtgtagccaacagcagcttcctttatgaaaaaaa

SEQ ID NO: 91366 - DNA, 456 bp, Homo Sapiens
gcacagtcctctggaaatgcagatgcccgtgtggaggaaattctggcgggagaggagcggcgactcgccgctctgcttggatctcaaggcatgaggttctgggtgtgcctcgcagcctgcagagccatgtggggccttgctgccagacgaggacgggctgaagacagcagctcgtctccagtggacgcctccaagttcccatggaggggtgggcagcatcgcaccaccatgatgccttgtctgctgcgggtgggagttttcaggccctgtcatgtgagacccacgggggatccttcctgcgatgtgcagcctccacgactcggcttctccagagtgccagatacacaggtggcattttatggcagtggtcactgggacccaactcccttctctgtacacagctgtttttttaatttccaggtcagaaaaattatcttcctactttgaactcttaaa

SEQ ID NO: 91367 - DNA, 467 bp, Homo Sapiens
  misc_feature (358)..(409): n is a, c, g, or t
catttgcagcggggaggagcctgttcctgtgtggcgacctgggcttcaatctgtgaggcgggaaacctgctagcaggactcttgctttgtggtctcctgtgagaagaacataccccaggtagcctcttctttgagaagcacaaggaaacacgtggtggtggaactgaacacaacccacagcctggagctaaacccaacctaagccagccaagctcttccaagatcacccaaactcaagttgacctgtagatccatgggcaaggaaagaaatgcctgctgttttaagatctcaagttttaggttgatttgttatgcagcattattgcagtaaaaatgaactaatacactacctaatccnnnnnnnnnnnnnnnnnnnnnnnnnnnnnnnnnnnnnnnnnnnnnnnnnnnntataatacaggcttcagggataccatggttaataaaataaagagggcaaaagtaaatg

SEQ ID NO: 91368 - DNA, 497 bp, Homo Sapiens
gggcccagagaagggcatgtttggagcctggctgtgtcaccttggaaacttggggcacgtgtggagtgtgagtgagtgagctgctggaatgaactgaccagacaggacatcatctatgtatgggattagaatggaattacaggagaaaaccaaatccctcaaattagcattcaggatcggaaaaaaaaggcccatgctcttagaccaccaccaagaccttgtcttgtcctgcaccgagcaacctccgtgtcaccctgctccacctgctccatgaagccgcaccctccagagaggacccttcccctttccacccttcgcggaccactcaatgagctaccctgcacctgaccccttctgtccaagtcatcacagtattcccagagctggaacagtcaatgcctggcacatcgtgggcactcaacatgttgaatcaatggttacaaatacatgaatgtacttgttgaataaatggttataaataaatgaatgaatgatca

SEQ ID NO: 91369 - DNA, 882 bp, Homo Sapiens
gccatgaacggccttcgtcaaagatcccacggctggcctcccttccgggccaacctggcccagtgccggggctttccttcccagaagcctgttgaggtccgggtaccccactctcaggaaccccaaggtcagggcaccgtctaccctggctcagctcgtcacccaccgtctgaagccccttctctcaccaaaggttcggagctggcggggggctgaggtgttcacgaacagtcccagcccctggggctgcatgtccagttctgtgcggcatgagaaaggggctccgtggtcgtctctgctggccagcacagtggcagtgacctccgctggctcctccactgcgggctgccggctcagctcctcctcccagcgaagcagcaccaccgtgaggctggtccggggcgacccatcctccacttggcagcgcagggtgaagttctggcccaccggctgccaaggaggcaggggtgccagctccacacgctccgggagcctgtacacggtgatgttagaggagcctgttatctgggagccattgcagtacactgagcagaggatccgactgttgccagtcacgttgctgagattgaaggctgcccagcccatgccactggccaccagctcctttgatagggacgtctccaaggcgattttctcagagctgggacaatcagtactgcagttcacaaacagggaccctccagcagagagcacagggttctggggctccacccgcaaaaggaactcctgcccctggacacctggggtcagcagacagcagaccagcagagtccagcaggcctgggccacaacacggatggtaccatggtggccattctgacagaggaaggtgccttcctgaggtgcccgaagggcaggcag

SEQ ID NO: 91370 - DNA, 554 bp, Homo Sapiens
caagggtttcggagctggcggggggctgaggtgttcacgacagtcccagcccctggggctgcatgtccagttctgtgcggcatgagaaaggggctccgtggtcgtctctgctggccagcacagtggcagtgacctccgctggctcctccactgcgggctgccggctcagctcctcctcccagcgaagcagcaccaccgtgaggctggtccggggcgacccatcctccacttggcagcgcagggtgaagttctggcccaccggctgccaaggaggcaggggtgccagctccacacgctccgggagccctgagagaggaggggaggatggcacttagcgggtcctgcaaacccacccactcaccccagggactggggaggagacagggtagtcctgccgagaactgtgagctttgagttaataaacttagagggcttagagctgggccagtcgaagcgtttgctattatcattagcgcagtgattatcatttcctgtgttgtcagataccttgcaaggcgctaaacaaaactttctgttctcaaagatggcacaat

SEQ ID NO: 91371 - DNA, 384 bp, Homo Sapiens
tctcattgacctggaaggatgccgtcatccactctgacctgcaaaccttttgatctcaaacagcgatcttccaggcgtggccccaaatcaacagcatcagcgtcacccaggagctggattctttcccaaaacccaaaggcccagtccagtcacgagaagacatcaggcaaaccgaaattcagggaagttctacaaaacactaaccagtactcttcaaagttctcaaggtcatgaaatttaagaaaagactgagaaagtgtcacagttcagaagatactaaggagacaagatgaccaaatgcaatgtggcatcttgaattggatcctggtgaataaaaatgcagtgggaaatccagcgaaatcaaaataaagtctgtagtttaaa

SEQ ID NO: 91372 - DNA, 693 bp, Homo Sapiens
cccacagaatcacagaattcatgttctcacagtagccagaagctaaaataatgtgcttctttattgcacgtcaaaccaagaaaggtataaaagccaatgattctcaatccaaatgtgaaagtcaggttcacctcaactggattcggaatgtgctgatttccattggactcaagttgatctcacttatattctgagtgccgggaggtgaatgcatcaaggatagtgatgaaggtgtgagactttcgacaataaacttgtttaaaagtttctgtaccaatatctttccctgagtagtagaacaaaacagccctgtgcctttgctagagaaccgacaatcaaacccttttctgtggaggatcaaggctgcctcattggagtgcccattgcccacctttgactgtattgttctcaaattaaccagatgaatgtcacaaggcaaagatgactgtaatggagagaattcaccttgcagctcaagggtaggtgagaacttatttgccattggaatgactggatgattcatgagagaagaagttatgtggctaaagagagaaggataactgaccgacttcttttcttcttccgtatgaacagcacttctttgtctagtagtattcgagatagattagctgtaatcttgttatgctggataccttgctcaaggccacgattatcatactgcatgagtcttcg

SEQ ID NO: 91373 - DNA, 491 bp, Homo Sapiens
gagaacagattctccctcatagcccttcgaaggatccaagcccgtgataccttaattttggacttctactctccagagctgtgagaggatacatttcggttattttcagccacccagtttacggactttgttatggcagccttgggaagcaaatgcactcagtacatgttaatttgtatcttacctactttgtacttgcaaggtgtctctgggtctctggtgtacaccacggcctgcccttgagcatgctggggtgctcagcacgggggtagccctgcagcctgactctctgtagacagatcaggatcggtctaacatggaattatgaagtggagccagggtcagctttgggccacgcctgccttctgtgccggccttggattatgttcaaattcatctcatgctaccccagcagaaaagagtgtcttcaataaattcactcaaaaggaggtaccagtgaagaaattgtccctcccaagtgaatgagtcac

SEQ ID NO: 91374 - DNA, 459 bp, Homo Sapiens
  misc_feature (83)..(83): n is a, c, g, or t
tttttagaatagccataaaaaatatgtctttgtttagatcacttcagaaccaaatgctctgaagccagcctatccagagagcntagattgatttgaggccagtccctgcaatgcaagggggggtgtcacaactcaaaggccactcctgagctttcactttctttccaaaataattgaagtcagtggactgtccccagagcttctgtgaggtattcacattttctctggagtgacgtgacttttgtaagacatctaaggcatgtatatgttatactttggcctggctaaatctggagaatgacagaggtctccaaaccccgaggactgttgggttgatttgaattaaatgagatgccccctttctgcagaaaatggaaactaacatggctatctctgtccattacacaagacttttgtaaaacagtcatggtttctttcttaaaatctgttttaaacaaa

SEQ ID NO: 91375 - DNA, 654 bp, Homo Sapiens
gtggtcccgagcggcagagcgtgatccagttcagcccacccttccccggcgcccaggctcctctctgacacgcctttaggcgaaacatgccccaagacacagggaccgtttctcccctaggagcagcggtggggagcagggccaaggtcccctgaccactgctcagaggagccctaggccctggccgcagtgccttcagcgcccgacccgggcccccacctggtcagccctggcggggcccactcaggacagctgggggccggggcgtggcagggccctctctgtgcctctcctcccaagtaggaaggggctccgggtggctgctctgggactgggcacccacaagggctcagtgggcccaaacccttgaaatccgtgaaaccgggtggtcccaagagctagaaactcaggaaaccccaggtgctcagggccccgcgtctcgggggctccgtggggcagacccctgctaatatatgcaattctccctcccccagcccttccctgacccctaagttattgcccgctcacctctcccaggccccaggccgcggagctggcagggtggcgcctgcggtttctatgtatttatagcaagttctgatgtacatatgtaaaggacttttttaaatatatgtgccttttgcctacttaaaa

SEQ ID NO: 91376 - DNA, 545 bp, Homo Sapiens
  misc_feature (45)..(45): n is a, c, g, or t
tgtcctcccaacagcaggccaccagttcaagggacaagaagcccntaagctccctccacctttcacatagggcccaggtggccttggagtacctgcctttcttctgcacctatgggtgcctcctggaagaggaggggttggtcctgcagcccaagacaccgctccaggaggactcagaactgctcagtgggttcttcccttactaccgctctgaggaggagagtttgcccagcctggcccttcctggctggtcacacaggggctcccaagatctgcccactgagaaggaggcacgggctggctgcttctgcaggacaacagtcagggacgaatgctctactctaacaggcccctggacaggcccctctcagggctgctgcggcccttggagcaaggtgtcactggttgggagcacagacactgcaggaagactgtcctgttcaagcccagcttgaccacctgctaggagagcggcctggggaacgtggtttccttataaaagagagaacagcagcagcaacaataaagccattgtgaaaattaaa

SEQ ID NO: 91377 - DNA, 518 bp, Homo Sapiens
tttacctgagagtgtatatttatagaaagatacatagaaatggacagatggcatctatctatagatacagaaagctctgttagagaaccgtgtaggtacgtatatatgtgccacatcctccaccacaaccaacagcacacaattgcctggatcttggaaaaccacgcttgtttaagtggttggttccctccctagcagtttccaaaatgagagggatggtctcagggatagtccttaaatacgtgtgtgtatcactgtaaagtagagagagaagaaggagaaggaagagaagtggattttcatgtcgtgcatggcagaagagatgggactcttggggaaaagggcttgatcccactggaaaagcatgaaagacaactccagaaaagacagctaaggtttttaggttgggacataaaaacacaacagcaagacgttcgcactctgcagtccactgaaatcccttgtagcatataacaatcagttaagggcaaaataaaatcagaataatactaagaaaa

SEQ ID NO: 91378 - DNA, 275 bp, Homo Sapiens
cttcctctgtcctgctgcttgaaacatatgctgctatcttagatcatgaggtcgaggccatgcaaagtggagcaacaaggagctgtgtccctgacgccataagcaccacacctgtcctgaattgctgtgaatgacaccagctaactacaatgcattgtctcaacatcctagacataataaaaagccataaatatgtttgtcctatgcagcacaaaacctttgtatctttgccttttatgttgggatcttaattaaaaattacatcctctaaaaaa

SEQ ID NO: 91379 - DNA, 587 bp, Homo Sapiens
accattctgacttgaaacctctcttctgatccaggaacaactatcctgagctgccgttcatgattcaggttggcatcaatcaaattggaagcacatgaattatacattattgtttctgagccacagttttttgtttttatctgctaaagacatgaagaatgggaacactaccattgcatttcccagccccagagaaggatgttcactcccatgttctcaccttttcttcatctttatttgatggctataactttgtcattcatattttttaaaaatcgtgggtggatgttttggatttttttaagatatacagtaaataccaacttcttaaattttccctcgctgcttccagaggaggctggtatattttttctctgttcaacaacgagagaagtatcaagttttaggctcccttcaaatcaagacagttcgtgtgtatctttgtggttcataatctgaaaacaaagcagattctgtgtgactgagatgggatcctaggggctggaaaccatcactgtttgcctgtactgtccttctcctgtcgtaccatacccttttcttttaataaagacttatgtgagtataaa

SEQ ID NO: 91380 - DNA, 796 bp, Homo Sapiens
  misc_feature (81)..(81): n is a, c, g, or t
  misc_feature (171)..(172): n is a, c, g, or t
atctcttggccccgctgttatgcctggccatcaggcccggatccaaggtctgctttcatgtgcagcgacggcaaacatccnttggggattttgccccaccccaccctggtagcaattccaggccacacaaaatggagcacttgtatgacctttcataatgaggcaccaaanncttgacagtgtgtttgacaacccccggtcaggtcctggacctgcgcgaggggcggcagctgcagcagcacgacttttcacctccccagtcttttctctgggctactgccccaactgaagagtggcttgcagtggggatggagaacagcaatggtggaagttttgcatgtcaccaagccagacaaataccaactacatcttcatgagagctgtgtgctgtcgctcaagtttgcccattgtggcaaatggtttgtaagcactggaaaggacaaccttctgaatgcctggagaacaccttatggggccagtatattccagtccaaagaatcctcatcggtgcttagctgtgacatctccgtggacgacaaatacattgtcactggctctggggataagaaggccacagtttatgaagttatttattaaagacaaatcttcatgcagactggacttctcctcctggtagcactttgctctgtcatcctttttgttcacccccatccccgcatctaaaaccaaggatttcagatactcattgcagttgtggagtttaatcccctttcttaacctcacttcccacttgctattgaattgtgaatagtcattaaaaacctgtgataccaaa

SEQ ID NO: 91381 - DNA, 578 bp, Homo Sapiens
  misc_feature (88)..(88): n is a, c, g, or t
  misc_feature (96)..(96): n is a, c, g, or t
  misc_feature (103)..(103): n is a, c, g, or t
cttgagctcagggttctgggagagtgtggggctgatggtggtaaggtcattttgcacggtccccagggtttgcctgcatacctccgcntgctcccntcagagntcagccacccgccccagctccagcagcctctcctcctgctcccagttcaggcatttcaagtcctcattgtcttgcatgtgggcccactggagctgtcctgctagactttccagctcctcccacaggtgctcagcctctgcctgtagctgctgctgcagctgcagaccccagaacttggtgtctgcctcccacggcactgggaaagatggaggcagattagaaaaatcatcccctctcatccacagccatcaaagcagggctctggctcacaggtcccctcagaagtgccgcttcacatgagggctgcgccccctgctgggggctccaggggtgggattcagctgagaaaggaagcagacaataacggcctctggattctcaaaaacaccctcctcttggtacacagctcctctcgggctccccagacttggcctccctgctaatgattctcaaaaaaaccctctgcattctcaaa

SEQ ID NO: 91382 - DNA, 569 bp, Homo Sapiens
gcggccgcagcggcggatccggcggctgctgcagcccgggcggctgccgagaaggagggaggggaaacacaaagccggctacgcgctgcgagataacaagagtaatccacagacttaaaacatgagctcagatgccagccaaggcgtgattaccactcctcctcctcccagcatgcctcacaaagagagatattttgaccgcatcaatgaaaatgacccagaatacattagggagaggaacatgtctcctgatctacgacaagacttcaacatgatggagcagaggaaacgagttactcagatcctgcaaagtcctgcctttcgggaagacttggaatgccttattcaagaacagatgaagaaaggccacaacccaactggattactagcattacagcagattgcagattacatcatggccaattctttctcgggtttttcttcacctcctctcagtcttggcatggtcacacctatcaatgaccttcctggtgcagatacatcctcatatgtgaagggagaaaaacttactcgctgtaaacttgccagcctgtacagacttgtagact

SEQ ID NO: 91383 - DNA, 704 bp, Homo Sapiens
aagtagcactatggagattcacacgtggcaaagagctgaggcctcccaccaacagccacatgagggagccagagtaggagtggctcctccagccccagtcgaaccttcagatgtgacagacttggctgctgacagtttgcaatctcatgagaccctgagccagaaccacccagctaaatcagtcctggactcctgatcaacagaaatgagaccaaagagaggcgttttgaacattaagacgctttgctgcttctcacctgaaacacgtaacaggaacaccaacctcttcagccgcgggaaatcttctttgacacaaaactcaaaccgagtcaacccaaagttccaagttctttgctttctcttctgtgtgtgtgttggtttgtcccaaaagtcagtttgcaagttgaaacttcatgaaattactcgtagcagaaataaagtacattgtacaaatcacgcaggtctgcgatgtggagtataaaaatggtatttacagccagtaaacatggaccagaaagacacgtacaactgcacaccggcacacactcccaagcaggccctcgggggcctcggcgggcgccgcggacacgggtgaggccccctcgaggcagattggcatggcacacgcttgcacacggggacacacggaacacaggcacgctagaggagagtctcgaaacaattatcaaactctggaatatcga

SEQ ID NO: 91384 - DNA, 461 bp, Homo Sapiens
aatgaagtccacaggtccaccccttgtcaacttggcatccatccgcatccccttaaaccattttcagtctccaaataaagccccaagcaaggcagtagctccacctaacatgatgcaactatcccgggattgtgatttttaagacttcagatgttagggatttgaaactttagagatttgcgtctttcagtatttcaatgttggggaccagtgtttgggattatgtcttttagaataatgatccaaacttgtgtgaggactgtgaggctcagggtgggagacgggtgggggagccgaccttaggagggcccactgaaccggcctcaatctggccccagtctggcctactcgctgccccaggacaggtggctacaacatgctgagggcctgaagggcgtcccctcaggaacattgtattactgttttgtgttgctataaaggataactgtgaccaaataaaa

SEQ ID NO: 91385 - DNA, 487 bp, Homo Sapiens
gcaggccggctgaacgtcgggactgtagatcccgaagggctcctcgggggcagctgccggctgacctcacctgctggttccaccagtgcgcgcccacgaaaccggcaaaatgtcccaactgcagtatctctccgctggctgatagctccccgggcaaaaatgaaaccttgccagaatagcggaagctccgctaaagcctcccatgccccctcatctcttcagaagtcacacggatcacgactcttcagaagtccacagatccccgtggactgacctagctatcatatctgtatcatttacatgtattaatctatctctgtgtatgtaacactttatgtaaatagagtattggcgtctgtcttttgctcaatatggtttatgcaatttatgtttttgcatatatatttttcatctctgtggaatagtccattgtatgaatacaccaccactgatctattctaaagaatgaatatattctgctgataat

SEQ ID NO: 91386 - DNA, 391 bp, Homo Sapiens
  misc_feature (19)..(19): n is a, c, g, or t
  misc_feature (32)..(32): n is a, c, g, or t
ggagacactctaacgccantaaattgggctantaacccgatcccattctttacccaggtatctgcagatttatggctaaaagaccaggaccccctggaagccgagaaatggagtccccggcgtgcagtggagcctcgctgggggaaatgacagcttggaccatgggcgcccgcggtctggacaagcgaggaagtttctttaagagaataacagaagagctctctgacaccacaaagactagacctgcgactagctttgaagaaactacattgctgaaatctggctataccgaatagatgaaccagtgggtgatgattcacttgacctcagctgagttccctcaactattggtctcttcttggcatttgaaaaagtattcaattttcaaaaa

SEQ ID NO: 91387 - DNA, 598 bp, Homo Sapiens
catgtgagaagtaattccaaacaagaaagctaccagtttctatgtgtccttctcccagaaaagaggatagttctctcgcatataatgaacgcttgcattaagaaccggagtccagtgagtgctctcagacacatcatggaattttcctcccttgcagatgctagggtaaaaacaatcaggaaacacgattccagcctgatacgcatcctggtgttctagtaacagctctctgtagttaacacgcccattgtgaagctgaagaaactccagagctctgtgtcctatttctacgtgtgttgaaaggccacacggtgaacctctatggcagacagaacccaacatgatcagcaggccaggccacaacctgtttcctgtcgccgtcgttgcccgggccatggcgacctgcatttggctgcggagctgtggggcccggcgcctcgggtcgacgtttccaggctgccgcctccgcccccgcgccggcggcctggtccctgcctccgggcctgcgcccggcccggcccagctccgctgctacgctgggcgcctggcgggcctctctgcggcgctgctgcgcaccgacagcttcgtgggcggccgc

SEQ ID NO: 91388 - DNA, 466 bp, Homo Sapiens
  misc_feature (202)..(249): n is a, c, g, or t
ctgcccactcccctgacccatttctccctcctcttcagtctgaagaaagaagcttatgaagtggaagttcacaggctgctcaggtatggcctaggacaattggggtgtagcagggagcaaagagtcaaatactggggatcttggccccataatttacagggtcctgtgcaaaatgaaaatcagggccctcatctcaaacatnnnnnnnnnnnnnnnnnnnnnnnnnnnnnnnnnnnnnnnnnnnnnnnnaatgtatctcaacaataaaaccaagaagaaacaaagccttttgacttgttagaatgtattaagtagtattttaaagaaactttatagttgtgacattgaaagactgttggggtggggggaggaaaatttttactttccatcttaatgtaaccttatgctattctgtatttttactgtatattgcttttacaataaatataaaatgaaatgttaaaaa

SEQ ID NO: 91389 - DNA, 240 bp, Homo Sapiens
actgctaggctgggctaccgcaatgaccaagaagtacagggcccctgccctcaggccttgtgtcttgtcccccacccaccccaaccaggagcagttagcccccagaacttgaggcaggagactctgtctctcctcagtgtctggcccatagttggtgctcaacaatgaatggatggcatgtgctctattggttgaatgaatgagtcagtggccaaataaatagaatgaaatgtgaaaaaa

SEQ ID NO: 91390 - DNA, 620 bp, Homo Sapiens
tttaggtaagttagagccaattgatttaatgtaatatgacacagtcattgaaatgctaataaaaacaatagcaacacagaaaccacttgtgatgtaacattaagtggagcagctggctaggccttcttggataatatcccgccctgaattctttaacactactgttaatttaggttcagactgtgttctgttctgaccataaagttttctacattgtatgtaaaatgttgtctcagatccaaagtgaatttcttaatagcaaatctcatttattactaatcatttctttaatttagcatactcatttacagctcaaatttcacctaagctcctctcttaaacctccttccacaacttaattatctctaagccaaagtgtaatttcactgagctccatgggattccttgaaagagtacgtgcccatgaaaagatcatctggtgctgctcctttctgctgttttcatcctcccatcagggtactctggaagatggaatctcttctctctgctggtcctcacaccgctgctccgaaagccccggaacgcactcccgggctctcccggtgcctgacggagggtgctgtgcttctgcccaacgccggcgtcgccacgtgcgggcc

SEQ ID NO: 91391 - DNA, 738 bp, Homo Sapiens
tgcggccgccttggccgagcgccggcgttgggcagaagcacagcaccctccgtaagggcaccgggagagcccgggagtgcgttccggggctttcggagcagcggtgtgaggaccagcagagagaagagattccatcttccagaggttgccactgtctgcctccccacttgtccccatccacagtcatcttttttatatatataatgacacattagttgtctagttcttcatagttaatgtggtttaagtctgacatcttttcttttgccatgaaatttacaccttagtgttattctcactgaaaattgcctttgagtttgataaactcttatcccagtgatattgactgttttaaattaacagatttatcaccatttctgagctgtgtagggccttaattgaaaaagtatctttgattattttttcacattttggccacatgcctataataatggaatatttacagtactttttagtggagaacttttttaagtagaatttcaataattaatgtttgatggagtttggaagttaccgtattttgaagtatcgtttaacattcttctctcaatgagttttcctttaaaatttgcagtgaatttgttttcctggttatgcatgagaatttaggtcttattaattggggggaaattaatggtaaaggtaataaataagccccttgttgcagcttattgtttcttgaaatgaattaactatccaggcaaaaggttaaaaatg

SEQ ID NO: 91392 - DNA, 933 bp, Homo Sapiens
  misc_feature (77)..(111): n is a, c, g, or t
aatgattatcactataggggctagctcgccgagccgaagaccgagcgcagcgagtagtgaagcgaggaagcggccgnnnnnnnnnnnnnnnnnnnnnnnnnnnnnnnnnnncagtcgacggtaccggacatatgcccgggaattcggccattacggccggggacagactgctttgcctgttgttgctcttcggaggcggcgatccccgaaggcgagctgaaatacggctgcaggctacaatttgcagccgacgattaaggaagacgacgagccggagaggtggcccaccctcagggagcgcttgtgctcggagggcttcgcatttccccaataccacattaaaccgtatcatctgaagaggatccacagagctgtcttacatggtaatctggagaaactgaagtaccttctgctcacgtatcatgacaccaataagagagacaagaaggaaaggatgccctacatttggcctgtgccactggccaaccggaaatggtacatctcctggtgtccagaagatgtgagcttaacctctgcgaccgtgaagacaggacacctctgatcaaggctgtacaactgaggcaggaggcttgtgcaattcttctgctgcaaaatggcgccgatccaaattattaccggatgtcttttggaaggactgctctggaagtacgctgtgtataatgaagatacatccatgatagaaaacacttctttcacatggtacaacatatttgaagcaatgcagcaagtgtctccctcagaaacaacgagctggagaaggctacaagtgaccgacacaagatcttgtttcaaatatagccacagaacttaacggagggacctatatcttgggaacaaggtgtccttctccagaaaagccacccagttgagaaggctaccaacgaggactggaggaaaggatcctgtttcaaa

SEQ ID NO: 91393 - DNA, 1183 bp, Homo Sapiens
gccgcgcagcgggaagagccggccgaagcgtggcggccacagacttgtgggtaccgggtccggagggactcgcgcttttctctccgtgccatggcgccagcgaaagccacgaacgtggtgcggctgctactaggctccacagcgctgtggctttcgcagctcggctccgggacggtcgccgcgtccaagtcggtgactgcccacttggccgcgaagtggcccaagaccccactgctgctggaggcaagtgaatttatggcagaaaaaagtaatgaaaaattttggcaatttttggaaactgtgcaaaaattagcaatttataagcaaacagaatcagattattcttattacaacttaatcctaaagaaagctagacagtttctaaacaatttacacatcaaccttttaaagtttgctttctctataaaggcatactccccagctattcagatatttcagcagattacagctaataagccaccaccaaataattataatacatttataattattcataagaaacacacctataaaattaataagattaaaaagcaactgaagaaagctacttcaaagactagaccttatctatttaaaggagatcacaaatttcctacaaacaaagagaactcaccagtggtgattctctatgccgaaatgggtactagaacatttagtgcatttcacaaagtattgtctgaaaaagctcaaaatgaggaaattctgtatgttcttcgccattatattcagaaaccaagctcacggaaaatgtacttatctgggtatggtgtggagctagcaattaagagtacagaatacaaagcactggatgatacccaagttaaaactgtgactaatactactgtagaggatgagactgaaacaaatgaagttcaaggatttctctttgggaaactaaaagaaatatattcagatcttagagataatctgacagcattccaaaaatacctgattgagagtaacaaacaaatgatgcctttgaaagtctgggaactacaagatcttagttttcaagcagcttctcaaataatgtccgctccagtttatgatgccattaaattaatgaaagacatttcacagaacttccccataaaagccagatctctaaccagaattgctgtaaatcaacatatgagagaagaaataaaggaaaatcaaaagg

SEQ ID NO: 91394 - DNA, 791 bp, Homo Sapiens
  misc_feature (617)..(633): n is a, c, g, or t
  misc_feature (635)..(642): n is a, c, g, or t
ggtagagataatctgacagcattccaaaaatacctgattgagagtaacaaacaaatgatgcctttgaaagtctgggaactacaagatcttagttttcaagcagcttctcaaataatgtccgctccagtttatgatgccattaaattaatgaaagacatttcacagaacttccccataaaagccagattaagaatgaatatattgatatgcctctttcagtcaactttaaatgtcaagaatttgagaagtcgtcatttatataataaaacatgaaatatatatgggtgtgtataaatgtcatatctgtttagccataatattttaattaatggccgttataaaaattattagatcaaatacaaataaagtaaaataactttagtcttgatcagacagttgattagctctattgatgctaagtcagtataactgttcagaggttctgatgcaaaactctgctgttaatctgtaattaagaaaaaattataaaatatgctaacattgcttaatggctaaattgtaggcttgagcatatctctaaaaccacttggtagacaatctgtaaatgtttgttgaaatgaaatatttgctaaataaatgaaaaatttgccaaaaannnnnnnnnnnnnnnnnannnnnnnncttgtcgggcccgcctcggcccctcgaggaagcttttctaaaacccattcggtttgggccgcgcgggggccccaggtagggtaaagtggaaccatgggtccataaagctggtttttccctagggaagaatccctgggggcccattggac

SEQ ID NO: 91395 - DNA, 1259 bp, Homo Sapiens
aaaagaaagtgcttccacggaggggggcggggtgtttttgccccggaggttagcccgggtgggccccgcggggagaaaaaagggggcccgggaccccgcccccggcgggcgccggggaacccacccggccaaaactattttggaccggggggttgcttttaggggacccggatttcaaggttccaggggccacccgggcgcccagggaaggattcccgtgtgataggttaaacccaaggggctccgggaaccaccggtgttggtcagctcaccctcaccggggggttgggcgggccggccatgctgcgttggcggcttgcgcgggtttacttgctctgctgtgcggcgtggctcgactggtcagcctgacttgcctgcctgcctggttgctcggcctgctggtttgttggctgacaaagccaggggcaaacgtcccttttttccccctgggactgccaaggctggcaagcgttttcgggggagggggcttggcctcggggccctgccattttattaaggcttaaaattttgagctcggaaaggtgatgccaggctggaccaggactgaaaaggtgaagggaacctctgttggggctggctccatggccctgcggatcaccctgggatgagggcccccggctggcttggtggcatatgaggtggagttgggcctcctccagacatagggctggagacgtgctctggggctcctaatggagatgggtgtggtgacatataaccttggctgtgttgatccattggactctggggagggcccatgcctgggtgaggtggtcgcataccagtgcccttcatggatccacaatggatgtcttctacaatccccttgtcatgtataccatcgatgggcttatgcatttgatgcatgccttcctgtgggaagtctgtggaccccatcgtcggcataggatgggagacacttggaggtccaggacttggccccatcatgctgtggacggaacctggggatggtcctggtcctggactaggcccaagaattggcccaggggaaggcccaggccccggcgaaggccctgggtggggcatcgcaccagggtctgtgggcgtggacatctacctctcctgtctctgccagtcagtagagtaatgcttgctcgcgaggagtgtgctggctgaatctcttccctctctgagtcacccagagtacagaaaatcccgggaattccggaccggtccataagaattgatttcaacgagggatacggggtttcccggcg

SEQ ID NO: 91396 - DNA, 537 bp, Homo Sapiens
ccggaaatagatgattcactaaagtggggtgactgaacagcatttaatgaagggaatatttaccaaaaaagtaggattaaagaaagccaataggtacggtaaaccaccttgggaagctgcaacacacccaaagggttagaggaggtagtagtcaccgaacgtgacaagttgacctgtagctgaacatttttccatgtctgtataatactactataaagcatgattttaaatagataaccattatataaatacactgtaatttaaccaatctatattattggacatttagatgttttcagtttttcacaatgtacagtcgtgattttgatatggtttccatcctagttttaggatgtcttttaaaaatctgaattaaagcaaaaatactgataaaattttgttagtttaaatattactcataagtttaataaacttgtttccatagatacaacctatgttttatgtacaacatatctctaacctagtcttggaaatcctgtaatttggtggttcctagacagatttcacagaccagta

SEQ ID NO: 91397 - DNA, 768 bp, Homo Sapiens
  misc_feature (27)..(28): n is a, c, g, or t
  misc_feature (31)..(31): n is a, c, g, or t
  misc_feature (48)..(48): n is a, c, g, or t
  misc_feature (247)..(247): n is a, c, g, or t
ctgggcaaaggttgcccggagagcagnnagncgccagtcccgctggtncggctcttcctacactatggcagggtggtgcattcatcagtgccatcgcaagcgcgaaggtgaagcggacccagaccccacaaccatcttccgaggaaactcactggcgtacaagtgcatcgacgagaccatgaagctggcggggatgcattacctgcatgtcaccctgaagcccgccatcgagaagaaactctgagtntgaggtacaggggcttcggggtgcagacgtccctccagggcccatggtcagtattgcacctgtgttatgaacccccagatgctgtgcagggcaggggcgggggctgctgttttattgcggaggggagcatcctaaaaatggggtccaggcagacccctccagacctcacactgccgaggaggcctttcccaaagggcgtcctcccgggatgcagacggcaggtgtgtgggaagcgccgtttaaatacacagcacgacgtatccttgtaccgacttctcccggttcttgtttgaaaatactgtagttcaggctcttgatctagatggcagataggaactttcttgtcacaaaaatactggaggaaaatgttgtaaaaatagacttttggacacacagctgttggggctgcactgagctgcaatttttaacatggatttataacttaatgtttctgtttataaaatactaatgatttgcaatgtattttactggccaattaaaacagatgttttattctttct

SEQ ID NO: 91398 - DNA, 1440 bp, Homo Sapiens
gtcaaggattttgacggtgtgttgcctagcaagtcccgcttattttgagagtgggctttcaccaggttcaggtccaagagagggcctgtaagggaaattggaccaaacactttcctcgcggaatgaaggtggccaaaggcacggcggtgggtaaatcttatgtttgcgaaacctgcgggtttggggtgtcccggtggatatagattccacgttgaatggccctccaggaagctccccttttggggattaggttcagggagcgctcgggtttggccggcggggcggtttgtttataaggggggagatcccaaaccgcttaattccatgggccaggatttttctttagggaacacagcttatgggccaatgtgccgttggcctaatggggacgcgggcgccaaaaggaattgttttagaaaagcgttttggagggccgagggcgacgcgacatgtctattttttttgtccactgtaccatctcggaataaaacatctggtttaattggccagtaaaagtacattgcaaatcattagtattttataaacagaaacattaagttataaatccatgttaaaaattgcagctcagtgcagccccaacagctgtgtgtccaaaagtctatttttacaacattttcctccagtatttttgtgacaagaaagttcctatctgccatctagatcaagagcctgaactacagtattttcaaacaagaaccgggagaagtcggtacaaggatacgtcgtgctgtgtatttaaacggcgcttcccacacacctgccgtctgcatcccgggaggacgccctttgggaaaggcctcctcggcagtgtgaggtctggaggggtctgcctggaccccatttttaggatgctcccctccccaataaaacagcagcccccgcccctgccctgcacagcatctgggggttcataacacaggtgcaatactgaccatgggccctggagggacgtctgcaccccgaagcccctgtacctcaaactcagagtttcttcccttctttgattttctggaggacctgcagctggccttcctgagacaggctccattcctgttccatttgccttcccggcagccttccctttagtgggtataggttttgacgttctgagttactttgtatcaaagagctaattaaaaatggtccttcaaaaacataaagaaaaacagcttgaaaaatgtacatttctatttttaaaatcttcaaacttccacggggggtggcaaatgttaattctgattttaaaccccattcaacagcaaaaacgatgtgggcttcaactgtgggctccgcagacgcatggagaagctggagcccacacctttccctccaagggactctgtggacagaacccgtatcccccaagcaccaaggacatcctcagactgggacttctgtgtaattctgcacctcccagcc

SEQ ID NO: 91399 - DNA, 1211 bp, Homo Sapiens
  misc_feature (991)..(1001): n is a, c, g, or t
  misc_feature (1057)..(1057): n is a, c, g, or t
ttaaaagttctaagtagcgaggcctgggtggcgaattcggcacgaggcctgggctccctgcggctgaacgtggtatacacggaagaccacgtgttttcttctgactattacagccctctgcgggacctgctgttgaagtctgcggatgtggagcccgtgtcagcgtctgcggcccacatcctgggcgaggtttgccgggagaagcaggaggcggccgtcccgctggtgcggctcttcctacactatggcagggtggtgccattcatcagtgccatcgccagcgcggaggtgaagcggacccaggaccccaacaccatcttccgaggaaactcactggcgtccaagtgcatcgacgagaccatgaagctggcggggatgcattacctgcatgtcaccctgaagcccgccatcgaggagatatgccagagccacaaaccctgtgaaatcgaccctgtgaagttgaaagacggagaaaaccttgaaaacaacatggagaacctacggcagtatgtggaccgcgtcttccacgccatcaccgagtctggggtgagctgcccgaccgtcatgtgtgacatcttcctctccctccgggagggcggcggccaagcgctttccaggatgaccccggaccgtcagggacacttgcaggtggagccagccttcaatcttaactgaggggtccttttggcgccccgcaacatttcttctcccccccaaaccctcttttccccggcgtccacagcacgccagcgcaccatcgaggaaccccacccaaggaaccgttccgccactgggaacccgcgctgggaagcaatctgtagatctcaccccccgcgtgatggcctgggtgtttcagataaaccctctccttccgcgggcgcgggagaacctggggtgagcaccagatagggaagacccactagaacattctctttcggaccccgggaaaatacaaatttttactcaaaaacaaagggggggcaatacattnnnnnnnnnnntcaaatcaactctcttggggtgggggggaacttattacgaagagaaagtggtactngaagtgaaaatggggagaacaccaatttttagcgctcggtcctccgcaaaacaccatggcaaaattctctctcctcccgaccaaaatactacttggcgttggcccgccaatgttaaaaattggacccgccagagccagatctgtctaaaagggt

SEQ ID NO: 91400 - DNA, 385 bp, Homo Sapiens
tgctgtccttccggccagtgctctgcgcgaaccacaatgacacccgtgtgacactgtttgagggggacaacttccaaggctgcaagtttgacctagttaatgactacccatccctgccctccatgggctgggccagcaaggatgtgggttccctcaaagtcagctccggagcgtgggtggcctaccagtacccaggctaccgaggctaccagtatgtgttggagcgggaccggcacagcggagagttctgtacttacggtgagctcggcacacaggcccacactgggcagctgcagtccatccggagagtccagcactaggctccacggccccagacaccttccctgaggacactcaataaaggttcctgaatcttcctgccaaa

SEQ ID NO: 91401 - DNA, 519 bp, Homo Sapiens
cccgcctaccgtttccccgcagccgccggcgcttctggcgcttgtgacccgagcaggaagcccagagagaaaccagaaagacaggaaggggattcctggacttcctttccacatccggcaggaacgcgaccctcctccagctaggagcgcttgtccgggcgcaccaagatgcctgcagcttcaagaagatgtatgggaacagacacagaaactttccctaccagataagcaggacaaagaaacacagactaagagttggcctgtgtggtcacggagtgggttaagagatgataaaaaaatctgctctgtacagatggcacacctggtcccaactaaaccctggggccctagaaagataagacatcccctcctcacaagcccctcctcaagagccccctcctcaagagcccatttataaaaactctgacattcttaactacaacttggcaatcttctcaggatccctctctaacagagacctgttctttccttttgcctattaaactcctgctccaaaaa

SEQ ID NO: 91402 - DNA, 448 bp, Homo Sapiens
gaagaagaaatgagagacaagttttgggttaaaaactgctgaaatctccttaggggtaataaaaaatgatggtctcgggggtaggcaccttagaccaggaaaattgacatctacgagtcattggagattttgctgtaaaggtttgaaaattaaggactccattgaattaaatcacacatcttttttaaagagctaccctttaggagtgcttgccttatgatttttacatagtcatctttctttaaccatgctactgtcaactagcatgaccagctctcattgctatgtgtcatgtctgaattctagccattaaagaatgcctgcatttgtctggaggcacaaaactgtccttaaaacaagtatctcctctatgaaagaagtccgtgggtagataggaatgcttttcaatctatgatgcatctctttcttgtagtaagaatgtaaaaaa

SEQ ID NO: 91403 - DNA, 695 bp, Homo Sapiens
tgagctgagtgaggagtgcccaggagagatggtgaaaatgacaaagtccaaaactttccaagcgtatctgccgaactgtcaccgaacgtacagctgtatccactgcagagcacacctggccaatcatgacgagctcatctccaagtcctttcaggggagccagggacgcgcctacctcttcaattccgtggtgaacgtgggctgcggccctgcagaggagagggtccttctcaccgggctgcatgcggttgccgacatctactgcgagaactgcaagaccacgctcgggtggaaatacgagcatgcctttgagagcagtcagaaatataaggaaggaaaattcatcattgagcttgctcatatgatcaaagacaatggctgggagtaatgtgcgaactttcccttctcctttgaatgctgttttgtgaaagaaactgtgaatgtaatggaaacgtaggagcatctggtgacagcctttcttgccctctgacctcaaaggctacgtgcgcatagctcttgacactcccggccatctctgtgggtaaggtgtccctcggatctgtcctcttcgtgtacacagttgtttctgaaaattttcaatgagctttttctaacttctcaagttctagagaaagaattaaccaactgatgacttacctgcctagttaatatcttcctttcacctttgtcttaaa

SEQ ID NO: 91404 - DNA, 514 bp, Homo Sapiens
tttaatgtagattctttattgattccaccaatgtattagtagatatgataataataaatggtatttttacattctcttaaccaaaaatataacaaatatttacactcagtaaacaatacgaaaaagcatacagaggcacagtctttctaaaagacataagttcaatgaggtatcaaaaaataggagacaaacattgctgtgttacagggataccttacaatcaatgaattgtgcagtagaattgctatctgattattacagatgtgcagttttgtttctgtcttttgctgattagcttacatgtctcaattttaaaagatcaagttcaactgcattctgtgtatcaaaaataaagaagcattaaaaatgcacaacaaaagtcaaagatgaaccaggattcaagtttaaatttgaacatgtactgtgacacttttgacacttttctgaagatttatcccgtttttctagcctttaaggtaatgctgaaggaatacatatactttaatatcacctt

SEQ ID NO: 91405 - DNA, 510 bp, Homo Sapiens
ttctgtccctcacagcactagtatttcatgttgcacacccactcagctccgtgaacttgtgagaacacagccgattcacctgagcaggacctctgaaaccctggaccagtggtctcacatggtgctacgcctgcatgtaaacacgcctgcaaacgctgcctgccggtaaacacgcctgcaaacgctgcctgcccgtaaacacgcctgcaaacgctgcctgcccacacaggttcacgtgcagctcaaggaaaggcctgaaaggagcccttatctgtgctcaggactcagaagcctctgggtcagtggtccacatcccgggacgcagcaggaggccaggccggcgagccctgtggatgagccctcagaacccttggcttgcccacgtggaaaagggatagaggttgggtttccccccttttatagatggtcacgcacctgggtgttacaaagttgtatgtggcatgaatactttttgtaatgattgattaaatgcaagatagtttatctaaa

SEQ ID NO: 91406 - DNA, 588 bp, Homo Sapiens
tacctattattggaacatttattaatatttgtaaggtgcagactatgatacacaaaaagacagtgatgtgaaataacaggcatcttcatcagaggtctgctttgcagcctgtgagtttagttgtcagcagtacactcaaggctgaggacttggcgccttgggttcctttgcctctgacacaaagcaaggaccttcagtactagctgatgctccaatcagttttttgttcatacacactgttggccattgtgaatctttcttatcatgccttccaaggaaaccaatacctacctccaccaccatcacattgcaaacgaccaaaagcacatatgttcatgatgctttgttcagagctggcccgaaaatgaatccatatgagagtcacgtgacaggagctggctatgagacttacttaagacagcaatgggaatgtccccaggttaataaactagagcatgttcaaaacagagcagggaactaccaacctcttccttctaagaagatctgacaggctctttggctgatttgaaagcagtccccctgaagctgacccggttctaaagttgaaaatgctaagtttaccttgcc

SEQ ID NO: 91407 - DNA, 290 bp, Homo Sapiens
atctctcatcacagctttaatgatctgaatgggatacttacttttcttccgcgcctggctgtaagttcatgggggccggggttgcatctgtcttgttaaccaccctcctccagtgccttgtgggtgcctaattcatagttgtcgagggcacatgtggaaaggaagtaaatgcacgtggtgattggtgctccaaagccttccctgctccctggctggttgtttggcctgcagacaacaagcgggatccctgggggcacctgtccatggccttctggacctccgatatctca

SEQ ID NO: 91408 - DNA, 521 bp, Homo Sapiens
tgcacttaattgggtaaacagtttatttcttatcttcttttaagctttctgaacgaacagaatttggctagctggttttctacccttgaaagcataaagaagcttggactgtctgaaaatactcttttctgggagtatgttcgtagacaactgaaataaactgcaactcactggtgccaaatatatcacacatcagcccacctcctgccacggtgagcttgtagcagagaaaagaatgttctcaggttcagaaaggggcttccctgctgaggagccatgctctttccacgatgaagaactagagaccgtcttgtgcagtgggctggcagagaggagccacacagtgaagtgtaaattgctcaggatcacaattcagaggacatgggttctcaccttggctctatgactcattttgtgcctttcacccctacaatctctccgaacctcagtctctgaatgaatgaaatgagactgaccaaaccaatctggctaaatataaaggtataacatcctgatcaaaa

SEQ ID NO: 91409 - DNA, 637 bp, Homo Sapiens
gtctcttctgggattgtcacacctgctaccctagcatacttcatctcttatcacattcatagcctctgtttagcaaggattcagaaccggagatggcagcgattaacaacagatcttcagaacacatttggacaactccaacttcgagtagtaaaagagggggatgaagaaataaatccaaatggggatagctgcgtaatttgctttgaacgctataagcctaatgacatagttcgtattctgacttgtaaacattttttccacaagaattgcattgacccctggattttaccccatgggacatgccccatttgcaaatgtgatattcttaaagttttggggattcaagtggttgttgaaaatggaacagaacctttgcaagttctaatgtcaaatgaactgcctgaaaccttatcacctagtgaagaggagacaaataatgaagtttctcctgcaggaacctcagataaagtaatccatgtggaggagaaccctacttctcagaataatgacatccagcctcattcagtagtggaagatgttcatccttcaccttgatggcatgacttttgaggaagtgtattaaacctgtatgtgaaatcaggtcctaatactgacaagcagtttgtctgttaaa

SEQ ID NO: 91410 - DNA, 1048 bp, Homo Sapiens
tatgacttggagttgtatccccttgtaacaattaagatggaggtttattatgttcttcgccattcagttaattgtcttccaaatgtggaactttttcaggttaggacacaaaagttagtttcctgaaaagttcaattcatattcgacccagtagtatttacttgtaaatggtctttcactatgggacagaggtcaaaattgaagtgaatggccacggaccttctgctgaaatatataagtaaaaataagcaggaacagaggagatgaacatacattaatttctgacaacatgttggcacaaaaaatgctttacctatagggtgaaaaagcacttaatgagaggataaatatttgccatgagagtatttcaagtgaatggagactagtgtttcctttcttcatatctaagtgaaatattcttgtgttgcctaagtaaacttgactttaatcctggatagaacactttacttcatatgttaaaactgatgcatgacattaactgaagttttccatgagacatttaatcatccccattgagaaatcttataatcctaccttttcttccttaatttgcttatagaaaggctttccttgactccgaaaggaggaaaaaaggctttaaaaaaacattttacaccagggagactggcaaatttcaataattcacaatcctcatatttctcatttatatttgctttatcaaatttcattccttgctatataattaattttctcagacacagaagggccaaattctcttatttatatatttaaggtaattttttctattttctttaatatattctagcttatttttgaaagtaaatgagtacatgaaagaaacaggaacattgttgatgcaattcagttaagaaataaagtgcatatagctttcaatataaatagtttggtaccttacagctaagtaaaaagctaacaaaatcaaaatgaaaactcagctcaatatctagaatctgaaaaatataagacatgaatacaaattctatataagtagtaacaaaattaggggtagggagtatttccctcc

SEQ ID NO: 91411 - DNA, 527 bp, Homo Sapiens
  misc_feature (54)..(54): n is a, c, g, or t
taccagtgccctcacccacacccccacttccggcctctgttccttcctcacctntggggaaggctgcagggctccctagggaatgtcccctggttcctccactggctctctgcccagtgcttaacccttcttcccacacctacccattcagccagggcagtctcccacaaaactttctctccctggaccatggggcagtgcaaggaggacaggaagctgggtggaaggactgcaaaggagactgcttttcctgctaccctcaggtactgaagcccaagtaagagttttcagtagagagggagtagactgagtgttgggccctaggactgggcttccctgggtactatcccaacccctgagcctcgggagaggtggaaatgaccttcctctgcaccggcatgcccagagaagagagcctggagctgagacttgcaacttctagaaaacaaacacaaaactgaggccaagagagtgctgactactattaccaacaaaattcattaaacacaattttaaaaaatcaaaaa

SEQ ID NO: 91412 - DNA, 416 bp, Homo Sapiens
cgcagtacataaatgatgctgaagtgcgatcactttttttcaggttcctgtatcttcatgtcgagttgctcattgcccaacgtagaggactaggaatcaggattcggtggctatatgctggaggctggagccgcgggagcgcggctcgcctcattgcagttgttggcagtgatggagagatagcatcgcggctggagagtctttccatcgtgttccactgtcgcagctacacaccagatatgaagactacaagcaacctcaaaaggtcttttcatttgttcagcatttgaaacttcttcctgacaccagaggggctcttcttagctgtctttttcctgggttattcctggtaaactagctgatatttgtttcaaagcatatgtctctaataaagtgccagtctctcttaaaaaaaa

SEQ ID NO: 91413 - DNA, 659 bp, Homo Sapiens
agacagaaaatgcacaagatacaccgccctttttgtttgtttgtgattcagggctcaggattgactgggtcctcgggaggggactcgagggcagaaggatctattaatcttacaactatgtgtttcattttccaagtggtcagttttttaggttactttatgaaaaactgaaatggaacacagaatatgaacaatttctcagggtaagagcagctagatgtaaaaataacataatgcaattaaagaagaaatcttccagcaaatagaaccccatttcggggattttcaccgtgggcgtgagggtcacacaagactgaagcccgcccaggagcaggcgaggtcactgcaggtggtcagttacagagctctgcgtcatagccctctggccccagacaaaattcactcatctatacatttgcttgaaaatgcattatttgatattcattttgtatacttaaatacaaaatgaaatgtaacctgatattgaaaataaaaactccaggcaacgtctacatttctatgtatttagtcttttcaaggtctacattttaaaagcaagaaatgaacaaagataggaatacattattactctggcaggaaaattagacggattgatgaagtgggttcagtctattatttatcctactagaaattaaact

SEQ ID NO: 91414 - DNA, 794 bp, Homo Sapiens
  misc_feature (123)..(133): n is a, c, g, or t
aaagaaaatttatttttattaaagtggagatggtggtacaactgaagaggactgctaagattgttaacgcacagtccccctcaatttgtccagaggataacatatcccttcagatacaaagannnnnnnnnnngcttggccaactttagtcaggtttctgaatcttctgctaggctcttctgtacactttctttgtaaaatccagtttaagcaaagaactttgctaagtcagattagcaataaacccccatccttgatagctgatcatcctcaatatctgatcaggttcttcagtctccaccatcccccaggtgatgcctcattatcttggcctgtcaccgctccttggctataaatctccacttgcccatgctgtatgaggagttgagcccaatatctctttccctactgcaagtctccattgcagtcagtggtccctatacctgttgcgatggtcctgaataaagccctctttttgtgctttaacaagtgtcactaaatacttttttctttaacaatagcccgttctccaaacccctaactccagaactgtttagttttcaggaaacctgagtgggcccagggtctataccatcgtgagatttgtgggtttaaggctgaatttctgcccgtttttaggtaaatgttttagtgtgaaagcttgaacaattgtagggaaaaccttagatttgcccccaaaaatgacattttgccgtttttggtggggaggggtcagggcgctgtgtttaagatcaggcgtgtgaaagcccctaaacgccctcctttcctttggg

SEQ ID NO: 91415 - DNA, 443 bp, Homo Sapiens
tgtgtgcctactaagtctctctctcctgctcctttatatgaagatgtgcctgcgtccccattcgccttctgctctgccatgattgtaagtttcctgaggcctccccagccatgcttcctaaacagcctgcagaacttgttgctttccagtccacacttcaaacccgagagtatttacaagcatggggaatagagacctaaaatgaagattctgcactcgtgcaaatctattctcaaaaagagcacgtgtctttgagcctgtctgtgttgccggttgactgtgacagttccctgaatcttcctgtggaacgcaaggctcatcgaaagacaacaaatatcttgatgctctcatatacaatattattattaaaacgcaaaagcagctgtatcattttgcaataatatcagcttcgtactttgtaaataaagttgtgaagaaagaaa

SEQ ID NO: 91416 - DNA, 264 bp, Homo Sapiens
tttaataaatataagcttaatggcagtgaatgtattaatgtcagcgaagacaagtctatgaagttaaacaggcacagagaggctaagagtcttgccaaaggccacagaggaaggaagagactaaatctggaacataagcatatctccacaatagggttaagagaaccagtgtcttctgaaaaacacatgaaatcatcgtaaccctgctaagtctgtgctttgcaaaaattaaaactaaaactaattttcaaacacaacaaaaaa

SEQ ID NO: 91417 - DNA, 406 bp, Homo Sapiens
gggaggagttgccaaaagaaatacctaagcaggaccacattcacagagtgaccgccttggtgaatgggaacatagaacagatgggaaatggattccaggatcttcaagatgacagcagtgaggagcaaagtgacattgttcaagaagaagacaggccagtctgaagaagaggatggtccatggttgtcttgctctgaaagcttggagagctacattgaagacgagctcttcattcagctttgactccacctgcacccctggcgggggcttgcactaacaatgtttgggtctcagcaaaaaacaaaaccaagcacacacatctttccttccatgtattgaaaaacattggttggatgttgctctaagttttcccaatgatgtttaaaagctttgagaaggaaagctg

SEQ ID NO: 91418 - DNA, 234 bp, Homo Sapiens
atttgaggaagaaagaccagtgtgactgaagtgtgttgtgcacagaagagcaagaaagcctcagtccttccagaaactcctgttatttattgtgttttcatacttgagtcttaagagattccattctgacatctgctggctattgtgtatactgcagttccaaattccactacacaagaacaacctttaataacgtattttttgaaatttgtcataataaatttgagataaaac

SEQ ID NO: 91419 - DNA, 471 bp, Homo Sapiens
tcagtcatgctgccttctgctgctccctcccagcaggattcaccctctcattcccgggctcctgggccctgttcttaggatcagtggcagggagaaacgggtatctcttttctctcttctaattttcagtataaccaaaaattatcccagcatgagcacgggcacgtgcccttcaccccattccacccttgttccagcaagactgggatgggtacaactgaactggggtcttcctttactacccccttctacactcagctcccagacacagggtaggaggggggactgctggctactgcagagacccttggctatttgagtaacctaggattagtgagaaggggcagaaggagatacaactcaactgcaagtggaggtttctttctacaagagttttctgcccaaggccacagccatcccactctctgcttccttgagattcaaaccaaaggctgtttttctatgtttaaa

SEQ ID NO: 91420 - DNA, 662 bp, Homo Sapiens
  misc_feature (77)..(134): n is a, c, g, or t
gcggccgccatgtgatctctgcatatgtcatctcctgtctgccttccaccgtgagcagcctgaagccctcactggannnnnnnnnnnnnnnnnnnnnnnnnnnnnnnnnnnnnnnnnnnnnnnnnnnnnnnnnngaacattctaagacactgggattacatgagtgttagcactctatgacttaatgagaagtaggttttttggagaaaaatgtactttcagtatgtatattatatatttcatggttatttttaaaactcgtgagcaatgctggatacacactaccaactattacttccctgactgagccaatttttctgtaaatgcatcacaaatgtgaaagataaggtaggcctgaattctggggaatgacaatggtgaaggaaaggcgagacaggtgcaaaagacactgcagaactcaggctcaaaatctcatccttaactccttccctcatcccaccatgttgaatcagatgtcaatagcaattttatatggcattttttaagcttgcaaaaagttataaacagaaaatgttcattttatcactccatcacagacgaaaaacatgaaattaagctaggaaacatgttcaggtgattagagtagatagaacatagactaaaaaccagtgaacttttaaaaataatcccatgatgtggac

SEQ ID NO: 91421 - DNA, 436 bp, Homo Sapiens
tttaacagagacttgacatttattgtgcaattttatccccaacagaacacgtggcattctagaggtatatgaggtaataaaatcaacactccaattagaacacctgaaataattggctctagtaacaaatgtctcttataattaaaaatattgaatgtttaaaaaacttttataacattttaagtttctaaaagaaatgagcctaacacttaaaaaacaacttactcttctatataaattgttcacaaaaaaatcttgctattctatattacactatgcatttgtagctttattaacatatccctagtgggtattaactctacacagtacaatcaaatagaaattattcatagagaatcaacaagactccaacaataaaaatatcaggatcaatggatttgtcacagtttctccacaagtattcatcatagaaaat

SEQ ID NO: 91422 - DNA, 436 bp, Homo Sapiens
tcagtattaattagtattactgctttatgcgttgtgttttgaagggaaggggcagggaacagccatcagtgatctggggccatttctacaagttaagctggggtaggcgtcctcccttcactctcacgttcccagcagtgatcccaggccgggcccaaggctggcgtgggggtggagctcggctcctgctcctctcaccctgcaggaagacaacagcagggaaggccgccagctgccccctagtggccaagggcagacgcgcactgaatcgctttcacctcatcctgaaatccctgcgccggcccccacctttccactcggcctctttgcaggtccgtgggtcccagaggttctggctggcaaggcaccaactacaagggtttcctgatggctaatggcatttcggaaagcaccaagctgactgcaatataaagtt

SEQ ID NO: 91423 - DNA, 580 bp, Homo Sapiens
  misc_feature (25)..(25): n is a, c, g, or t
cccccatgtaaagtgaggacggggntgttttccacttcccccaaaccttgcttctgctgccatgatgagtctaccaagactcaaagaccgtgagcgcacaccacccacacctaacagcatgcacacacctgcatgcagagcaggaaacgagagatagaggatgggcagctggggggctgtcctgagcccctgcacccacccctgcacaggcagtctttgctcagtggatcacacacatggaaggtgatgggggcatgggtggagggtccctaattctcttcgctgtgatgcatgagctccctcgctgtatgatttaggcttctatgtccaacagagtggactcttccctctcgctcccctctgccggtcccccatgccaccacccaccccaaacttccaggttccatccaccaccttgccaatggtgtagctgtcctctcagaactcctgtgtgtggaaggcacccgccctttccttgccttctttactcggcgtgctccttttctctttgggtttcttgtttaccaaagaagagtttacagacaataaaatggaaaggtcctgctgtggaaacttaaaa

SEQ ID NO: 91424 - DNA, 638 bp, Homo Sapiens
  misc_feature (42)..(51): n is a, c, g, or t
ttacatgaaaaatagagcctaagggcctgtattttaatgagnnnnnnnnnntttccaacatagttcgggtagctttgaatggtctagtcaaaaaatacttttggtatataaaaagcctgtacgtacaattcacacctcagtgaagcgccctccttgccttgaggctgggcctgggacaaaggtggcctcacagccagcccaggcagggagatcggcagagaggggtggcccctgaccccagctcctctgccccagctgctgctccttggtggcggcccctcctgacaccaggcgtctgccatccttcaggcaccaaacagccccgtctacctggccctggtctgccctcacaccagtccacccccagccccaaccccaaccaccctccgctgccacggcctccagcacctgactccattcagggaactgaatttgagcttgcaggggtgagaaccacactgagcagcatgacaggctgtgagatcggaggagaagagtatatgctgaggctctcccagttgtcacttggtcttaggggtcctggtgcccgtggcgcggcagtccagccacagtgctgggcctgcacaatcagcctttaggtgaaatggaacaggaagcggaacccccaaggcggccgc

SEQ ID NO: 91425 - DNA, 554 bp, Homo Sapiens
  misc_feature (236)..(236): n is a, c, g, or t
agaaattttctccccatttcaatgactgtaactgagccaaggagtgtgtcatcatctcaacggtgatgggaatgtcctggaggagtttctttgtttcaagtggttttattatctgaagagaaataaagcaagtctctggctgctgctgtctatcaaaaatgtcaggatacgttcctgagaggagtgaaacagctgattttaactttcagcgtctccccaggagaacccccaccccncgcagtactgctgaggcgtgatggttatcaggacaaggccaagaggtaactggtaactgccatttaaggatagtgccattgacaaagggtaggtgcgtgcatgtgtcactatatataaaaaacaggtaggtagatgaccgatcaaagaagcccgagcaagccttaaagaacagactcccaggctatctttacctcttgaatgattttctgctgccaccagctgagggaatataagcaatatgttttctaaagaccattattcacttctagcgtgtcctgatcagaacaaaaacctatacaatccgttgtgagaagtgt

SEQ ID NO: 91426 - DNA, 1134 bp, Homo Sapiens
  misc_feature (528)..(528): n is a, c, g, or t
tttttttcttgagaatgtgataaattattttattaagaaaattatcagctttcttctttaaagtccttcctcttttacctaatgtttataaagactgatattgattttaaaagtcacttgcccctgaatctaagaaagtggtatttatatctgtcatttcttttttgtctgagtagaagtgactggacaaccccaaaaagcatcttttgtcaaaaggaacccgtggtggctacctcctctaaaagctgctctgccctctgggaagtttttggtactttagtactcctgagggtagaaaccactgctgttcaagagttccaaaaccagattgaatcaacttaagaataagtaccaaggttcaagatgagaagcggtggaaaaggagccaaacattcctggaaaaacatctaaatagctcccatcctcggtctcagcctgctatcttactgctcactgctgcccgagatgctgaagaagcacttaggtgtctgagtgaacaaattgctgatgcctattcttcttttcgtnagtgtccgtgccatccggattgatgggacagataaagctactcaagacagtgatactgtcaaactagaggtagaccaagaactgagcaatggatttaagaatggccagaatgcagctgtggtacaccgctttgagtcatttcccgcaggctctactttgatcttctacaaatattgtgaccatgaaaacgcagccttcaaagatgtagccttagtcctgactgtcttattggaggaagagacacttggaacaagtctaggcctaaaggaagttgaagaaaaagtaagagattttcttaaagtcaagttcaccaattctaacacacccaactcctacaatcatatggacccagacaaactgaatggcctctggagccgtatttctcacttagttctgcctgtgcaacctgaaaatgccctgaaaaggggcatctgcttataagaagtgagagagaagaaaaatcatgtcccaagttctgagaattgttcacactttctaaccagagacagaattcagagctctttttgaaagaactagtttctttttaaagaagttaagtgcttacataaacatggaacatataaatcattcattcaacctaaaaaa

SEQ ID NO: 91427 - DNA, 468 bp, Homo Sapiens
gcccacatgacctatttctattgtaactgccactggaacttttgaccagggtaaatcttgtgccttcttccagtgcctcctgctcccctcatcagtccccatctgtcctctaaccatgctgacttctgtccaaactgcttctggactggccctggcatagacctgcattagagatgcaaggcagcaaggtgtttatttatttagttagttaggaaaacagaacaaattctgggatgtaatgagaaatgacatacacataagaggcttatgaccaaaatacgttaatactcattgcaaaagaagttctactttttagctttacatttgaaggctttaaaaatatgtctgagagtgctatagagagttatactttcttcctccccatgtgacctaaacctccaattcagctgcttaaatagctgacaccgacgctaaaatggaaagctcatattacagagtcgaaataaa

SEQ ID NO: 91428 - DNA, 501 bp, Homo Sapiens
agtcgcctggctggccttgacctccactcgaggcgccaggaaagacccttcccggaatcccgagagaccaagacctgggtaatcctggaggtctaaacccgtgaggaagcccaagaaatggagttaaagacccttttcgcacaaccgattgttgtctgtgtgaccttctgcggcccttgccctctctgaaccctctaaaatgggcatgaggatgtctcaccttcctctgggtgttatgcattttgaagcgtgggcactatgggagagcctgacgctctgtgttccccagcgccctccactcccaccccttcactgttttcttcgacattatctccctagagaacacagcaagcaggagcgggatccttcgactcggctgactctcaactccttccaaacgtgaggctgacggggagaactcctgctctgcccagtttccattcccgcctccagaataacgagccgaaaacatgtgtactgtaaataaagcctgtctaaata

SEQ ID NO: 91429 - DNA, 355 bp, Homo Sapiens
cattgctggtgtgattaaagtatggatcttgtggtgggaagattattcccattgaccatggattattcccatgggtcccatgtaaacaagtccaagggaggcaagaaggtcaaagtcagtagaagatggaacgatgaaagcagagcttgaagtgatgcattttgaagacagacgaaggggccaggagctaagaaatgcaggcagcctctaggagctagtaaagacaaggaaatgcatttttccctggagctgtgagaaggaacccagctctgccaacaccttgattttaaccctgtaagtcctattttggacttctgacttccagaaatgtaagagaataaattggtgctatctt

SEQ ID NO: 91430 - DNA, 670 bp, Homo Sapiens
tttttttggaagggagaggaacttttattctgtttacagaaagatttgctttttaaaaacaaacagtgattttttctcccccaccccttatcctcaccccaatagttctattctgaaaaggggggaaacatagttagatcagggaattcttcattgttgtagctgttgctctgatctcccagcatggacagcatctcctggaagacctcaggctggccaggttgctgtgctggcggttgttgaacatgttgctcactagaacttgaacgatgatgaggctgctggccctgccactgtggccagacacccacaccctctgctgtccgtgtctggaattgtcctgcagtctgtccagtctcaggagcaaagttagatccacgattggtgagactagggtaggcagcagcaccaggcgatgcagttggggcaccacggagggacatggagctgaaggaggatggagtctgaaagctgcccacaccaaactgggaagtacgagtcttaacagtagcctgggtagccacctgctgggcataaatacctgagccggtattacgggtccaaattggggtggcttctagggtggggatggagtagcgggaaattcaggcctacatctgtactgcataagcagatgtgtggaaaatgtgtcaagagagggccggccact

SEQ ID NO: 91431 - DNA, 456 bp, Homo Sapiens
tttgtaattaacattaagtttaatgaagcctcattcaactcaaatacaaacctgtatgggtggaatatctggcagcgatggaaggttttctggattggtaactgaggggattagctctattgctgtaacagatgggctggtgggacctcggtttgcatttgccatagttgctgtagtagggctcgttgggttgattgtggtgttgtgtaccgatactacgggaaagggtccagcatgccctgggttagagtgttgtctttggaggtgtggctgcatcatggaatattgagggccgctgtgcctgggtatccctggtattctggcagcattctgagccagtctcatctgatgggcttgaaaagctccacagttcatgttgcctctttgcattgtttgcacactgatcaatcaaggaggctgttgttgtaacatctgaggggctgcttgtctaagatg

SEQ ID NO: 91432 - DNA, 399 bp, Homo Sapiens
gtgaccggggtcctgcccaagggtcctgcttccctaggcatcccagaagttcagcctgcatctcgaccagagcctgagagtagacacctgccggtttatctgtcccttcatgtagcaggtgacagaggtgccaggggcatggcaggggtactctgacacagcactgccccacggagcccatgtcccagggcagaagacccacgatgcacagccagccaggtggcctcatccgatcagtcaaaggcctcaatagaaccaagactgacctctgccaaagagagaattctttcagcagacggccttcggacttgagctatgacggcaactcttccccgggcccacctgacggactgggtttctcagcctccacagtcgtgtgagccaattccgtaagataaa

SEQ ID NO: 91433 - DNA, 315 bp, Homo Sapiens
tcacctgtggtctggcaggggccctggcctcaaaccctgttgatgttgtgaggacacgtatgatgaatcagagagtgcttcgagatggcagatgttctggctacacaggaaccctggattgcttgttacaggtgttgccttaatgaagcaaagacacttatcgtattcatccacctgacatcttgggaaatagtggtactctgaatgatatctctaccactattgcttctttatttgtgacctgttcaggagcccacatggcacggaagcaacagaccgtaattggaattaaatctaattttttcctcactcaaa

SEQ ID NO: 91434 - DNA, 942 bp, Homo Sapiens
  misc_feature (518)..(530): n is a, c, g, or t
ctccacacattttcatgaagtggtgctcaccctctaagtgagacgtaaagactgcagtgttcggagccctttgggaaataaatgtggtgaaaagaaaggagggacgaggcttaaaggaaggggaaatggaggttaaggaaaatggctagaaggtgtgttctggaacaatcagaaacctgaggcaacttgaaatgggggaaaaaggcaagaatggagagatgttaccagaacgaaatctagtttgagcagagaaaaagactggctttctagtaggcttgtaaaatgctttcctgcagcaagctacttgtgtccatagatcttctctggagggttaaggtagccttttgtaaaccaaaggaatctataatatctatatttgaaataattaatgagttggaaaagccacccagcgtagaagagtcaatccaagctttaattctgccatctcagaatggtgataaaccatttctcccccatcatctaaatggaatatattgtgcttataggtattttctttnnnnnnnnnnnnngaatatattggaagggactggcaggggtcactttccctgctaacttggtgtttgtagattaaattcttaatgttactgggatgactcagtctctatgttattaatctcatcagccttaactaaggcttttggaaagggtgtaagtttcagtaaccctctgggtttacctgggctttcttcagggctggggaagggcaggtaagtagcctgctgtagggaggatggagcaggacacatgtgttaaggatatattctgatgccaccagtctgtaaccttgaaacttacatcttggctttaggtcctctgaagtataaaactagtgatgttgctgttattaacaagtcagttttgccttcagtcttctaacttgttttctgtttccttcataattaaaatgctcacttgataaaa

SEQ ID NO: 91435 - DNA, 547 bp, Homo Sapiens
tttgtcctctaaagttgagtatatttaattcccagtgttacagaatttaaaatgatacaaatactgcatgtctttaaaatttcagtctgtttttctactgagttcaaaaagtttaaaagatggaggctaccacaaatatataaaaaaacttcactctattctacaacttacatagatctagtacttttggtgagtcctcttaaaattttttctggcattaccaatctgagagtcactttttatcaatatatgttatcttgttttgcaaaaatgcatttttaaaaggtttccaaagtcaccttgataatcatagtgctcactcacttgacacttactgctaaaaggttgttatgcatcttttatacctggttgaggttcaacttccagctatcagagaaaaatgtccctataattctataattgacaaaagggaaaagataaaaaagggaaagagaacagggtggtaagaaagattgatttttcatttcttatcttgtgatacatgctgcagcagtaaacaccactatctctcaagtagaccctttga

SEQ ID NO: 91436 - DNA, 1148 bp, Homo Sapiens
  misc_feature (83)..(117): n is a, c, g, or t
cagactatatacctaatatggcgcatcctggttgcagtcgaacgacgagcgcagcggaagtagtttagcgaggaagcggccgnnnnnnnnnnnnnnnnnnnnnnnnnnnnnnnnnnncagtcgacggtaccggacatatgcccgggaattcggccattacggccggggacaggtaggtttctctggcaccgattcggggcctgcccggacctcgccgcacgctgcagaacctcgcccagcgcccaccatgccccggcagctcagcgcggcggccgcgctcttcgcgtccctggccgtaattttgcacgatggcagtcaaatgagagcaaaagcatttccagaaaccagagattattctcaacctactgcagcagcaacagtacaggacataaaaaaacctgtccagcaaccagctaagcaagcacctcaccaaactttagcagcaagattcatggatggtcatatcacctttcaaacagcggccacagtaaaaattccaacaactaccccagcaactacaaaaaacactgcaaccaccagcccaattacctacaccctggtcacaacccaggccacacccaacaactcacacacagctcctccagttactgaagttacagtcggccctagcttagccccttattcactgccacccaccatcaccccaccagctcatacaactggaaccagttcatcaaccgtcagcaaacaatgggaacaccatcaacccagtaaccagacacccttcagcaatttatcgatagcactgcacaaaagcacaacgggtcagaagcctgtttcaaccaaataccacccttgcacctcagacatcgtcagtcaagactggaatttatcagggtctaaaccggaaagcagactctgtatacgacgcgagcatgcggactccgtgattgttcaacgaccacgggagctcggtttgtacatcctcgggagaatactttcatacatgtgcccccaaggcaacgcaagccctcgtgggacatgtgtgtacccgaaaaattcaaccttcttgtgcaattccagcgcgcagtggggaatcccactttacacggctcagaacatatatattcaccgcaagggggccacatggcacgtaaagtacagacaagtttcagcgacatacaatg

SEQ ID NO: 91437 - DNA, 403 bp, Homo Sapiens
acccacattaattcagctttgtgaagtccctgctctctgtgggttctatgagtcagcagcaacattggcctaacctccgtcccagcctcctggctcaccacatgtgtacagtgctgtttgcagttgtactcattatccatccatctctctgccatccccaagcatcgctgggtgtaaaacgcaaactctccaccgacactgccatgcgtggtcatgtcttgatgccttcaggggctcagtagctatcaaagaggcctggagggcctgggcaggcttgacgatgcctgaccgagttcaagacccacaccctgtagcaataccaagtgctattacataatcaatggacgatttatacttttattttttatgattatttgtttctatattgctgttagaaaaagtg

SEQ ID NO: 91438 - DNA, 1090 bp, Homo Sapiens
  misc_feature (853)..(894): n is a, c, g, or t
cttgacccccgtctccatggcaggtccatacagcatgggtggcagggtttgacccgcccagcagcaccacggaccccagccactctcgggggcagacgtcagaatccgttcctgagcagctcctgtgccctgggggcagtcacagagccccccaacacccccgtgctctgcaccagcctctccctccacacccgaagcaggcgtccatctgtgtcctcctggcagcccctcaaacacacaccaccccatgtcacacgggtatccagagcaaggctggatctgggctaggtgacccctggggcctcagacctctgagtgggccccagagcccagctgaggaagccacacagcctccaggacgtggcacggttcccctccacttggctgcaagtcgcctgccatggggcgaggaggcctgcaccccagtataagggcctccccagctgagtaagaagctgcttcccctcctctcataggccaagcctattgtgtgaaaccatctcatggtcttggtgacgtagaccatttttgaaaccgtctcatggtcttggtgacgtagaccgtttgcttctttaactccagccgcggaatgacattagtggaaccgggctagggaactgctggaagttcaggatgccaccaccttgaacacctaggccagggatccccaccatgtcccgggtttctttcttcgagagtatagaaccgttcattcttgctttgtgtcccattccatctcttgaaaaaatgtagtctttgaatgtgtgaaaatctagggacattcaatctagtcttttaaattatttttccatatttatatttttaaataaatgcatatattgagtcttaaaannnnnnnnnnnnnnnnnnnnnnnnnnnnnnnnnnnnnnnnnnaagggccggcgcctctaaagtattccctcgagggggccccagcttacccgtacccagcttttttggacaaaggggcccccataagggaggccgtattataacctaaggccttgcccggccgtttttacaaactccccgaactgggaaaaacgcgctaacctgggagaatccttggggaagggaacctttctttcgt

SEQ ID NO: 91439 - DNA, 310 bp, Homo Sapiens
gctgaagatctacacgcggctggccaccatctaccacaacttcctcctggaccgtgagaagtcgctcttcttctaccagaaggccaggaccttcgccacagagctcaacgtccgcaggtcaacctgcctcctctgccactctgcgggtgggccccctggttggcccccagccaccctcgctgaggacagcatccaagggagtgggttttgtgcaagggctgggggtctcctgcctctcctcgtgtcgccggtggctcattttctggcaaatggaggcacgaacgcaggggccaaatagcaataaatgggt

SEQ ID NO: 91440 - DNA, 502 bp, Homo Sapiens
aggggagcttttccttcatttatgtttatttaggcatttcatcttaaaatgccctaatttggggttgtattaggaaagtttaagaatattacagtgattgtaggagtgcttttagccaagcagactgtatggagaatcgagggcagctggtttcatttaaatttaccaatctaagaaggagtggaaaacgcatgtggtttcgctttctcatcagctgagccaaacacctgatgcttcagaggaagacggcagtagttcaattctcccttgcccattactcagagactgcaatgcagagaagttattatgattctcctgagtgtcataagtagactgtggtaaagatggtctgattttagccttcagggtaaatgctttggcacagaactttgaaactgctgtccgcagctacgtgaggggacagagcgttgataacatttgattgccacttgaattctaagaagttcttttaaaacagaatcaacaataaaaggttttattg

SEQ ID NO: 91441 - DNA, 261 bp, Homo Sapiens
gccgcacggtctctagcccgcagggctctcagagtcgcaggcggtgacgcccggtcggggggcccggtcgcaagggacacacagctgggggcgcaatgtcacccgcattgacgttccctaggcgctggatcgccgaaggtctggttgagaacttgaacccgcctggagcggatgcctaagaaaatgcaggcccgctgaagcctccccgccgggccctgggccctgaaagcctccggcagtttcccgtgaccccgcggccgc

SEQ ID NO: 91442 - DNA, 479 bp, Homo Sapiens
gggcgcccactctggagatcctcaaaaaaggccctcctctgtggctggcagcctctgacctttccctgggcttcaaaggaaggctatggagtttgctgtgggccctgcaaccttcccagccactcctgctgcactaaggacttaggatccttttatcacaaatcgggattctctcccccaccccgaattctgtctgcttaaactggaatacacaggagcccttcctggcctggatggtgtctcccagcttccccgcccagcttgcccaccccatagttggtgagatgccaagtttggtctgagttgtgaccccttcagagtagatgcccggcaggctggggttggcccctggagggtcaggggaccatcttcttattccctcttttctcattcctccaacttcctcccctccttcaattatttttttgtaaagttgatgccttactttttggataaatatttttgaagctggtacaaaa

SEQ ID NO: 91443 - DNA, 513 bp, Homo Sapiens
gcggccgcggccctggcattcgcgcttgggtctggagatagcgcgagagactcaccggctcctgggaacccagtcgagggcccgggccaggggcataagaggaagttgtcccgagtggctcgcctctggccctgggagaggcggccccgggagccggcgtcccgcccccggcggcctcattccccgaccctccaccccggctgcgcgcgccggccctggctgtatctcgggggctgcggcgggaactgccgagcgggcttgactggacgcactgcctgaggacctgcggaggagacgagggagcgcggcgggtcagccccgaggttaggccgcgggtcccctgtccgtggcgctccgtccttttcccagccgtcttggctacagaatctgcgacctccccacactccttctcttttgagtatgtcacttaagtcttctcgccggatgctttttcctccttgcttttgccggaaaggagagagatacatgtgaaggatatctgtcctcgttgct

SEQ ID NO: 91444 - DNA, 536 bp, Homo Sapiens
tttctagttccttgaggtgtaacattagcttatgtgaaatttttctttttaaatttagttattgttataaaattccctcagtactgcttttgctatatcccacgttttaatatattgtgctttcatccgaagatattttctaatttcccttttgatttcttctttgactcactggttattcaagagtatgttaaatttccacatatttgtgaattttccagtattccttctgctactgatttctagttttgttccattatggtcagaaaagatacttggtatgttttcagtcttccatttgttaagacttgttttgtgacataatgtgatctattatggagaatgtcctatctgtgcatgagagaaatatatattctgccactgtcaggtagaatgttttgtatacatgttaggtccatgttgtctatagcgctgttcaagtctgctgtttgcttacctgttttctgtctgaatgttctatccattgttaaaagtgggttatactgaattatcccacaattattgtattactattt

SEQ ID NO: 91445 - DNA, 370 bp, Homo Sapiens
ttgttgctgattcagcatatacacatcctccagtgtgacaggattgtgtatggaaacaggtaagactggtgaatactaggctgtgttcaagtgtagagtctcatgattatcaccaatactgtgggctctccctcttttagatgagtttttctaccatatctttggctttacaaaatatattaacacagtttcataatagatctcttggaatatggtcgtttggtgttaagcattctatctggcaaaatgaaaaataagatggtaagagttatcctacaaaaatcctaatgttctcaagctactgctgaaattctttttctagtaatttacaaaaaagtccccattttcttgtagaaataagccaattaaa

SEQ ID NO: 91446 - DNA, 728 bp, Homo Sapiens
tgtctgtcagtgaccttctgtagtaataaagtttttgccactgtaaataaaaacagtatccgtagctatcaggatcattgcgcactcatatatgctaagccttctgttctctaatagaagcctttcttttccattgtttctggatatttgtattatccaaatgtgcttatttctttgccttagcacacgttttatggagtacttgttatactaggtttgatttgaaactggtgcttgtcgcagaactgtcagagcatgaggagcgctcctcctgtgggtggacgcattcacgcactcccaggttgcacctgctgctggcggtgagcagggggttcagcagcttgaccgatgccccccgagggggctctccccagcttaaactttgttgtttaaatttgttaactttttatattaatgactattgaaagtggtaataaaaatttatattataggcttcaatgttttcatgaatgttacccaaaaagctgtgttttctttggtcagaggtcaaaatttatgaaaaacaaaatgctgtatgaatggaaatcattttgcaattgagtgacacttcattgtaattcacagtgtaaatttaatccaaactgaaattttgtttcaactgaatttgtaattaactctgaatttgtttttaatcattagtaatatttcagttgggtatctttttaagtaaaaacaacaaataaactctgtacatgtaaaacgtgaaa

SEQ ID NO: 91447 - DNA, 748 bp, Homo Sapiens
  misc_feature (356)..(356): n is a, c, g, or t
  misc_feature (547)..(580): n is a, c, g, or t
ggcagcctggacaacatgacctgcatcctggtctgcttccctggggcccctaggccttctgaggaggcgatcaggagggagctagcactggacgcagccctgggctgcagaatcgctgaactgtgtgcctctgctcagaagccccccagcctgaacacagttttcaggactctggcctcagaggacatcccagatttacctcctgggggagggctggactgcaaatctgccaggtctcagaagagtgcggagagaaggggcaggatggggctgggaagtccaaccccacgcatttgggctcagccttggacatggaggcctgacagctgttgtcctttggggatcctttgcttctntggggcctcaacagaactaaagaagaaaaccgaccctttccccaactacatgtaccagcggaaggaaggaaggccaatgtaggaacccaaaatgcttatttcttcttctcttacttccctctcacagaaaagtcttacgaatggggaaattccaccaacatccagaccaaaaagaaaaaagcccaaatcgnnnnnnnnnnnnnnnnnnnnnnnnnnnnnnnnnncccaaccaaatgtttttgaaatattcagagccgaacagattctgagagataacccagtccaataacctctttccttcttattactcatctgtttttgaggggaagtagagttttgattattaaactttatttacataagtgattccaaatacattttcttgtaaaaaa

SEQ ID NO: 91448 - DNA, 989 bp, Homo Sapiens
  misc_feature (139)..(194): n is a, c, g, or t
  misc_feature (915)..(949): n is a, c, g, or t
tatgtaaataaagtttaataatcaaaactctacttcccctcaaaaacatgatgagtaataagaaggaaagaggttattggactgggttatctctcagaatctgttcggctctgaatatttcaaaaacatttggttgggnnnnnnnnnnnnnnnnnnnnnnnnnnnnnnnnnnnnnnnnnnnnnnnnnnnnnnnnggtctggatgttggtggaatttccccattcgtaagacttttctgtgagagggaagtaagagaagaagaaataagcattttgggttcctacattggccttccttccttccgctggtacatgtagttggggaaagggtcggttttcttctttagttctgttgaggccccagagaagcaaaggatccccaaaggacaacagctgtcaggcctccatgtccaaggctgagcccaaatgcgtggggttggacttcccagccccatcctgccccttctctccgcactcttctgagacctggcagatctgagaataaacttcagcaatgacagtggccttgcagtccagccctcccccaggaggtaaatctgggatgtcctctgaggccagagtcctgaaaactgtgttcaggctggggggcttctgagcagaggcacacagttcagcgattctgcagcccagggtctgcgtccagtgctagctccctcctgatcgcctcctcagaaggcctaggggccccagggaagcagaccaggatgcaggtcatgttgtccaggctgccctgctcttccaccttccagcactaatcaatacttccggcccggctcctacgacccagaatcgcccctttccaaaagaccacgccctttctcttaagtcccttccactaactctccccggccgtaatggccgaattcccgggcatatgtccggtaccgtcgactgnnnnnnnnnnnnnnnnnnnnnnnnnnnnnnnnnnncgccgcttcctcgctcacaaactcgctgcgctcgtcgttc

SEQ ID NO: 91449 - DNA, 550 bp, Homo Sapiens
cccaaacaatacgcactgggcattgggtaagggactccagaagcagcagctagaaagagaaaaagccctcttcaatccccataatgcttctttcctcttaatgtctcaaaataaaaccagaaagaggaataaaatgattaagtgcttgaggccaaatgagttcccttgattcaaataaccctgaatcagaggcagagacctcctgatgtcttggtttccatcaaagccctccctgtctgtctgtctctcttttgctctctcattcccaggcactctcttttggtttgtgggtccaggagatgaggctggataggagaggaaaaggcttgagtctggataatttgtataagatgctgctgagcacatctcttcatgcgcagtccccaggtatctgatgatgttttgaaatggatagattgttttagagttattttgtgtcctttaaaaaaatcccatttatgcaatttacttggaatttgcttagcctttaataggcttgtgtaatttcctgctcctccagtacaataaataaaagaaagatgctgaaaaa

SEQ ID NO: 91450 - DNA, 188 bp, Homo Sapiens
agttcaaaggaatagagtcttgaagagaaaaaattatagggcagaaaagataagtgttcaaaattggcaactggactattattatgtctagcatctcattctaaataactaaagcttgatttactcttgctaggattatgtgactactaggtaggagcctcttaaaacactggccctgagcattaaaa

SEQ ID NO: 91451 - DNA, 991 bp, Homo Sapiens
  misc_feature (547)..(601): n is a, c, g, or t
aggcgctaggcccggcaaggctggtaccggtccggaattcccgggatatcgtcgacccgcgcgtccgcccacgcgtccggcgcgctccgcccgccccggagcctcgccctccgccacgatgagcaaatgagcgcgagcgagggcatgaaatttaaattccactcaggggagaaagtgctgtgcttcgagcctgaccccaccaaggcgcgagtgctgtacgatgccaagattgttgatgttattgttgggaaagacgaaaaaggcagaaagatcccagaatatctgatccattttaatggttggaacagaagctgggatagatgggcagcagaagatcatgcgcttcgtgataccgatgaaaatcgtagattacagcgtaaattggcaagaaaagctgtagctcgcctgaggagcacaggaagaaagaagaagcgctgcaggttggcctggtgtggaatctgtcttaaaaggcctccccactgaagaaaaagatgaaaatgatgaaaactcattaagcagttcctctgactgtagtgaaaacaaggannnnnnnnnnnnnnnnnnnnnnnnnnnnnnnnnnnnnnnnnnnnnnnnnnnnnnnccagagcttcaaacaagaagggaaatggaagaaagaacaataactatagaaatccctgaagttctgaagaagcagctggaggatgattgttactacattaacaggaggaaacggttagtgaaacttccatgccagaccaacatcataacgattttggaatcctatgtgaagcattttgctatcaatgcagccttttcagccaatgagaggcctcgtcaccatcacgttatgccacatgccaacatgaacgtgcattatatcccagccagaaaagaattgttgacctttgtaaaggaaatggtgggatggatttagaaataaccctttgaatacacctctcccggtgggttttactcctatccatattgaacaagcttcagaataaaaaat

SEQ ID NO: 91452 - DNA, 910 bp, Homo Sapiens
  misc_feature (709)..(723): n is a, c, g, or t
ccatgaagcgctgcaggttgcctggtgtggactctgtcttaaaaggcctccccactgaagaaaaaaatgaaaatgatgaaaactcattaagcagttcctctgacagtagtgaaaacaaggatgaaaaaataagtgaagaaagtgatattgaagaaaagactgaagtgaaagaagaaccagagcttcaaacaaaaagggaaatggaagaaagaacaataactatagaaatccctgaagttctgaagaagcagctggaggatgattgttactacattaacaggaggaaacggttagtgaaacttccatgccacaccaacatcataacgattttggaatcctatgtgaagcattttgctatcaatgcagccttttcagccaatgagaggcctcgtcaccatcacgctatgccacatgccaacatgaacgtgcattatatcccagcagaaaagaatattgacctttgtaaggagatggcggatggattaagaataacctttgattacactctcccgttggtcttactctatccatatgaaccagctcagtataaaaaggtgacttcgtctaaattttttcttccaattacggaaagtgccccaagcactaacagggagcccaggcaggaactctcgtcccggtcccgcccttggttgaatccattccaccgctccagtccccccaaagagtcaggctgaccaccccggtggannnnnnnnnnnnnnnagaaggggccacggccgcatcctgaaacccccctctgctcccccgagcggtggtcccctccgccgtaagggcccccactggggaacccgccttctccccgaaaaaaagtcctttttttcgctgaaccctggcgacagccggggccatttacggaccctctttcccggccaacgctgtgaccctagca

SEQ ID NO: 91453 - DNA, 443 bp, Homo Sapiens
cttattggcctgggattgcacattttctctgatgtttgcaacagagaaattttcatttaaatgatactcttcctttcttgaaagttacatgtcctcatttctgtttctgcttctcccttggccagtgtcattgatgcagatcattgcatacaacagcacagcaaattgtgccaagtcagtgtgtgaatgggaattagcaatgcacgctggcaggctctttttccaggaaccaggctgtaacattgaccagggaacctcttcattccctgacatactaaattggtcaattttgtagtactcacctccatccacaaaaacaacaaagataaaatcaatttggagctttatatgacaaaaaggaagaagtccaaaaatatatagccttcccccctcccacatatctgatccaaatattaaatatctgattttataaaacaaaaaaa

SEQ ID NO: 91454 - DNA, 860 bp, Homo Sapiens
tttcacacatgcagggagttgtattacaggaggggtaacactgagctcagggactccactgcttttatagcaaacagtaagcaagcttgctctctgtcctgatgggagacatcccttcatttttcaaggttgcttgctgcaacctaaccctgagaaatgtcttggataaagagtggtgagagccttgcattcttggcatacttagcaaggtgtgtaggagtacaagagcctcacagaaaggagcctcccaatagatatgctctgtgaaatgatcagtgctctctcattccatgccgatgaccaacacttattaaaaaacagttgatcaagtaattccagtgaaagaagaggatctctggaagtaataaaaattgctcccttaattcattcttcttttttagtgccttctgtctagtgttttttcaaccataaaatattttttctttaggctcttcaattttcttctaaaataataaaattgtctttcatgggcctctgatgacttaacttcctttttttcttaggtagtctcccaggctctctgtggcttccacacagatgctaggatacatgccctcagtgtaagttgctaccagaagatacagatgggtcttcacgacaaccacaccagtgttctcatttttggcataaagagaatattcatctgcccggacacatctgtaatcttttcccttgaaatacagtccttctcttcgggcttgcaaagggttcttggcaaatccattcaccagtgttcggacatcactgggcgttacattgaaacctggtgatgctacacacaagctccgctcctggattttgatgagggctgcactgtccacatgcttggttcccaagag

SEQ ID NO: 91455 - DNA, 448 bp, Homo Sapiens
aggaaaatcatttttagcaacaaagtactaagagggtgcatggacaaggaaaactttcccctccctaagcccatacctctagttgataatctgttcccatccccaggtcccagcaaacattctaagacccaagaacaggtttactgggaggaattcgaggcactgcagttcatgtgctgagttaaataagctctggaaatagaagctgaagaatcacaatacccaatctaatttaaccaaagtctaattagagaatttaccagaaattgagagacttgctagacataatttcctgttaggaagtagtatttttctcctttcaaatttttaaatgtttggtataatcagcaaaatagaagtaaattatcaatttaagcttaacagagatattttgttaagtaatatcacagtaccttataaataaaaaatattaattatttccagttaa

SEQ ID NO: 91456 - DNA, 1165 bp, Homo Sapiens
  misc_feature (19)..(19): n is a, c, g, or t
  misc_feature (42)..(43): n is a, c, g, or t
  misc_feature (59)..(60): n is a, c, g, or t
  misc_feature (62)..(114): n is a, c, g, or t
  misc_feature (286)..(286): n is a, c, g, or t
  misc_feature (319)..(319): n is a, c, g, or t
ccctaccctaaaataaaanttccccccacacaaaacaacaannacacaaaaattaaccnncnnnnnnnnnnnnnnnnnnnnnnnnnnnnnnnnnnnnnnnnnnnnnnnnnnnnnaaatatccaaaacaaacccaagaacttcacatgactaacatttctcattcctacactcttgctgtgagaaagccagtgaggttgcagactactagagggagaacaaaccttgcaggtgggctgctggtacaatccctgctaagtctcttcacctcggttcaaaaccagctcntgatggaatccacaagagtatgtttttcctttntaaagcatatctaaaaaaggcaattcccccctctaaaattattacaaagttaaaagaaatgcaaattagctacgatctattccaagcacagcaccgccagaagattcacacacactatttggtgtttcatgttggttttcctttcattcttttaaggcagtggtttccacaggtcagttctgagataagaagcatggttcatggcagtttgttttgcaactccaatttgttctctgggaatatctcaaatcattccctgaaattagtgcttttttggttgagaactccaacgactgagacagagcctctgggctcttcctggcacaggatggtttatagctggcgctcttttatcaggtcctcatgctcacgtagaagcaacagttcacctctctttttttctcaggcttctactcaaaagtcatcaagtttgtaggaacctgttgtttgttactttggcaggctgcactcaaatgcttaaaccataacattgcattcattctattgccagcttgaaacttgtacgaatttcctttctcagagtcagtcagcaggaagagatcaggatgttcagggtcatcagccatcatcaccatccatcctatcacagatacgttcttattggatgttgatttgaaatgttttctttcggtagcctttagagatttggcagcatagtaaaaaagctgtgtcccacacaaagctgcccaatattttgtccaagatgctaccgtaggctttttgccttcttttaacaaagtttttctcctgagaacaccctgaatagtaacagctcctggatataaatgtactgccaatcttctgattctgcagaactttcaaaag

SEQ ID NO: 91457 - DNA, 456 bp, Homo Sapiens
  misc_feature (420)..(420): n is a, c, g, or t
ctgcttgtcctgcctctgaagctccacaacacgaactgttgagccactcatttggtgctaaccagagaaccttgctgttgggcgagacctcaggatcttgttcaaggcagggcttggcccagcagcacttctggggggtgatcctcaccctgctggaacaccttgagagcgcgttgctcaaaggcgcctctaagagttacagggttcttctctctcccgaactggaatctgtccccttgaaacttctgcccatggatcccagttctgctctctggaatgaagcaatcttacataaactgtctggggttgctggttgatgtttctggttcgtaagttgtctacttctgtggtcacccttgggcggagcttggtggctcatacttcaccgaagttcagggacacttgtgcaccgaatggtangggcagctggaagctccatcactggggagtgcctag

SEQ ID NO: 91458 - DNA, 368 bp, Homo Sapiens
aaattcagattgctaaataagggataccaatcagatgttttctatcttccctggagaaactaaggaacttcaagtttaaaacgcctcatgaagaattgggataaaatataaagaatttcctgaagaaagggaggaagatgattgtgtactgaatgattgcaatagaacatctgaaaatgtaaaatgaaaaggataactgaacttttctatgaagagcttgattatggccatacattgaattaatgagcattcagtgagtccacagttctttgttgagggtctcctgcatgccatacactgtgctacgtcctggggctccataaattctttgttaacaaaataaaaatacccccatacagagaagcaaa

SEQ ID NO: 91459 - DNA, 457 bp, Homo Sapiens
accctgtctctaaaagataaataaataaaattagctgaggtggcacgtgcctgtagtcccaactactcaggaggctgaggttggaactgcttgagtccaagggttccaggctgtagtgagctgtgatcatgtgactgcattccagactgggcaataaagtgagacccatttaaaatgtgcccagaagctcagagcttggaccccagaggtctcctgttattctacaggactcctgctcacagcctatgaatgcatggctagaagctgtccggaaaccagttctcaatctttggctttaataaaatttcagtctttagtacttgtattgttattcttacagcctaatccctgactaggttttgagaggaagccatggtgattgtagtctcaagctgccctgtgcaaaagaagacccagccccagtcaaagaattaatgtagcaagaccccgtctatac

SEQ ID NO: 91460 - DNA, 844 bp, Homo Sapiens
  misc_feature (80)..(80): n is a, c, g, or t
ctatgtgacactatagacccgtggttataaaaagcaggctggtaccggtccggatattcccgggatatcgtcgacccacngcgtcgcccacgcgtccggcagtggcgattttgacagccacataccctgtgggtcacatgccatacggctggttgacggaaatccgtgctgtgtatcctgctttcgacaagaataaccccagcaacaaactggtgagcacgagcaacacagtcacggcagcccacatcaagaagttcaccttcgtctgcatggctctgtcactcacgctctgtgtcgtgatgttttggacacccaacgtgtctgagaaaatcttgatagacatcatcggagtggactttgcctatgcagaactctgtgttgttcctttgcggatcttctccttcttcccagttccagtcacagtgagggcgcatctcaccgggtggctgatgacactgaagaaaaccttcgtccttgcccccagctctgtgctgcggatcatcgtcctcatcgccagcctcgtggtcctaccctacctgggggtgcacggtgcgaccctgggcgtgggctccctcctggcgggctttgtgggagaatccaccatggtcgccatcgctgcgtgctatgtctaccggaagcagaaaaagaagatggagaatgagtcggccacggagggggaagactctgccatgacagacatgcctccgacagaggaggtgacagacatcgtggaaatgagagaggagaatgaataaggcacgggaacccatgggcactgcagggacagtcagtcaggatgacacttcggcatcatctattccctctcccatcgtattttgttccc

SEQ ID NO: 91461 - DNA, 514 bp, Homo Sapiens
taggtcttgggtgttgcttatctttcttcaagacatgcaaaagatgaataatatgtttatatttgtttttccaaagtccatacaagaagtgaagtaaagtaactatataccttaacctaagtaactatacaccttaacctgaaatctcatggagctgtatcaggtgcaaaagccatgctcttggccatctgcaggttcttccatagaggctgtgcatggtagtagataaaagcagacctcaggaatgagatttggtttccctatctttacaacagggatgctaataataccatatctgatttatagactaagaggactatgtgatttcttatgtgagtttcgttagaacactcatgacccttagcaagtggctccaccagagataactgtgatgtttattcccagtggaggctcttatgtctaacgtgtttcctttgtcttcttggtctttcttctctttcctatgtatattcctgaaattagggctctggggacatttactaaaaatgttaaa

SEQ ID NO: 91462 - DNA, 931 bp, Homo Sapiens
agggctgttgctggagagtggctaatgtcccctttacaaataaggagctcatggtttaggaagatgagcttgccaaaaatcacacacttgtaaaataagtcaaaatttgaacttaagtctacttatctgagcccaaagtcttacaaccatttatggctgttatcctaacacctacgtcgcggaacggaagagtcctaagactgcaaagacccttccttttcttctagatccagtctaagttggttggtaatttctttagaccctgctttcagggaagtttaaaaaaaattacttgcatttgtatattttccttgtattttcggccaaatttcttctaattaaagtacaacataagttgaaccaacacaataattgtcatattaagaaaagataaaacaaactttactcatttctgcttctgggcatggagtgtgagggaccagacttaagttctcaaacaactacaaaatcagaccaaaaaatacaatggtttccaggcaccggacgacaggcagtgcagggctgtgatccttaagagaagggaagcagcgagccagagtatccaggccacaacccaaatggaggccaagagaggaacagcagaggatacagagggagggttccaggggccaagacgcaatccgaggggaagcccttccggggagagctggagtcctggggtggccttctcgagtcttcccgagcaggtctgtgcagcgaggaaacatccgaggctggagtgagccacgcggaggaggaagaacagcccgagctcacaggggcggggaagagttctagctcgcgacagcccctgggaggaaccctgcactatttgtggcgtcgagtaaagcaccggaaggctctgctcaggagcgtgaacgacaccgcccgctgcaagcctgcgtctagacggtgacgccgtgcgcgccac

SEQ ID NO: 91463 - DNA, 991 bp, Homo Sapiens
  misc_feature (854)..(865): n is a, c, g, or t
tcatatacacgtagatagagccatgtgattccagaaattagaagactggatctgtggaatccatacatgttaaaattttgccaaaatgagatgattaaaatttttgtgagttttataaactgttgcagttcgccttactgatttttcaatgataatcacttttatgggaagggggcttaggaacaaaaaactttgccaagaatgcaaaatcttactggtttttaaagcttgtaacagttgtgtgtaaaacttttatatttgaaacgtaaactcaccctttctgccactgctttcattgcacttttcataccaagttctctccaacgtggtgtctgaaagatttttattatatacactctttatggaattcaatgaagtgtggttatgctgtgtttctgaagtttttaggcttttcttcattggcctgcctaatactagtgtgtttctataacttcagatgattcaaaagtttagtgcttcattgtagcaaaaaatgtatataactcataatatcctacatgtagtattcaaaatcaattattaataaccaataaaagactcaacacattttcattgcgtgttcttctttaagacacctaaactcatatctcataatttctgaatccgcaatccctattcattaattgattacagtttttgagttgttggaaagcctagccctctcagattcagggttcagaaagaattaccaggtctggtaaaattgtctgactagcccttagcctcagaatggtcaacttcatagtataagcaaagaaagtggtgatctcatatagtcagctttttcatgaacattaattcatggtgaatgcactcacagcaaccaaaatccnnnnnnnnnnnntgttcatctaaaaccttaaacattagcttggctcattgagttcttggtacaacctgcttttcatatgacacagtatcaaacatgatttcagatgaaatgggtggtgttaatattgtgttaaagaaa

SEQ ID NO: 91464 - DNA, 570 bp, Homo Sapiens
gaaacttaataggggaaaaaacccaacttcacctgaagagtcctgacagacacgccctttatcaagtgaatatccccaggaatgggatgcagagactgcgtcaccgggcaggacgcagggagaagagcacagcctcactccaggaaaaggcacagcctcaatcaaactgtggacaaacagcagaaaaacccaagcaggcagtctacaagtaactaggctgcacccctcaaaaagacaaggacagaggcctgttccagacccaagaggacaaatacaataatgagcgcaatgtgtggccctgggttgggttatggatcagaaaacaagaatgttattgggacaatcggtgacatctgagtgtgggctgcggagtagatagcaccaggacatcagtgtaaaatccccgattttgatcactgtgctgggagtacgcaagagaatatccttgttcacatgtttagtgataaagggttacggtgtctgcaacttagtttcaaaacgctcaaaagtcatcatcatctgtatgagtttagagggaataataaagtaagccagacaaaatgttaaaaa

SEQ ID NO: 91465 - DNA, 479 bp, Homo Sapiens
ggaaagaaactttcaccaaacctgatgggaacctctcctcaaggactgctaagtcaggaaatggggtatgcagggtctggaagttggaagctggccgcatcccccaaatgagcaggtccaagacacttattcatacatcaggaaaaccagggtccagagatggagagaaatccaaggcttggagccacttggatggtcacccagggccatcagcatctactagccaggaggaggctgggacattcgggaggcaatggagagaaggaaatagaaggaagagggctggggctcccagcagtctaattacagggtcccaaggcccagcagtctttcagggagaaaaatcggtcggacttggacaaatcagctgcacagtgttaaccttccagagactgaactctctccccatttccaggaatctaatctttgatgtatctttgaataactttaaaaaaaataaatcctgaataatcttaaaa

SEQ ID NO: 91466 - DNA, 811 bp, Homo Sapiens
gatactggaaagactatttaaacagttctcaaaattctcttgactactttatttctggcagaccaatatctccaagatcatcagtgaattcatcctataaccctcctgcatcattcatgcattctgctctgagagatgatattccagtagacttgtcaatgtcatcgacttcagttcacagctcagactcagagggaaactcagggtttcatgtttgccaaccactgtctcccattagaaataggactccatttgccagtgccgaaaaccataattatttcccagtaaatagtgcacacgaatttgctgtcagggaagcagaagatactactttaacaagccagcctcagggggctccactatatacagatctcttactaaatccacagggcaatttgtccttagtggattcttccagctcctctccatcaagaatgaactcagaaggccatttgcatgtgtctgggtctctgcaagaaaatacaccatttactttctttgcagtgtctcatttcccaaatcaaaatgataatgggagcaggatggcagcctctggtttcacagatgaaaaggaaaccagtaagataaaggcagaccctgagaaactcaagaaattgcaagaaaggtgaggacttttcataattatatattttttccactttcccaaggccgaaattagcattgctttcgttagagagccatgggaattttaagtcataaatgggtccttccttgacattttagtggttgcttattttgagaaaattgtctctgttttgttgctcttaaaatatacgtatttataaagaaa

SEQ ID NO: 91467 - DNA, 503 bp, Homo Sapiens
aaacaggatgctttttccgagttcttgtatatgcaaatcatttacgaggcaagttttcaacagacctagaaagcaaaacattgaaagtgtgttgttagccctcctctctgcccctgaatcaacagacagagctctgggaccttggcaatgactcagaggttggggctttctgagtaaagggacatttctttaagcatcatctatcaaatttatttcaatgtatgatgtttttacaactggtcagttcttttgtattcttacagctatggttatttgattgtcctcttacaatttgttctacatgaaagagttctttgttagtcagaatgcaacaaactgtcatcaaatggtcattgaccacttgcactcttttgatgtagattaaaaactttttcataaatttacctgctttgatttgctctgtatttttcctgcagctgtaattgctgagtgcctgttgtatactttatagagttgaaataaaaaaataattacttttaaaa

SEQ ID NO: 91468 - DNA, 728 bp, Homo Sapiens
  misc_feature (414)..(422): n is a, c, g, or t
cgaactaccgctttccccgtaaccagggagactgcagtttgcagtgatgtggctaagatacccttgtgctattaaaggcacatttacgtatctttcaacgcagtttgtacctttgtttagggttctattgaactttctctgtgctctttagaaaaccgtcgaataaaggtaaccatctttttgggtgcctgggcatggtcattgtcccagagttttaacataagtctctactaaagtatcctgatttgcaagggaggtcatggaccaagtacaaagcggcaaaaggatggaattaaggtacctgacattgttgaacccatgcctgatgccacattagctcaggactacctacatggacatggatatttccagtgaaagaaagaagaaagcatgcttttctcttgactgtgcagnnnnnnnnnctatgtttctttgattctccattttactagatgccatacctttgcaattacttcatgtggagtcttgaccaagattcaggaaatactagaactttcagtcccagaaggttactctgggcattactagtccccatcattatgagttgagttttactagttaatttcagacgaaaaatatttgtttttccccaaattctggggttacgtacttttactacctatgaactgacaactgtatcttcagtaattacaatttccaacaaattgttataggaataaagaaaagatgttagttcattaaaaaaa

SEQ ID NO: 91469 - DNA, 105 bp, Homo Sapiens
gacaccacagtttagtgtctggagtcttactggaaaaacacgatttctttttatatgtgatatacagatgctggaaagttacctttaaaaattgagtctctaaag

SEQ ID NO: 91470 - DNA, 477 bp, Homo Sapiens
ttaacatttcaaagtactttactaaatagcaatagacaattcttatgtgcttttgatgattaggttattccaaaatattttcactcatttgtttagaatttagtatttatgtattttctgccacatagccattgaacttaaaaactaaggtaaaaattaccagaatgctctcaacaaattcacttataattgtttgcccttcttcaagagagaacaaaaaatctttagtgaagacagcacttaaaattttgtacataagttttaaaaaaacattccatttatctcaggagaaaagatctaacacggggatatggtttgagaatcgtgtaactttcatatgcctgggggacatgttctgcttcttcttctgtccagttttcaaagcctcactttcttgtcccagaagccctacatttgatgaagtttgagtgggacccactcaactcccattccaaagctttgtgcacaggtgtgcgc

SEQ ID NO: 91471 - DNA, 479 bp, Homo Sapiens
ttttaaggctggggtaaatttcaggaaagccaaagttacaggcaaaattgtaaatcaatagatggaggttacactttggttctggcctaaaaaggcaggatatcttgaaataagggcttatagtcataggtagattcaaagatttttctcatttgcaatgggttaagagaagcttcgtttaaattttggggacagcagaagagaatattagctcaggattgtagatgtgatccctccaagcccctgagaaagaaattttcaacaaagaacagtggtcagacttcagtcttcagttcccccttctctgaggtctaggtgccagcagatccattcagtaggggtccaggtttcccagtggcaactttctggccggacaggtcaggagcccagctaaaaaggtgagtgggccatcagcctatacaggcaacgagagtgtcaaccgccagattactactgccagttacgaaaaaacggtcctc

SEQ ID NO: 91472 - DNA, 592 bp, Homo Sapiens
attcagaagagccacccagaaggagacaacaatgtccttgctacccgtgcccatacacagaggctgcctctttgtctactggttctactgtgacaatcaaagggcgaccacttgcctgtttcttgaatgaaccatatctgcaggtggatttccacactgagatgaaggaggaatcagacattgtcttccatttccaagtgtgctttggtcgtcgtgtggtcatgaacagccgtgagtatggggcctggaagcagcaggtggaatccaagaatatgccctttcaggatggccaagaatttgaactgagcatctcagtgctgccagataagtaccaggtaatggtcaatggccaatcctcttacacctttgaccatagaatcaagcctgaggctgtgaagatggtgcaagtgtggagagatatctccctgaccaaatttaatgtcagctatttaaagagataaccagacttcatgttgccaaggaatccctgtctctacgtgaacttgggattccaaagccagctaacagcatgatcttttctcacttcaatccttactcctgctcattaaaacttaatcaaacttcaaaaaaa

SEQ ID NO: 91473 - DNA, 451 bp, Homo Sapiens
gctgagctcctgctctatagagcaaagatcagccatcaaggcatccagatccacagtctctccctgattcagagcttcattcaagttgtatatggagaagcggtaagaaaagttggccatgtttgtttcctggcgaagaggagatctttttactggttccatgggcttgtcagaatccaaactctgagtgagtttgtctagttctccaagccaggctccaaacattttgtccaggtcctgatcttccttgtcactgtcttcttcagcaccatgatcaatttcttcatctgatagctgctccatcgcggcagtcggtcggccttcccgcggccccgggcaaggaaaccgccgctcgcgctcctccagccgctgcctccgcctcctccccaggcgcggcgctccctcgccagagacgcagcgactgccagcagctcccgcgccgcgcgctcag

SEQ ID NO: 91474 - DNA, 493 bp, Homo Sapiens
  misc_feature (69)..(69): n is a, c, g, or t
  misc_feature (76)..(76): n is a, c, g, or t
gctgcggattaaaggaaaatcaatgtgacgttaagcaagacatttattgtgcccacagcttcaccattntggtctntatgattccctgcgaagattgctgttatcccccagagacacagctgagctgtctctctaaagggcctgtgttctactcctgaatctggtttcccctaagcttttatctcaccctggtgacagctcagaaacacacaaactctgtgttaagaaaactaagaagtcattcatctgcacatttcccgaaatcccccagaagcccgtattagactgaatggtgtccttattgcaaactctccactttagccaaggtgcaaagtcctcccagtcccccaggagcttcccttctctgagcggtacttaagttttctgtaaaaccactcagttcaacaaatgagcttctcaatcttagtttctgcttgttgactttaaagttaatctataataaacacactgcagtcctcttccctgaaaaaaa

SEQ ID NO: 91475 - DNA, 475 bp, Homo Sapiens
cccttcaagtacaagactgacgttaaattggcattccatggctccttcattgtgctgaattctcattaatttaactggggtggatttgataggagaagcagcagcatcagaaatatcaaaactggtaacgtcactccatgctacaggatcagattcaataagttctagagtctctgcaaattctgggatggtctgcaaagaggataacacagcgtttgcctccacggccaggaactttgtgggtgaattctgctgagcagacacaggctgattttcatccatactgtaaaactcactagtgtgctcgtcaaggctatttagagtattagacatgttatcatccatgaggaaactaccagaccagctagaaaaacttccaggctgctaaaggtacaaaagaaatttgaatattatttgtcattctcaatgtaggcataaattcagatttcaacacatttcaattaggctaaaaaca

SEQ ID NO: 91476 - DNA, 1771 bp, Homo Sapiens
tctcttctgacttgatgcaggcacagatttatcaagctcctcagtcaacaaacacatcaccggaagaaacatggaaggaaaggaattttaaaaggaaataccaatctctgtgcaaacaaagccttgtatattcatgtttgcaccaatctactgtgagatttatgaagaaaaacaaattgcggacaactctctatgtacacttacaaatgcctcagttgatgcttgtgggctgtttgtcagcgttctgtgataatgaacacatggacttctgtttattaaattcagttgacccctttagccaattgccaggagcctggatttttacttccaactgctgatatctgtgtaaaaattgatctacatccaccctttaaaagcattgatgaattaattagaactttagacaacaaagaaaaattgaaaaagaattctcagtaaaagcgaattcgatgttcaaaacaaactacaaagagacaagacttctctgtttactttctaagaactaatataattgctaccttaaaaaggaaaaaaatgaacagcacatgtattgaagaacagcatgacctggatcactatttgtttcccattgtttacatctttgtgattatagtcagcattccagccaatattggatctctgtgtgtgtctttcctgcaagcaaagaaggaaagtgaactaggaatttacctcttcagtttgtcactatcagatttactctatgcattaactctccctttatggattgattatactttggaataaagacaactggactttctctcctgccttgtgcaaagggagtgcttttctcatgtacatgaatttttacagcagcacagcattcctcacctgcattgccgttgatcggaatttggctgttgtctaccctttgaagttttttttcctaaggacaagaagatttgcactcatggtcagcctgtccatctggatattggaaaccatcttcaatgctgtcatgttgtgggaagatgaaacagttgttgaatattgcgatgccgaaaagtctaagttttactttatgctatgacaaataccctttagagaaatggcaaatcaacctcaacttgttcaggacgtgtacaggctatgcaataccttgggtcaccatcctgatctgcaaccggaaagtctaccaagctgtgcggcacaataaagccacggaaaacaaggaaaagaagagaatcataaaactacttgtcagcatcacagttacttttgtcttatgctttactccctttcatgtgatgttgctgattcgctgcattttagagcatgctgtgaacttcgaagaccacagcaattctgggaagcgaacttacacaatgtatagaatcacggttgcattaacaagtttaaattgtgttgctgatccaattctgtactgttttgtaaccgaaacaggaagatatgatatgtggaatatattaaaattctgcactgggaggtgtaatacatcacaaagacaaagaaaacgcatactttctgtgtctacaaaagatactatggaattagaggtccttgagtagaaccaaggatgttttgaagggaagggaagtttaagttatgcattattatatcatcaagattacattttgaaaaggaaatctagcatgtgaggggactaagtgttctcagagtgatgttttaatccagtccaataaaaatatcttaaaactgcattgtacagctccctccctgcgttttattaaatgatgcatattaaacaaagatcaatattttctaaatg

SEQ ID NO: 91477 - DNA, 436 bp, Homo Sapiens
ctgattcgcgccggcccgcattcctgctcctgtgccacttgcccctgcagctccgcttgctggcgtcgtctggggctatgccatagccgcatcttcgatgtccttctgcctcgggactggcagatggcgccagggagaggactccccaacctgctcaccttctacagaaaatcttcaagaaaaccctccagtcatcgtaacgcgtgtcctccaagccctcggaactgtggctgtggctctgggggctctaggagctgcctactacatcactgaatccttgtgaacaagcccctaggcccacagtctggcagacctccaccagccccaggagttgataggtgatggcgctgggagaagatgttcagaatatctcaaaagccaagtccagaagatccagtttccatcaaagggacctctcttgtcaccaaaatttaaa

SEQ ID NO: 91478 - DNA, 524 bp, Homo Sapiens
gcagccagttccgaccggattcaaacagcctcttcccccttctcgggacacccactccgcgcactcaccatttcccagcctccggatgttccgccttcttccctatggatctcccagtacctgcaggtcacaggataacaggggctatggtggagtcaccgaggagctaatggagcggaagagatggaatagtacagacgggtactggactcagagcctagaagctaggagacaaaggccttgccatattgaagagcccgcctcttcctctctagctgcgcacctgattgggcagttttcacgctagcaccactgattggctggggttctccgccccacacatttagaccctgatcgacaggagatgtaatgagacactgggctgaatgaggaaagagtgacaggtttttgcctgcagcatgttcaggcagcgatttctccttgtgttgggggcctggccctgcctgagggacatttgtatttaacgttgtatataagattatatcactttctgattataaaaa

SEQ ID NO: 91479 - DNA, 360 bp, Homo Sapiens
ggtgggagccccggctacttggttaaacattttttactacaaattcgcccagaaaaggtgaaatattttgttataaaactgtattaagcatggcctaagtatttattaggtatatgatctgtgtagtatgttccatcagaaatatttcttactagtgctttaagctccagagtaaacagtcatttaaaatggagttcactgggcaggtttcccctttaatctagatagaaatactctttatcagagatttaaggcactgttttgctaactggtaaataaaaccaaatgtaaatatgtaagaatgtttatttgttgcacataacttttttggtataaaataaatgtagaagttacctgtgg

SEQ ID NO: 91480 - DNA, 530 bp, Homo Sapiens
atatcagaaatctgactccatgaaagtgcattatcacaatactgactttgtgtataagcattgagtgtgtacataaaatgttgaaacttcctcgataaatgagatatccttttcgtacatctgcatttgtgaaagataaaatttcttgagatctcagctctttgggtgactgcatatgcagtggtgacccagcacagtttccatcaatctcatcaaaagacttgaggttgttgggcacagtatttcagatgaccagagttaaaaagctgggtatacacaattaacaaccaaagtgatatgcatttatacctttccctttatgaccaatttctttataaatatggctcatctgctcataactgttagacccacccaaatgttattagtaacctgagtgtttatgcttgcaaaaatgtatgttattattgtctgttttattatattaagtggtgtataaagtattctgttgtgtttttatgtttctcaaataagttcccctttaaaaaataaatatctttaagtttttaaaa

SEQ ID NO: 91481 - DNA, 391 bp, Homo Sapiens
  misc_feature (90)..(189): n is a, c, g, or t
tgggaagtagccctatttgtctctgatgtcacagaagaagagtgacagtcaaatgttggttacttttcctgttgccttagtgatcactgnnnnnnnnnnnnnnnnnnnnnnnnnnnnnnnnnnnnnnnnnnnnnnnnnnnnnnnnnnnnnnnnnnnnnnnnnnnnnnnnnnnnnnnnnnnnnnnnnnnnccttaacttccttttacaaatgataaagcagccatacaaaatgaggatgacaacattctccttgcctactcccggcccacagggctctctgtgattcagcaatggttggcccctggtgaggggaaactgtggcctgggcgcctgcactatgtttgtgcaagatctgtattctgaaaattatgaaatattgctaaattaaaga

SEQ ID NO: 91482 - DNA, 368 bp, Homo Sapiens
aaaattaaaggttttaaagaaagaactatgaggaaaaggaaccccgtccttcccagccccggccaactttaaaaaacacagaccttcacccccacccccttttctttttaagtgtgaaacaacccagggccagggcctcactggggcagggacaccccggggtgagtttctctggggctttattttcgttttgttggttgttttttctccacgctggggctgcggaggggtggggggtttacagtcccgcaccctcgcactgcactgtctctctgccccaggggcagaggggtcttcccaaccctacccctattttcggtgatttttgtgtgagaatattaatattaaaaataaacggagaaaaaaaa

SEQ ID NO: 91483 - DNA, 253 bp, Homo Sapiens
cggccctgcccaaggtattggtgaccttggaggccggggccctggcttctcagtcagggtctcctccccatggcggcagagctgtctggcgttttgagccctttacaccaggggcaagagggctgcaggccagagccagcaaaagagaagaagcagagggaatgagaaacctagaaggtggaacgggaaggagggagtgaaatgggcaaaggcctccaaaaaaaacaacttccgcctcctaagtttagtgcat

SEQ ID NO: 91484 - DNA, 657 bp, Homo Sapiens
  misc_feature (62)..(62): n is a, c, g, or t
cgaggcctcgtgccggcacgaggggcagccggttgggctgggcccggaagggtgtgcagtanagcaagaggaggaagtggagggaaaggaaccagatgcttctgagacaggctaccatctctgcgtgcagtccccgcggaatttacgcactttcgtcttgtgctcttagatgttctccaggtagactgcaaccaacacctttagaataaacccacctgtgcttgggccagcctgagaggtcttcattccttgctgtccagaaaaccttcaaaggctgcagcataaccagcttctaacattgtccactggagcagagactttgggagccgaggtgaagatggcgcaactaccagagggagagctggattctagagtccccacttgcttgcctggaaggagatctgctcagaactgccaggatgtcagaacacggctctgtacgagctcctgagatccagggctgtagttgtgagaatttgtcctaatgcctctagtcttggcctgtgcttcagcttatttgggggaacaaaaccaatctgattgctctcaacatccagttgtcactgattgggttcaaggaaattattttatcttcagaaaacattttgttatttgaagcagctatataagtgagataaatatatttgatacataaaa

SEQ ID NO: 91485 - DNA, 638 bp, Homo Sapiens
gtagggccaacataaccatggcaaccctcagtagtatgtgaatggttgcaggccccttgctggtctgtgagaagtctaatttcaagtacaacaagaaatgaagccagcatctaatggagaagtaatgtcgcctacactaacatacgatacaaatattgataaaactgttgccctcctaccaaatgggaaattaattactggatacatacagctatgaaaaaactggacatcaagattgtccatctctacctctgtgccaaactctagactttcattaataagaatgtatcaatattatttcagtcattgtaacatttaccacactcatgtaagatgtgattacaaaaaggatgctgaggtgggggaagggtgtatgagaactttctgtactacttcatcagtttttatgttaattcaaaacagtttcatataatgtccattaatttaaaaaatatggcagcattgttcaggaagtgtttcattttagttaatgtttaacaagcagctaaatatctaaatactacattgagatattctatgctattaaaactgaaacaattttgaagttgtaaatgtatcttctgtagttgtagcactagtgattgacttaataaacttaaatttgcacacatgaaata

SEQ ID NO: 91486 - DNA, 788 bp, Homo Sapiens
tttaggattatgctatgcatgttgttttgtaggctgattttttttgctaacaatacatcatgggcatctttccatatcaataactctagatcttcagcagtctgtatatcataatcctgcacggtgttccattgtgtggttgtgtcatgattcacttagttcacaatgaatggacttgggtggtccctgatatttgcttgtctctgcaaagatggagcagacattcctgaacttacaaattgatgctcctctttcagtccttgttcttgacccaacttcttgaaagcttcacacccaccacatttgcttggattgcagttctctgccttgctcctcagcggctctgggagactctcgaaggctgtctttcaggcgatgccgctcattgccatcatgaagccattcctccttgaatgctcccaaagatttctttttctggtagacgataggactcttgcgctcacgcctgatttctcggcatggaaatgtgcccttagctgtgaacagatcttcatgtttcttgagtccccacgtctctgggaccatgtccagcatcctcctctcacctgtctgtctatgaaaatgggctgctaaaccctctttgactcagcagtctggcagtgtcctgggctcaggttgatactctggcaactgagcagctcacctccctgacacagagatgggctgctctaggtgcagcacacggagcttgagttggccaggcttgcgaaatggtaggatggaagcagaggccccagatgggatgtgagagcgggtgatgaaaagca

SEQ ID NO: 91487 - DNA, 726 bp, Homo Sapiens
gaacagctttattgaagtataatttgtatactataagtccatccattaggtgtacagttcagtggttgttagtagtagattcaatggttgttgttactgttagattcttaagttttaaaagataacttagagtttagcaagaagtgtcattttcccacttccagatatagaggacctcctgagactcttaaaatttaatacacctctgtcaacaattcttaattcatttacatttccatagttacctgccaacctagatattgtacctctgcaagagttaaagtagctaaatatagcatagtcctggtgcctcaaaataagaaactcaattatttctaagtttgagtttgccatccttccatgttcaatgtatttaaaaaatagcagtagtctgactaatgtcagcagatatgtacttgtcattatttttaaaaggcaaatgggatacctggttcagacggcactgttataaatggttttgcattagaactgcagtatagtagaggagggctgaactagaagggaaaaaaacatggcttgcagttactgctctgctactcaatcaccaagagccagatcaaatctcttaatctttctgaagctcaagtttcctcatctataaaaatcaagtgtgataatagttaaacctttctgcataggatttttgtaaggatgaagtgagataatgcatatgaaaatattgttgcatcgtaaaagtgaattaaa

SEQ ID NO: 91488 - DNA, 476 bp, Homo Sapiens
aatggaacagcaattgagacaacttgaacagtcatcaacggaagtccctccactggattcctttgtttctgtcccctccgaggagtcattttggtcgacaggctctcaaggcaactccccattttcaagaggctgctcctgcctgcttcgatcatttctccctgcagctgcctagaccccgttcacagtgggaggagtcaatgtcattctacccctcgctaaacgaagatattaacatctattgctttttcccttcatctgtcacaggaaacagaagcccaggcacaatcttttccagctttgcctgttacccctgtttctgaattgcatctttaaggtattattttgttgacaatagatcctttattcactagttacgcaaattggttcctagggggatactccttaccttcctttgtgatggcccaaaatgtctctaggtatctcaagtgataagtaaatttctacaaaaaaaa

SEQ ID NO: 91489 - DNA, 754 bp, Homo Sapiens
  misc_feature (252)..(252): n is a, c, g, or t
caactcctcgggcagagggggttgagtcagccccgccgccggggaagcagctccgggccgagcccctgagtcagaaccggcccgtggaggcagccggtgccccagcccgcagcttcgtcgcccaaccgaggctcccagggctggcggccgggatctgaggggcctggacgtggggatgttcagggatccaggaggaggactttcacgggccatccaagccaccccctcctctggaggaggcctcttctctgngggctccctcaagacaccacctccccatcgccgcaaagtccatccctacccgccttcccctccccttgcgagtggtcccgcttacccttcactgccatcatcgccctgcctttcccagtcctgctggctgcgctcagtctttaggtggtagcaggccaggtacagcggacacttgctgatgggggattccaggaggtgggatttcaaggaataggagctcggtgaattcaaggaccatgcttgcttcgttcattgtatcttcagcacctagcacagcacccagcacataggacatgtttgttgactgaatgcgtatctctatcatcacactcactcaatggtgttgagatatttgtgtttccccttccctagacagtgagatccttgaaggcagctgccttatcttattcctttttgtatttccatacctagcctaatacctagcttatataagggaacagaataaatgaacaataaagaaaagtctttacagcataaaaaa

SEQ ID NO: 91490 - DNA, 483 bp, Homo Sapiens
tttcttacctgagaatcaatctaatgtttaaaacaatacaccgaagggtaaacttcagttgctcatttaataaatatttattgagtagctacttattgcaagctaggcccttttctaggcacacaaacatcctactcatgggagtgaaataaacacaataaccatagatagattaggcaaaatatacagtgttaaaggagaaaaactaaagcaggaaaatgaaatgtttacaggtttgagaggagggatagtgggaattctaggatggccagaaaagtccttactgagaaaggggctttgaagtaaagaactgaaggaatggaaaaagaaagccaggaggctatctgaggaaaaggcatcccaaacacagggaactgcccagtacagaggtgtgcctggggtgtttaagcaactgtgatagataacgaagagcaagaggtttagtgtagctgaagcacagcaaagggaataagaaacagaagt

SEQ ID NO: 91491 - DNA, 422 bp, Homo Sapiens
tagctcttctcctttctgacttcaagatgaatctttgggacgatgtttctggtgcttggtccacagtgattcacttttgaaggagaggccacatgacatgaactgcctggtgttacaacctagctaacatatttgatgccactcctgttgtctgcactgcttattcaagtagtattctaagttatgttactaaaaaacatggtgggtaaagcacaatcctacccatcattgtcctccaaaataattgtatgacatacacggcccagcccattgccctccctgcatctctgtgctgctttgccatttccccttctacccagcctcctcaaggggtaccttggtggatatttcagtacttaaaaccagactgtaatcataacctccctctgtgtggcatcaataaatagccaaactcaaaaaaa

SEQ ID NO: 91492 - DNA, 550 bp, Homo Sapiens
ccactgggcacatttctgcccaccttctttttattttttaaacaatacacttttgttagtgcttattttgtggcaggcaccaggcagtaccagggtgggggcagaaataaatcaaagtccttgtccttgaaaaacaatctcttgctggaaggctggattcagtaaactgcttgggcaggcttgggaaggacccaggtgagcacagcatccaccaggctggctggcaggtaggaggcaggcagccagagcagcttggcatcccaacctgggctgtagcgggttcgggggtgtcgagcagtcagggcatgctccaggcatcggctcaccttggttaggtccgggtcacagatcaggttcatgatgcgctgttgcattttcaggtacttggtgaggaaggcccccccatagtgggcctgtgtggcaggaagcaaccgtgccaaacaggcctgcagggttttctccaaactctccagggtgggcaccaggggttcggaagaagccaggctccaccagggaaactcgtatcccaaaaggagctacattcccgcct

SEQ ID NO: 91493 - DNA, 996 bp, Homo Sapiens
tttcaggttttccatccaaattcttgttgggaatcttccaatgaaaagtacatatgaaaaaacacttacagttctttagcacacattagcatgtgactccacacttgatcgaggcgataaagatgtgaaatgtcttcggggtcttgccacacccacagtttatatgcaccactgccagcctggtggattcattacatgaggtttcttcaacttatttcatctgtctttttaaacagcaagttccaaagtacggtaagattttcatcctttaaaatttgtattcatggacatgtacttccaagattttaggccagatatcagtgcttgagtgaattatataactatttaatagaaataataaaacatcgatacaaatataaaagacataatcagtataaaaggcttatatttataaaaatactttaggtaacagttttcccctgagggttgaccatgcgtgttgcatccataaatattgctcggctctgtagctcactctccaaagttcagagttcatctttaaaggaagtggtgctggccccggtcgtgtgacctggccgaagtggctgcctcaggctggcacctgggcttgatagaatgaagaagagaacagcatcagtggggcctccgaaaaatctggagaagatttttttcttccaaatatggaagatacaaagaccaaggatgacaggctagtgatcaggtcatgtgactggtgtggcagctcactggtttttctggacccagtcccaactgtcttcattctctttccggttcttctcagcttcgataatttctttgtaccttcggcgaaagaagcccatcttccagagcagcacggccagcagcaggaagatgaggattcccaccaacaaactgatggcgatgaaccaccccacgaacgtagccctgggggtccaaaatgggcagggccccaaaaaaccaacgcaccttttctgggttcccatgaactatgtcccacaccgtaagggcagg

SEQ ID NO: 91494 - DNA, 387 bp, Homo Sapiens
caaggccttgcgtgcctatgctggctgcacccagcgaacttcaaaagcctgccgtggcaacctggtataccattctgccgtgttgggtatcagtgacctcatgagccagaggaattgttccaaggatggacccacaaatcctctaccaaacccgaagtgacccatgatccttgcaactatcacagccacgctggatccagtgctactgctacaaataaggcaagtataccttcttttttccctctccctactcagctttcaaaagatgtttgattcttcagataacttttgaaatgtgctataaagggcctagtttaaaaggaacttcttttgaaaagcaattaacagttgataaaggattaaataaaaattatctagtaaggaaaa

SEQ ID NO: 91495 - DNA, 484 bp, Homo Sapiens
  misc_feature (63)..(123): n is a, c, g, or t
agtggcatgtgcctgtagtcccagctactcggagggctgaaggagaagaatcgcttgaaccannnnnnnnnnnnnnnnnnnnnnnnnnnnnnnnnnnnnnnnnnnnnnnnnnnnnnnnnnnnngagactcgtctcaaaaagacatcagaaagcctgcttgctctctgcaccatgtgaggatgcaggaagaagccagctgtctacagaacaggaagagaaccctacgagaacctaaccatgctggcgacctgttctcagacttccagacttcagaactgtgagaagtaaattgttgtttaagccacccagtctatgatgttttgttatggcagccccagctaatatatggagtggaaagcctagatttatctactgggttcttttcctgtcagcagttcaacatgtgtagtagctttcagtctctgctgtttgtgccaaatatataagaaataaaatcagataacttttttgtaattggatcata

SEQ ID NO: 91496 - DNA, 662 bp, Homo Sapiens
  misc_feature (551)..(561): n is a, c, g, or t
gaaataggtgtgaagaccactcattctcttatgtgggatatggtggtcaggagtctctgcgatcatcctggaacacatattactcaaatacagagttcatcattcttgttgttgatagcattgacagggaacgactagctattacaaaagaagaattatacagaatgttggctcatgagaatttacggaaggctgcagtccttatctttgcaaataaacaggatatgaaagggtgtatgacagcagctgaaatctcgaaacaccccaccctgagttcaattaagaatcatccatggcacattcaatcctgctgtgctctcacaggagaagggttatgccaaggtctagagtggatgacctcccggattggtgtgagataacttttttgcttgaaagagactgctctatttattctgtgacatgaacattttttcctagtacctttggctgctaaggcagcagcatgtttaatttataacaacacaaacctctgagagcaacacttgaatcaagtgcagctgaactggaacataaaagattttttcttaacnnnnnnnnnnnaacacactaatcttcagttggatgaatgtaatgtataactatgttttcagcaacaattcttctgtttattctaattaatcagtgactgccttgtaagaaaa

SEQ ID NO: 91497 - DNA, 426 bp, Homo Sapiens
ccagattcaacatttatgacctccccttccaaagactgtctccgttgaccttgtctttttggtatgccttggggtttctgataatgtgtggagtctcattatggctgagagtttagtgttttcacagtgaagtgcagacatttgatttctttatgagttccctgtgttagaaatggctatagaaaaatttgtcataataatttcatttgcatgaaatcctgaggggtgcattaaggaaactaaaagcaccacttaccaaatctatcggcagaactgatgtgaggtaagtgagcatgtcaaacaaaataggagctcacatggatatatttatgtcactgagttgtcagaaattatgtcaaaatgaaaactgtttgtttcatgacaaattatatagtctataaattaaactggaagtaattattaaaa

SEQ ID NO: 91498 - DNA, 576 bp, Homo Sapiens
  misc_feature (37)..(37): n is a, c, g, or t
  misc_feature (86)..(86): n is a, c, g, or t
tggggtgcttagcagaatccctcagctcacaagatgnaataaatgcagactaaatgaatgcacaaataattcttcacacacaaccnatcaacacatggaaagactgcaggacggccagatccaagctaacaaacaggggaagatgatgtttcaaatgatcatctgaatgctgggtttccaccttccaccaggaagtcatatggtcaaattatcccggatcctgaaatatatcttttgatagaaatgactctggtactttccgcaacttactttctatggagcactttcctgaaacaagatttgtgtttaaatattcctccttctacaaagtattaaacagtagtaagttctgcaacgttgacaatggaaacctggcaatgtgcccttgtttgactattaaggaattgcttccaagtaccacagggccttgaagaccaaaataacacaattacctggaaggtgaacaatggcaacttatcaggtgtggtaaacacttttttcccaagaagatcctttattccttctgaatgcacatcaagaaggagtgaatacataaatcacatatttgttaataaa

SEQ ID NO: 91499 - DNA, 433 bp, Homo Sapiens
cacagggccagaatacataaggactataaacatcatcggtatttggagtccagaatcatcacaaattgttaatcctggtaatagataaaggggaggacatgggcaggccaacaggcacttaagttactgtctactaaaataacacactctgtttactgaatcacaactgctctggggaaaccagggctgaccagtgaaagcttacagacccctcttcagccacaaactggaattatgaagtggcctccagatatgacatattttgatgttcagttcagtgcttcactttcctcagaactacttggctacagaatactttgatcctggcccttctgtgactgctccctgatggaatatttggacaaaatcccaacactgaattaagatgaaggtatgctgtaatgtcttatatgaaaaataacatcagatcaaa

SEQ ID NO: 91500 - DNA, 443 bp, Homo Sapiens
  misc_feature (15)..(15): n is a, c, g, or t
  misc_feature (30)..(30): n is a, c, g, or t
ttccaccccaatacntgtctttccttccgngcttaaggagtaccatgtacttagccacaggcagaatagctttcgatgaccccatagcactttgtttcttcgccttgatttgcactttacaatgtccccagcccctctgcagcccgtggctggcagggcgttcgatgtgcggttggcccccagcgcgccctccagagctgcggtgtctccctgcctcattccccacatcccactgagcatgggaccattgggagcagagctgatattaaagcatgtttagcttcgaagttttacttttttaaagctgagtagttaagaattccctgtaaaaacaaaaccctgtaaattgagcctcatgtctggtatatattttaccaaacagccttaaaatatatttggaagcaaaaatcagtacgaatgtatctccttgaaaaatgcaaaaa

SEQ ID NO: 91501 - DNA, 1174 bp, Homo Sapiens
  misc_feature (1059)..(1109): n is a, c, g, or t
gtggatatcggcacgacggttttcctagactgtcgagccatggctgagccagaacctgaaatttactgggtcactcccattggaaataagataactgtggaaaccctttcagataaatacaagctaagtagcgaaggtaccttggaaatatctaacatacaaattgaagactcaggaagatacacatgtgttgcccagaatgtccaaggggcagacactcgggtggcaacaattaaggttaacgggacccttctggatggtacccaggtgctaaaaatatacgtcaagcagacagaatcccattccatcttagtgtcctggaaagttaattccaatgtcatgacgtcaaacttaaaatggtcgtctgccaccatgaagattgataaccctcacataacatatactgccagggtcccagtcgatgtccatgaatacaacctaacgcatctgcagccttccacagattatgaagtgtgtctcacagtgtccaatattcatcagcagactcaaaagtcatgcgtaaatgtcacaaccaaaaatgccgccttcgcagtggacatctctgatcaagaaacaagtacagcccatccgccagtaatggggtctatgtttcccgtcattagcccggcgtcccattgctgtgtactttcccaaaagatttaagagaaaaaactaccaccactcattaaaaaagtatatgcaaaaaacctcttcaatcccactaaatgagctgtacccaccactcattaacctctgggaaggtgacagcgagaaagacaaagatggttctgcagacaccaagccaacccaggtcgacacatccagaagctattacatgtggtaactcagaggatattttgcttctggtagtaaggagcacaaagacgtttttgctttattctgcaaaagtgaacaagttgaagacttttgtatttttgactttgctagtttgtggcagagtggagaggacgggtggatatttcaaatttttttagtatagcgtatcgcaagggtttgacacggctgccagcgactctaggcttccagtctgtgtttggnnnnnnnnnnnnnnnnnnnnnnnnnnnnnnnnnnnnnnnnnnnnnnnnnnngttgttgtgctaaactcaataatgctgttctaactacagtgctcaataaaatgattaatgacaga

SEQ ID NO: 91502 - DNA, 455 bp, Homo Sapiens
cagtaggatcatagcccctcggaaaataccataaattttatcttaatctctagtgccagaaactgcctgggcgtaaacactagcttgaacatctgaactagaagatagcatagtattggaattagaaacttaaattctatttaggtgaaaggatgtttcctcaaattatgaacaaactttaatgtgtttgaaacggggtatttttattttttaaatgtatgctgttaatacatactttgggaaaaggaactatatgtacttaaggctgtgcttcagtcttagcttttggcttccagagaagggctaagaaaacttccaagggttaaataatgtgttcaggtttcagtcataggatctcagtcgcaactatttaactctgttgttttaacccaacagcagccagatgaatgagttggggccctattccaataaaagattattttggggcattggaa

SEQ ID NO: 91503 - DNA, 343 bp, Homo Sapiens
acatcaagtgaacaccccttgggacaaaggaatctgaacaacagtcttcagacctagacattccttctgacagagcctactcaaatgagaaggaaccagaaaaccaaccctggtaatatgacaaaacagggctctttaacaccctcccaaaaatcacaccagctcaccagcaatggatccaaactaaaaagaaatcctgattttcctgaaaaagaattcaggaggttagttattaagctaaccagagagggaccggagaatgatgaagcccaatgcaaggaaatccaaaaaaatgatacaagaagtgaagagaaaaacattcatggaaatagatagcttaaag

SEQ ID NO: 91504 - DNA, 808 bp, Homo Sapiens
tttgtaataaagtaatttaatactgtaaaatggtttcctatcacagatacaacagataattccaagaacttgttcttgatagctattttaaatcaccatgactgattttactatgattcacttaaaacgaataaaaactatatatactgaaatattcctaaattcaaactgtaaatctatagaatacatttttcctattcaaacctgtgcaattctttattgatactaaaatatacaaacctgagtagtcacttccacaaaatgtgattcgtgccagaaagctgtgtgtgatgccttctagatcacagtcctgacagggaggtctgtgatgaggacgattcatcttctaatacgtgaaacactctagcgatcccaattcctgatactggtttacaactattcggtagggctggtggcaaaatcaggaagggacaccactttctcaatttgggccaccagcatgagagagcagcctgtcttccgggctgaagcttctagtagtctcctgagagcagtctgcctccaatggagacaccaggtgcttaggggacaggtgttctctctcaggctgactggaaggaaggaaggcctttagctattctgaaggctggctggccactaaggaaacacagtgacatattacaagatcaaacctttcctaccctcatctccggctcccataagtattcagtgtgacatgattgtaaacagataaaaatcactccagtgctgtgtgcccaccagttaggacccccatttctcggacgcgtgggtcgacgatatcccgggaattccggaccggtccagc

SEQ ID NO: 91505 - DNA, 377 bp, Homo Sapiens
cagttacgcatgggcttacccatgcatgggctcagcactatgtctactcactaaggccaaccttgctatggccactgttgagtgcccagtctaccagcagaagagaccaacactgagtgctttatatggactcattcgttaagaagagtgaacatcacccgaggactttgcattgtcttctggggaaagggccttcagggcagagttgaggctttccagaaggagaagagattctgccagtgggcagccattcaattcatgcccaagaggtccagcctgcccttcattagggcttgccctgcagacttcagacttgtccaaccaaccccacaattgtgtaagccagtcatttgcaataaatctgtttatatatctcc

SEQ ID NO: 91506 - DNA, 476 bp, Homo Sapiens
tttttaacctcattattgggatacttaaataacagatttatgctgttgttgtttctactggtcggtgctcgctcactaatatccaatcctagtatgattttcttttacttgtgtctattaacagggttatgtcacaccttgtcaacctcaaaacagatgatactcatcacttgtcttccatcttgctgttctattatcttcctacaaaaatagctaatttgtcagatttcaaagccttgttatttactgatgagcttaccaactggaccttttgtatcttcagtgtgtaattctgaagatgcattctgatacactagtgaactgggggtgacggtgaaggggtggtggaactaagggggtggggcggcgaacataggcaatatgccatttcctcaccatcccatgcttgtcatgtgagacaacagaaaggataaagaatactctattttttattctgaaaagataatttagcaatg

SEQ ID NO: 91507 - DNA, 502 bp, Homo Sapiens
gagcagcacattgccagtgtccgggaggccctgggggtggagtctcactactcaagggcctgtgccagcagtgagacagagagtgaagcgggagacatcatggaccagcaatttgaagagatgaacaacaaactcaactcggtcactgaccccactggctttctgcggatggttcgccgcaataacctgtttaacagggatgcaaccaggtttgcggaggcctgggattgggcctggacacatgttcttgctctgccaacttctcagccagtgaaggcaggtgacacttacctccaccaggtgatgcaggctgtggtgataaactagagtgtgaagagctcagagtgcagcctctggccttgccactcacaagctgtaggacactagggaggcagtttcacctctgtcagcctcagtctcgtcatctgtgaaatggggatggcttcttaccctgcagggttcctgcaatgtgggaataaaggagccaatgaaaaaataaaaa

SEQ ID NO: 91508 - DNA, 916 bp, Homo Sapiens
gcggccgcgcggcgccggcccagcgcgggcgtgggacgtggagacccggaggagggcggcgggacccgggcggggaaaggcgcggcgtggcttggctcaggtgcgcttctcccacctggcagctcgctcagggctgtggggggcgcctgtgagggcggccccgccctgcgggctggagattaatattaagattggaagtttgtgtcttttgctggatattggaaattgaatgtaatggcaacagaatttataaagagttgctgtggaggatgtttctatggtgaaacagaaaaacacaacttttctgtggaaagagattttaaagcagcagtcccaaatagtcaaaatgctactatctctgtacctccattgacttctgtgtctgtaaagcctcagcttggctgtactgaggattattgctttccaaattaccatctgatggcaaagaagtaccattgtggtgcccaagtttaagttatcttacattcaacccaggacacaagaaactccttcacatctggaagaacttgaaggatctgccagagcatctttggagatcgaaaggtagaactttccagttcatcccagcacggacctagctatgatgtgtataacccattctatatgtatcagcacatttcacctgatttgagtcgacgctttcctccccgttcagaagtgacgagactgtatggatcggttgtgatttaaggacgaacaaacttcccggttcccctgggctaagcaaatctatgttgatcttacaaactcatctcagcgattcatccagagacatgattcattgtccagtgtacccagtagttcttcttcaaggaaaaattctcaggggagtaacagaagctggatacaattactctatcaggagatgaaagggactttgggagactgaatgtga

SEQ ID NO: 91509 - DNA, 901 bp, Homo Sapiens
cgcgcgaggtgaccggagtcacagttcccgcaggcggcgacagcagagcgcccactgcctccagcagattaatattaagattggaagtttgtgtcttttgctggatattggaaattgaatgtaatggcaacagaatttataaagagttgctgtggaggatgtttctatggtgaaacagaaaaacacaacttttctgtggaaagagattttaaagcagcagtcccaaatagtcaaaatgctactatctctgtacctccattgacttctgtttctgtaaagcctcagcttggctgtactgaggattatttgctttccaaattaccatctgatggcaaagaagtaccatttgtggtgcccaagtttaagttatcttacattcaacccaggacacaagaaactccttcacatctggaagaacttgaaggatctgccagagcatcttttggagatcgaaaggtagaactttccagttcatcccagcacggacctagctatgatgtgtataacccattctatatgtatcagcacatttcacctgatttgagtcgacgctttcctccccgttcagaagtgacgagactgtatggatcggtttgtgatttaaggacgaacaaacttcccggttcccctgggctaagcaaatctatgtttgatcttacaaactcatctcagcgattcatccagagacatgattcattgtcccagtgtacccagtagttcttcttcaaggaaaaattctcaggggagtaacagaagcctggataccattactctatcaggacgatgaaagggacttttgggagactgaatgtgacactgtttataattcttcagtagaacagatctggatcacagtttaccgtgccgagatttaagttggcctctattatgggacactcga

SEQ ID NO: 91510 - DNA, 826 bp, Homo Sapiens
tcccaacaagattaaaacatgtatcttcagttaatgacatagttgtagattggtgcccaccatcagaatcatttaatcaaaagtactctctcaaattgctgcagcaaaaacttaaagggagatgtgaaaaatcactagaaaatagaattcaagcatcagaatttaaaaaggaacaaggccatcatccccaaggaaaaacatcgggtagtacagctataattaattgtcaaatgtgtgcttaagcatgcaaacataaccacccaaacgaatttaaaaacacaaaaactactgggtaagatggacaagtaaattgaaatggtgctgcagccttattgatcttaattgcaagcctgttcggtgatttcaaagtacactgccccagtgccctagagaccaggaaaccagtatgacaactctgctcagaaaccaagagtgcacctcagtgtctgtaacaccatttatgcctacaggaacactttggaagtgacagctgtagggggatcacgctctctctgatgtactgagaaaacaagtaaaatacttactcggaacgatggaacattcaaagacaacttagctgctttaatggaaaagtgacatgctgggaatatatttgctgtgaacagctgatactgatcatcttcaccacagcgacgagtacaaatctatttcaacacagccacacccaataggaggcaattcgatattctcaggcaccacttcaagcaattaagctcatttaaagtgcacatctgatattttctttcatattcagacccggccgtaatggccgaattcccgggcatatgtccggtaccgtcgactg

SEQ ID NO: 91511 - DNA, 490 bp, Homo Sapiens
aaatatagctgtgcttggaaaagtaacagctaaaatgtggtacatttttaaggatcagcaattgtttcatatggatacattattattaacatccacagtttacattagggttcactctttgtgctgtacattgttgagttttgacaaatgcataatttaaccaccattatatagtgtcacacagaagaatttaactgccctgaaaaccccatgtgttctagctgttcatcccttctctctcctctggacccctggacttttgactgtcactatagtttcagccttttccaaaatgtcatggtagttgggaatcacacaatatgcagccttttcaaactggcttctttcacacagcagatgcatgtagggttcctccgtgtgttttcctagattcattactcatttctttttaatcactgtataatatttcattatatgaatgtaccttttttaaaaatccatttacctactgaaagacatcttggttgct

SEQ ID NO: 91512 - DNA, 489 bp, Homo Sapiens
tggtttttattccacagtaaatcaagctacagcctattctacctatctttaggcagtgtcttttatgaaatttttttcagaataactctatgaacaaaagagcccaggttgttagcaccattaaaatgtgtgtactacataaaaacaactagacattttccatggctctacatgacacattttcaagtttgtggtataagcatttacaattcacaccatatgtggtgttcaccttttatcttgtgtcctgctcaccaatgacattttacttacacgtacttgttcagtaataaatctgtacccaggaaagacaacataagtatgaaatctatacactgaagttagccaaaagtgagcatgtgttttctgctttaatttactttaatgcaaaaacagaaatgactatttcttaaagtgtatattttaggagaagatgtttcaaatgaaaaagagcaccacaattgcatcaatatgagaaatagtgaatat

SEQ ID NO: 91513 - DNA, 510 bp, Homo Sapiens
cgttcccatttaacgatgaggaaactgaggattgcccagaccacgctgccagtagaggggcagagctggggttccaaccccagtctatgtcccggcagaagctgccacaggaggggaaaggcgctcactctccgttgaggaccccaacaaactgcaggctcttgggtccggagctgggttgggcaccaggtgtgccgtctctcttcttcatgatggatttgaggatgcccgcgggcgccacggccctgtctccgtccatggatccgggcgagctctcctgagtcaaggagggcgcctctgccggggactcggtctgcgcggccttttcggcacagctccacggggtctgggtggtggcctcgcgtagctgggcccgggcccccgccgctgcctcctccgcagcctcgcgggcttcctccagctcccgcaaccggccccgcagaagctcactcaccccgcgctggtgctccaggctggcgtgcagcagctactagtcgcctcggcggccgc

SEQ ID NO: 91514 - DNA, 594 bp, Homo Sapiens
ccgctgcagcgctacgcacgcatccatcagacgcgggctcagctcgcacctcccctgtgccacatgctgaggctctgcatccgcatcgggctcagggtccggtatgtctccgccgctgggagggccaggggtgcccgagtcggatccaccgccgctgtcatccccggagcccgaggagctacccgggggctcggcgccaccgttctcgctgtcgctggcgtcctcgctggaggagctctcgtactctccgttgaggaccccaacaaactgcaggctcttgggtccggagctgggttgggcaccaggtgtgccgtctctcttcttcatgatggatttgaggatgcccgcgggcgccacggccctgtctccgtccatggatccgggcgagctctcctgagtcaaggagggcgcctctgccggggactcggtctgcgcggccttttcggcacagctccacggggtctgggtggtggcctcgcgtagctgggcccgggcccccgccgctgcctcctccgcagcctcgcgggcttcctccagctcccgcaaccggccccgcagaagctcactcaccccgcgctggtgctccaggatggc

SEQ ID NO: 91515 - DNA, 584 bp, Homo Sapiens
gagtaaactgcaaaaaatattagtaataagaggagagaatttccctaatgctgtttttattatgtcttttgattgtttggaaaactgaatctcccctctgtcaaagagtaaaatttttgctttttgaaatttttgaattatcagtttggctaaatgaataactattatcttacagtgacctgtaatcttattttgatcaagtgttttaaacctttgatatttgacaaactttccaaaatcaaatgtaaaattctaacttaaatgttttcgacctcaagctaacttttgggcattaaagcccttggaagtccaaatagggcccctggaagtccaaaagaaacatattaggctaatttggtatattaaaatcatacaggaagctgatcaaataaaaaatgttgtttaattttctttgagttgtatttgtataaatctgttattaatatgcatcccaaaattgtatcatattgctaaaatgttgatagatcttgttatatgttattggtaataattgttatcctgttaaattattgtataccacagaaataatgaaatttctttgtcaattgccccagtaaaaaaaa

SEQ ID NO: 91516 - DNA, 431 bp, Homo Sapiens
taaagagtcagtgatgataaattcggaattagagaagtaataacctccccaaaagcacctttactgggtcaccatcccttttgatcaaaagggtgtcatcagtacagaacttaaagattatgtcatttaatttacagtgctttggctaattttatttaacttaattaatttaacatcttgaattaggttggttacattttgactgtttttacagtcaaggaaacttgtagaaacacagcaaagctagtgaccttcacactttcacgcatgaacataaatgagctcataagatcatcgtctctttttgttgcgtttcaaaggcgtttacctatcttggagtaagatctaacatttctgaccttgataggataatcatagataacatacttttaaatgaatttacagagaaaaataacccttatttgtcctaa

SEQ ID NO: 91517 - DNA, 540 bp, Homo Sapiens
gcggccgccactaccgaggcggcggaagccgaatccgcggccatcgtggcgagcggcagtccgaagggcggtgctgggaacatcatgtagggcgcgtgcgcggccaggtgcggatgcaggtggtggtgcgcgtgcgccacagcgctgtccagctgcagctgcgcctgaacctgctgaaatggcatccttaaagcacctacgttgacataaggtgcgactctacaagcttcaaactggctggcggcccctatgagaacacctttatggagttgattttcttgttttctacatttagctcttcgattttgaaaccaaacctgcactcgggcctccgacaggcccagtcgctggctcagttcctctcgcatgaaggcgtcgggatagtgggtctcgtcaaaaagcctctccagctcattgagttgttccagggtgaaattggtccgacttcgcctctgcttgattttggtctggccttcgtcctccatccctttcgcatcctctgtgcgatctttcagctccggggacactttatcctctgcg

SEQ ID NO: 91518 - DNA, 476 bp, Homo Sapiens
ttcttgaaatatcttccttcactgaaagctgcagcagctttttgcctggcaaactaatactgtgaacaagcacttttggccagaaaccccttgctgcatttacaggggtattcattaagtgaaattgtgccttgcctgagtgagcttcataaagcgtaccttgatataccccatcgacctcagcaagcaattagggagaagtacaaggcttcaaagtacctgtgtgtgtccctcatggagccacctgcagttcttcttctacaataagtttctgaatggaagcacttccagaacttcacctccatatcagaagtgccaataatcgtcataggcttctgcacgttggatcaactaatgttgtttacaatatagatgacattttaaaaatgtaaatgaatttagtttcccttagactttagtagtttgtaatatagtccaacattttttaaacaataaactgcttgtcttatgaaaaa

SEQ ID NO: 91519 - DNA, 420 bp, Homo Sapiens
ataaatgagaagatttttttctctttcccatgtaagtccagtacaggtgatccagacctgatatggcgctccacagggtgaggaatcctggcccctcaaatgtgttactctggctatgtattgcctccatttccaaggtcattattgattcaaaaatggttgcttcaaactcagtaattacattcacaatccagccagcaacaaggaagaaagagcaaaaacaaggcgtactccttatccttgacattgcacgtgccactttgcccacagctcagaagaacataaaagaagacctgaacaaaggagagatatagtatatttattgatagaatttcttagcattgtaaaattgtcacttgtctccaacataatctagtaaactcacattccaataaaataaaattaaggtcaattctaaaa

SEQ ID NO: 91520 - DNA, 464 bp, Homo Sapiens
  misc_feature (126)..(128): n is a, c, g, or t
  misc_feature (149)..(149): n is a, c, g, or t
  misc_feature (162)..(162): n is a, c, g, or t
  misc_feature (278)..(278): n is a, c, g, or t
aaggattcattgccctgggaggttttgcctggcattctgcagaagcattgctgtatcttaccagacaggaatacagggcctctgaagagcaccggcagcttccttctaagcagaggagaaaatctnnnctgccatctcgtgctcgcctnacctcggactcgnccagacgccctggagcagaggaggagcagtggtcggcagcggccagccgtgcaggtgccacacctgatggtccacctgggagaaccaggcaggaagccggaaagagtcgcagtgcnacgctctgcggggagccggaagatacagacagcccaactaaatccttgaaatgcagcgtggcgtgaaaatggagcggcattttagttaacgagggtctggatgccattcacaggaatgcagtttctacagggttctgctttgcagagacctctcctgataataataataaatctactcagaacaaa

SEQ ID NO: 91521 - DNA, 454 bp, Homo Sapiens
  misc_feature (234)..(234): n is a, c, g, or t
tttgggtaacacttagcacatattaaggacaaaaaagtcatagacctcgtagaattatagtttttagcatagcaatgattttgtagctcagaggaggtggctcttcattccattgcctgctatgagttttgtctcacattgctgggcacctctagcagatatatggtatgtgcagtgcttaaaacattgcccagaaaaacatataaaattgaggatataaataatttcaccttnccccgtgcccccactttcctcttgcctcttgctgataagaaaaagattaactggattaattggcatgtgtcatccaagaatctcagtaagtctagaaacatgaagtctccaggctcagttatgagtggagctggttccatcttcatttcctgaggcccaggaaggtagggggcatggtcaaggtcacagccctaattagaaactgccacctagactcata

SEQ ID NO: 91522 - DNA, 467 bp, Homo Sapiens
cagaatctgaaactttctgaggagagcatttgagcttcagatttctaacagcctctttgcaacaaaatagaccagtagctgaaggcaactgcaatccttcatgatgtttcccttggccagaaatgcactaagcagtctcaagattcaaagcattctgcaaagcatggcaagacatagccatgtaaaacactcaccagattttcatgataaatatggtaatgctgtgctagccagtggaactgctttctgtgttgctacatgggtgtttacagccactcagattggaatagaatggaacctatcccctgttggcagagttaccccaaaagagtggaaacatcagtaaccatcacagttgctgtaatgacagaattgtttaaaaaaccaacttgtcatgtaagcactctactgcttattaaaatatagcacaattgaaaaaataaaatgtgttttaaatctttaaaaaa

SEQ ID NO: 91523 - DNA, 670 bp, Homo Sapiens
agacagtgccccgggcaggaaaatgaaggcacggagaggttaaatataataacttgctagtggtcaatcagtaggcagtagaggagccagcatataaacccaagctgcccagctgcagaaccacattcttgtcccatatgctatgcctctcaaaaaaggaggccctctccttgggacacaaaggtaataaaaatgcctgccctgagctgtgtctctgtctaggtacacagttcatgagtgaaggagctcctggagtcatgaataatggaagtccagattggtcaagtaacttgtcccagccccagcccatgcatctggtatgtggttggacaggtttctaactcattacgtaacatcaagaacattttaaactgctttgagacatttgtgaattaagatctcaataaatagtcctccctggcaccagctccatccacattaaatgagacttgaaaatttctttgaatggatattagtttagaaggagctaagttattagttggcctcacattcctcagttgggccctgggcccagcatgccacttctcctggttattatggttcacatctgaggtaacccatcgggaaactggatgggacaacaaactaaaaatgttttagtttggacctgtcccacaccaagagaataaaaacaaaatggatagtcaaa

SEQ ID NO: 91524 - DNA, 680 bp, Homo Sapiens
tgctgctgctgctgctgccccggacccgggcggacgagcacgaacacacgtatcaagataaagaggaagttgtcttatggatgaatactgttgggccctaccataatcgtcaagaaacatataagtacttttcacttccattctgtgtggggtcaaaaaaaagtatcagtcattaccatgaaactctgggagaagcacttcaaggggttgaattggaatttagtggtctggatattaaatttaaagatgatgtgatgccagccacttactgtgaaattgatttagataaagaaaagagagatgcatttgtatatgccataaaaaatcattactggtaccagatgtacatagatgatttaccaatatggggtattgttggtgaggctgatgaaaatggagaagattactatctttggacctataaaaaacttgaaataggttttaatggaaatcgaattgttgatgttaatctaactagtgaaggaaaggtgaaactggttccaaatactaaaatccagatgtcatattcagtaaaatggaaaaagtcagatgtgaaatgtgaagatcgatttgacaaatatcttgatccgtcctttcttcaacatcggattcattgggggtcaatgtgcaactccttcatgaaggtgatcttctgggggggctgagttgcaatgatttta

SEQ ID NO: 91525 - DNA, 525 bp, Homo Sapiens
atttgtgaccagtaccgcaaggggatcatctcgggctccgtctgccaggacctgtgtgagctgcatatggtggagtggaggacctgcctctcggtgtgccccgggccagcaggtgtacagcgggctctggcgggacaaggatgtaaccatcaagtgtggcattgaggagaccctcgactccaaggcccggtcggatgcggccccccggcgggagctggtactgtttgacaagcccacccggggcacctccatcaaggaattccgggagatgaccctcggcttcctcaaggcgaacctgggagacctgccttccctgccggcgctggttggccaggtcctgctcatggctgacttcaacaaggacaaccgggtgtccctggcggaagccaagtccgtgtgggccctgctgcagcgtaacgagttcctgctgctgctgtccctgcaggagaaggagcacgcctccagactgctgggctactgtggggacctctacctcacagagggcgtgccgcatggcgcctggca

SEQ ID NO: 91526 - DNA, 443 bp, Homo Sapiens
gtgccgtgtgcggcgcagcagctgctggaggtgaagctggagcaggtgttgctgctaccacagccccacgttcctggcaagggcgctgcttcctctcccagcggcagttcaggcccgacctgcggctcctgctgccgcccgcctcttccgagggcgccccctgtaggcccgagttacacccggtgcagccccgggcgctgcacgtcaaggccaagaagtaggagctaggggcttgcctggacgcatcggtgaggcctcggggggccgtggagaccggtcgtagagcctccagggcggtcaagttggaaggcctcgggccggccctcgactacttccgagggaacgagaagggcaagctggaggcggaagaggtcatgagggacgcgatgcacggcggggaaggcaaaagctcggcggccatccgacaaggtgtgatcaaaacg

SEQ ID NO: 91527 - DNA, 415 bp, Homo Sapiens
ccagatctccaggtatgagtctatctcaacaacattgtgtttgtctcatgatggatgctactcagccctgagaccgcaactcaactcaaaggaattgccctgagattttgagactctgtgggagggcacatgatggaacctgttgctgatcagatacctaaaacacaaaacacataaaaaatcatgtagaatgtaccttaaagttctttgagtattcagccatttggagtgacagataaaataccagtaaggaaacaatgtttgtctaccacacagaaaaagagaaacttgaaatttgggctcatcagtggctcagaatctcactcttctaaatatgaagttaacctgaccattgtgaaaagccatagcttggaacacaacaaactctaattaaacagagtctagtaaaattaaa

SEQ ID NO: 91528 - DNA, 504 bp, Homo Sapiens
acggctctgggtggctcttaggaaaagtccgcctgagaactccgtacaggagctcccctgtcctccagcctgggggagtgagtatgtgtagggccggggtacctttccgtggggcaaggctctgccaaaatctgggagtgaggggagtcagggagctggtgcgcatgttcctcatgatgcacccctggtacatcccctcctctcagctggcggccaagctgctccacatctaccaacaatcccggaaggacaactccaattccctgcaggtgaaaacgtgccacctggtcaggtactggatctccgccttcccagcggagtttgacttgaacccggagttggctgagcagatcaaggagctgaaggctctgctagaccaagaagggaaccgacggcacagcagcctaatcgacatagacagcgtgtgcgtggggggagcacagagggctgggggggcactcagtatcccataccatctgtgcttaataaatgtcagtaaaactg

SEQ ID NO: 91529 - DNA, 905 bp, Homo Sapiens
ccgctctgcctctcccgggacatgggttctggtccgagcccggtgggaggctcccggagcgcagcctgggcccagcccaccccgcgccggcggccatggcaggcaccctggacctggacaagggctgcacggtggaggagctgctccgcgggtgcatcgaagccttcgatgactccgggaaggtgcgggacccgcagctggtgcgcatgttcctcatgatgcacccctggtacatcccctcctctcagctggcggccaagctgctccacatctaccaacaatcccggaaggacaactccaattccctgcaggtgaaaacgtgccacctggtcaggtactggatctccgccttcccagcggagtttgacttgaacccggagttggctgagcagatcaaggagctgaaggctctgctagaccaagaagggaaccgacggcacagcagcctaatcgacatagacagcgtccctacctacaagtggaagcggcaggtgactcagcggaaccctgtgggacagaaaaagcgcaagatgtccctgttgtttgaccacctggagcccatggagctggcggagcatctcacctacttggagtatcgctccttctgcaagatcctgtttcaggactatcacagtttcgtgactcatggctgcactgtggacaaacccgtcctggagcggttcatctccctcttcaacagcgtctcacagtgggttgcagctcatgatcctcagcaaacccacagcccccgcagcggggccctggtcatcacacactttgtccaccgtgccggagaagctgctacagctgcagaacttcaacacgctgatggcagtggtcgggggcctgagccaacagttccatctcgcgcctcaggagacccacagcacgttagccctgagacc

SEQ ID NO: 91530 - DNA, 451 bp, Homo Sapiens
  misc_feature (384)..(394): n is a, c, g, or t
cgatgactgcttccctcctccccttggtccctgactcagtgtctgcagtgaccaggcaccaggcagggagcaaggaaccaagcctttcacctgctcccaccaactcctatggtgctccctttccaaggctaggtttcctctccacccagttccttatcacgtaccatgagaagctgtcaccttggcaactgtcaccttctggtgagatttacaattgcactgctacaactgcttgtggcatggtaaagttgcaccaggacctctgctgtccatgagatcaaagttccaggccaaggtgagcacccgcctccatcctagagaggattctgtgagaatcattgagagggagctactctctccaggcaatcacgggggtgagaaagnnnnnnnnnnngagagggagttactcatgcccccacttattcaatgaatgcttatgaagaataaaaaa

SEQ ID NO: 91531 - DNA, 1173 bp, Homo Sapiens
  misc_feature (68)..(102): n is a, c, g, or t
  misc_feature (459)..(489): n is a, c, g, or t
  misc_feature (882)..(890): n is a, c, g, or t
tcatatagggcgccgcgttagcagccgaacgacgagcgcagcgagatcagtgagcgaggaagcggcgnnnnnnnnnnnnnnnnnnnnnnnnnnnnnnnnnnncagtcgacggtaccggacatatgcccgggaattcggccattacggccggggaatagagaggtcaaaaggtgggagggtttagaaatgaattccgaaactcaggaaccaggaatgcataaatgaagagtatactgaagggctgaccaaaaatgtttcactgcctttcctaataaaaagtggttactgatcattttcattgacatttagggtgatgtatgttggtcttttctgataaagagttttgcatttaagacctattttttgtggtcttaaaaataagcttgtatgcttgcacacataaatacacattacacatctaccaagagattgttctgatttacaaaagatagaaaaatnnnnnnnnnnnnnnnnnnnnnnnnnnnnnnnagtcagactttataacaatgtatttacaaaaattatgtaacgtgtactgccatatttacataactgatgaaaggagggtatcattacaagtaactagacagtactgtaaatctactgtaatcctgttttgcagaatactgcacgacggagattgagaagtgagagctcttatgacatagataacattgtgattcccatgtcattagtagccccagctaaattagagaaactccaatataaggaaatacttactccaaggtatgtatacttacatcttcatatttttcttccttccttccctaataaacttaaattttcaaagtgaagaattttaattaatgaaaggagcatccttctcccagttccttcatagccatggaggggaaacggtgnnnnnnnnnttactcgtgccttaagtgttatatagtatcacaactttatttctcagtttttattaagatttaggaattcctagactactttagcattcttagtcttttttattattattatccagtgttatctactatgtatatgacactaaaaggtactttagtgacataaaaactatagcaacaaataatccttgcccttgaagatacaggtgtgacataagttgcaaagagttctacgttttcatggggtattcacactgtaagacagtaatacctgtgaccaaaaaaa

SEQ ID NO: 91532 - DNA, 572 bp, Homo Sapiens
  misc_feature (144)..(144): n is a, c, g, or t
  misc_feature (177)..(177): n is a, c, g, or t
  misc_feature (377)..(377): n is a, c, g, or t
attcgattaatcgattcctaaagatttggctcgaggcaagattgggcaagggaggatgagaagaagaaggctccccagaaacatgggactccccgagtactgaaaacatgaccctgcggctagtcacttatactctcagcagtnaagactcattgaaaaacaaaactagagactggnaagcatggtgcctcgaggaaagaccctgggcatcaaggcagaataaaccttcccagcgtcattcagccgaaaaggaggaagtcttccaagtcttctggcaaagctgtgttcagggacacgctgtcagaatccacgttatcaatgtggggcgcttattcggtattggccatggctcctaccatgatcccagaacccacacnacttacatgcggattccagagactgtccaactgaaaactataacaagatcatctttgcccgcaagcctatgatgaggatgctccctacagttcgctactgaccaacaaggagaaacatgcaaatgttttagccaggggtccctgcagccattccccaagaacgtacaaaagttaagctccatttaccactcaaaa

SEQ ID NO: 91533 - DNA, 488 bp, Homo Sapiens
  misc_feature (126)..(126): n is a, c, g, or t
caggggcctgaactttcaactcctttctggcctcttgtcccactgcttccaccatcaccttccaaatccagggctgcactagggcaaggtgaccaccctacttggtaaagacctgattggcgcagncccattctggtgtgggtgtctttcaccacccagaatgaccaggttggaatgggggtgggtgaagttggagggggtggcaagtacaaggcaagggtgcccaggaaccggcatccagaaatcagccctggagtagacctgcctttcctccatccttaccaagttagcctccctttcagttccgtctgacccctgtgttggtagccccttccttcccttcctgtaccccctccgtctcttctcgtggtagcgggttagtgtttcagtgttcttaactccaatctgcttgttcattgtacaatgtgcttcttttaaggccccatttttgtaacttgagtgtgtcattcatctgaacaacaaacatc

SEQ ID NO: 91534 - DNA, 427 bp, Homo Sapiens
tatggctgaaaacttgacctccaataatcaaattcaacaatgggcaaggaggctcacagggacatttgcaaatggctttattatttgcatttgcaattcttttactaggaaagcagagggacttgagactcttggttggctccctacccaacccaatgtccatatgggcttaaaaatccttccattgtatataacctgcctgttttcctaagatgctgttttacttatgataatgatattttaatcccctcagatacatcctttatgatttctccaccaaaatggtatacagaggaacacccatactgtttccatcttattttaaatgtaaatgcttaaactcttgcagacatctgtttggtctaacctggaagtttccaaaatcagaagacacactaaatataaataaacttagaggcatttaaaa

SEQ ID NO: 91535 - DNA, 476 bp, Homo Sapiens
  misc_feature (59)..(59): n is a, c, g, or t
  misc_feature (63)..(63): n is a, c, g, or t
  misc_feature (97)..(97): n is a, c, g, or t
  misc_feature (116)..(116): n is a, c, g, or t
  misc_feature (127)..(127): n is a, c, g, or t
tccaggacagaatttggaaaatatgccatttactgccagcgttggtagaaagaacgcanacanaatggtacagagaagcaagaccctcaaggagganattctttcaactcttctcngaaacccttantcaccattctttgccctttagtatacctgtgcacttcatgaatgggatataccaggtagttggttttgacgcatctaccacagtggaagaatttttgaatactttgaaccaggacacaggaatgaggaaaccagcgcagtctggatttgcgttgttcactgacgatccttctggcagagatttagagcattgtcttcaaggaaacatcaaggtgaaaccaagtccttttcaggagccaagcccaacgaacagcaaagaagctactctttacaagaagagtaaactttgcaagaagtttaattcaggagttttccaaaactttaaccaatctaatctccacgataagaaa

SEQ ID NO: 91536 - DNA, 437 bp, Homo Sapiens
ctagaatccagctggaggactgggttacatccacttcccagtaatgcctgccagaggagaaggcctgagctccccatgctgcaaagttctctgctctctgggactccccgggtgcaccatcatggtcatctccaaataccacatttctcacatcctcagaaaggctcatatagtgactcgtcttttccttactcagaggatcatccactgcaagaagaacaaaaatcagatcaaggagttacgtgggggtcagatgttatctgcccaggtactggctttatttgtacctcctgtaagtgacagacagaatacatggagcaaaaagactttggagactgtcatctatgaagatcaagggttattatgacttctacagcacaggagaatccttaaaatcacacagaaaaacaaataaacaaacatatcattaataaaaa

SEQ ID NO: 91537 - DNA, 397 bp, Homo Sapiens
actacgctttgcaacctaccttggtaccctcaacccttctacccccaccttccctctgcagtgcaaggcttgaaaaacaggccatcccaccaatcagcaggcctccccgggaaactcgctccgcccctcagccgcattgggccgaggcgcgctcccccgcggcccgccggggcccagccactgagcatgcccagcgcctcgactgctgagtgcccagccagcatcctgcagtgcctgggagcctgagggcccaggagggtcccggcgtagtaaaggggcggcaaccccaaacgggccaggcatcaaaatgagacagcattaaaccgagtgacatctctgtgggtccttagtgccaggcgagcaagcagggacaaactgcttgtttataggtcggctt

SEQ ID NO: 91538 - DNA, 500 bp, Homo Sapiens
ccatggatgcatgcaatgaaagcttttgctgagccgaatacgctgttagcacgaccgtctccccactgacgtgtcgcaccagacaaacaccagacgtcaaggacattgggaaagcaccaacatattcagccaggcagtgtggggatgcacccccagtcccgagatgaaaacctccagccagcccagcgcttcccagcagggagcacagaacaccatgaagcctcaagatgttgctttcctaaaacagaccagcgtggttcatggatttggggctctaagtgccccccatttcccttctcctagacctcgtccccagcatcgcgacgctattggggctggagcacccagctgggaggttaaactttcctaacctgggctcaaccttggtttcgtctctcagtcttaattttgcttcagcctggtctgtcttgctggtttatgctgtcatctaacacagggccagcaatgaagatgcttagtaaaagctgttgaaaggaaaa

SEQ ID NO: 91539 - DNA, 525 bp, Homo Sapiens
tgcggccgcccacgcgagcccagccttcaggggagagagcagcgcgtccaatgcactgaggacaaaccccaacccgcccgaggccctgggctcctctaagcctcactggagatctccaccgaggtcccgcgtgctccctgaggaaagggggctttcgcaactggtgggcaaccccgccgggcttcaccgtgggctagcagccggggtgtccgcactgttgtcgctctgccttcattcttggaattggggcgcacttggcccctgtttgggcagtgctgggggtgaggggactaaactacagcacttttcagaaacatgggggacatttacacaagagagggctccccaagccagcttgcactcacaaaatatagcatttcttaaggaaccaatggagcaggaaagagagggagtgggatagggcgaaaccccaaagccacttggtttttccaacacgtaaacgagcaaatacagagtcccccaaatacctcagagaccaaccacacagtcacttctatctaaaaa

SEQ ID NO: 91540 - DNA, 1023 bp, Homo Sapiens
  misc_feature (92)..(92): n is a, c, g, or t
  misc_feature (629)..(645): n is a, c, g, or t
ggcatgggagcggacagaacgcggggactgcactggtcagagaaggcacgtggcgccccagggccctgctgtgagtccagcagcttcttctntgccggacagagaagtattgaaagaagccagaaaagtttaagtccagtgtttgacagacatcaaaaacctgtttttccccaacacagaacccttttatgctgcttttggaaaccgcaccagctgatgtgtattcatacaagcaagtaaggagtgtctttgaatagaatatttaccgtcaaccctaaaggagagctggtacaggaacatgcaaagaccaacatctcttcgtatgtgagactctgtgaagtagtcgaccacgttttcccgttgctgaaaagaagccattcttcagactttccctgttcggataccttcagtaacttcaccttttggagagagccactgccaccttttgaaaaccaggacattcattctgcctcagcgtaaaatgtcccaagcagcctcttgccagcagtgcagagcctggttgtcacccattaaaggataggtctccccggagtgcacagctccacctggggagcctggcgcgtcatcattggcctgacagcaagagagaattgaagaagcattttctnnnnnnnnnnnnnnnnnggggcctgaccttttcctaagccaggaataggaagggggagccactttttctagggcctagggagtttggggttgccaatttggttacccgggggaaaaagccattcccctccaagttgtggggccttaaatggccaaggtttaacgaacgccctccccttttcccggggcttggcctccaaggcaaagtaagcttacctgggcgtctcacgttggccgctttttggggggctggtggaaaaacccttacgggcaccaaaagggggcggctttgtctttgaaagggggtttggttctcccccgctctctttagggaacgaggggcctcccaatcttgcggagggggaaattggcgcaccaaaatggtgggctcacccc

SEQ ID NO: 91541 - DNA, 606 bp, Homo Sapiens
gcggccgcacgtgccgttgacctggagccctgggtcccgggctgccctcggaggggagctcccgggggtgtccctcggcgagggctcccgggagccactctggggcgaggccctcgtggtggcagtggcggaggcctggtccctggggtcgggcgttgcgcatggaggcccatcgtcggcgccctcgggcggcccgcacccgtccgtggccccgtccgtggccttgcgctgcagggagatctgcacggaggagctgcacgtggggcgggcgtcgatgctggtcaagagctgcgggatgaacatggacgagctccgcttaagcgcacccacgcctccctgcaggcctccgccgccgtcctcccctccgttctgggcgaaggggtgcgggctgcttctccgcggtagggtgtggaatgccatgaagaagtcgtcttctctctcctggtctaggatgtctgattcgggggctgtgttgctgcgaccagagccaaaatgaaaccgaagccgatgggccatggtgaccaggggggccaggagggctagggcaagcggcaacaacaggcccgacactgccagaagtcacaaaccaaagacacaaattccaag

SEQ ID NO: 91542 - DNA, 459 bp, Homo Sapiens
tttccagttacctcccccacaggcgcacacgctggctgcttgcgttggcagcgacacacatccatggtacggctggttttcactcggattgattatgggaagggctatggattagagctcctgtaaagcaccaggaggaatcccttgatttttcagaacagctgatttccaccaggaaagagattcactgaaatgtagttaaatagcgtgagtgctttaaagaaaccagaaaccacaagctgtaatgtttggaatgaaaattggtttcatctcatctgttctagaaatcctaaattttaaaatgctaaaaagtcagcgatagtttcctcggaagattccagcatgtgtgtcacaaagaaaaacactacttcatacttctacttgtgataaacgaagctgaattgtgatttcagatgatttatacatgtgcccagagcactttgcttatttaaaagaaaa

SEQ ID NO: 91543 - DNA, 548 bp, Homo Sapiens
gcggccgctccgacccggcctctggcgctggctctccgcccgctgggcatccgctccccgcgcggcacgtgcggcggcccctgcgcgcctggctcagccctggcgccgctccattccgccaggcgcgggcgggcaggagctctggaaaaaattattctaagagacaaattaaaagaataatttgtaataaggagacgtcaacattccatctcagaaaaaaactgaaaacatgtaatacatacaaagtcctgagaagaaacctcgaagcacaggaagggtctcatgtatagtagcatgttgagaaaactgaagagccctgtaatcctgaggagggggcctaatccaaggagagagaggctccgggtcctgtggacacacacgggttgcctgcttcaccccatctaggagctgcttcctgaagccttcaggaggcaggaggctgaatttgtttctcaggacaatctaatcacatccggacagggagaaaaacattcatgacctaggacagataaaatatgtataattaaaatttcattgaaaattgaaaa

SEQ ID NO: 91544 - DNA, 434 bp, Homo Sapiens
gcggccgctccgacccggcctctggcgctggctctccgcccgctgggcatccgctccccgcgcggcacgtgcggcggcccctgcgcgcctggctcagccctggcgccgctccattccgccaggcgcgggcgggcaggagctctggaaaaaattattctaagagacaaattaaaagaataatctgtaataaggagacgtcaacattccatctcagaaaaaaactgaaaacatgtaatacatacaaagtcctgagaagaaacctcgaagcacaggaagggtctcatgtatagtaggttgtaatatgtttattgttaaaattattacctttggtgttgttttgaaaaattgaagaaaaatataatgaaataaagtgttcttgtgcttctctggtataacagcatgttgagaaaactgaagagccctgtaatcctgag

SEQ ID NO: 91545 - DNA, 483 bp, Homo Sapiens
  misc_feature (213)..(253): n is a, c, g, or t
attaaaattactaccaccaaccaccttcccacccacaacacaaggtctctaagcactcactctccacacaccccctccacggcgggtggacgcagcaggtgcggttggggcacatgtatcccgaataaccaagggcatcctactctcacacccaccacccctagtcaccattgtcaccaccctaacccatcacacacaacctcttttatatannnnnnnnnnnnnnnnnnnnnnnnnnnnnnnnnnnnnnnnntccacccacctccccccatggcccgctgcacgcctctgggccccctggcacagccaacccccccagtgcaaaccccaaggccaagccaagccggatcagcaccgtggtctgatgaatggagagagtgagctggggaacaggaaagtctggggagccacaggagagggaccttgcaccctctttgcttcctcggttttttcaaaaatatatatacacataacaatgtcaaa

SEQ ID NO: 91546 - DNA, 522 bp, Homo Sapiens
cggcgtcccctcctctaccccaccccgaccccgggcgagggtggtcggcccctcctacctgcaaacaccgcggagcagtaggcatcgctgatgtcggtgtcgggtgtgtggacgttctcggcatagaggatgaagaccctcagcatgcttggcgcgtgtagggccccgtgcgcccagggcgcaaagagggctcggaaaggtcgggagggccgaggcgccgcttgtgggtcccctcgctggagagggctggctgggcgaggccggctcgaatctctggctcctggcttagagcagttgctcttaaaggggaacgggccacccccggctgctccagtgggctaggctgggtccccgccccggctgcgctcaccccgcttgtcagccggcgttccgagaacaggggcttctgctcatcttccacccccgccgcccttcccgagctccgtcgagctgtaatctaatgctccggctgcggagtctcccaatgacacggcattttgcacctggctgggcggcggccgc

SEQ ID NO: 91547 - DNA, 572 bp, Homo Sapiens
  misc_feature (462)..(479): n is a, c, g, or t
gaactgggaacaggggtcctggggtgtgggatgcggcccctggggtgggggtgccggactgtgtggttcttgttcttagcaaagtagtagggcagccacgtttttcactaggtcctcgtagcccgaggacctaataagacacaatagaaatgggctgatgtcaaggggatagtgtttggaggtgggtaggggctttgcttgcccgtattgggtagaacagggacatctttttctttgggccgaatgattggaattgtttccgtagtcgctggagccccagcggaaatgatcagagaggacgatattattcgtaaatttaggcgaaagggtcacatttcaccccaatctggatgtgtgcttgccgtaatcgattggttgcagctattaactctgggactgggtggtttgaggcgaggctacagcacctccttcagttcagacacggctgattttagtatagtnnnnnnnnnnnnnnnnnnatggatgtcactagggcgagatctaggcctgtcattaatcacccacaagaacgccactttggctgagtcaagacctgtttccctagcagggtc

SEQ ID NO: 91548 - DNA, 493 bp, Homo Sapiens
tttaaaaagtgaaacaccaatagtttaattgaaatttcagaaaattgaacatatgaacaaggcaaataaatactaagtaagttaaaaacacaaaatatgtccaggaagtatcgatgagaatgttcaagttaaagttctccaatgccattgctacagcaacctcaaaccctaggttctctctgcactattaacacagacatctcaggacatggtttgcttttttttaagacttaaataggaaactaatttttctttctttaaagcaattgcgttcttcagtgaactctttctttaggccagttgatggcttcttagcagtttattgacgagatcctagggtagcttccgaagctgggttgattgattgcatttgggtgcggatggccaaagtgagtggccctactgcctgtgctgctcagggctcctgggctgatgtggtggcttcttccctttgtgctgctgaacatagggaaagtgaggttcacagtccacc

SEQ ID NO: 91549 - DNA, 670 bp, Homo Sapiens
  misc_feature (532)..(532): n is a, c, g, or t
  misc_feature (538)..(538): n is a, c, g, or t
gtctctaggcgatgatcgccagcggcaccaggaaggccagcaggaacttgctgacggccagggccgcctggcgcgagttgcacgtggcatcgcggtcaggccccgggttcaggagcagcacattgtagtagcacataatgcgcccgtccagccgcgagatggtgtcccggaacacgaaatagggcaccgtgttgagcaccgctagtgcccaaagcaccaggcagactttgtgcgccgcggccacggtgcggtggttctgcgcccacaccggccgcaccacctgcaggcagcggtccaggctgatggcgctgagcaggaagccgctggcgaacatgttgagaaagaagatggaggagtgcagtttgcagaaggtggtgcccagctcccacgagtggcccacggccaagaagtaggtgaagaagggcagggaagcagaggccaacaggtcggacagcgccaggtgcagcacccaggtggtgaccacggtctggcgcatgcggcagcccaccacgaagaggatgactccattctncaccangcccagcagcgaggccagcccgtgcagcagcacggccgcgtggtcgatgtagcggatgctgggtgtgctgtagctctggagaccgctcatctggctcaagattgggcagaatggcttcagtgttgacgtggg

SEQ ID NO: 91550 - DNA, 792 bp, Homo Sapiens
  misc_feature (58)..(69): n is a, c, g, or t
  misc_feature (92)..(105): n is a, c, g, or t
tttaggtaagatacacatctttactgtgtatatgcgtgtacaagaaggaaaacttgcnnnnnnnnnnnnaagtagatgttacgaaggatggnnnnnnnnnnnnnncaacttgcaaaatctcttgaaggttggagcaaagccgccggttacctttgagcatcgaaataccgcaagttatcccgtttccttttcccctcaggaaagatgggtgcagggttgagatgttacaagagaattaaaagagagccaccagcttggcatagtagaagaaacaaacccaaaatgaaaacacccggattttaagcgcggatcctgcgaggccggtttgcactggccgaacgcctgcgttaaccctttgggcgccgcagctgggatccccggtgtttgcggacccgaccggcaggaacagagatggagtgtcccgcgcccgcatggggagtgagctctcttccccaaagagggagcgagccgagaagcactttttcctccggtgcgtgcgtcacggcccgggacaggcgtcgagtccggtttggagtgggggcagagaccgcggcgaggagccgctcaaatgtccgctgactgggggttcgccttaatctgtcctcaccaggagcgctcgccctcgccctcccgctggctcgctcctgggccctggaggggcatgggcccgggggcggttcgggaggggccccaggtgaagggcgcccgcacttctcctgcggcaatcatcgatctcctgcctccacacgtcgcggcagcggcccggccccgcgccgaaacagcagctgtccc

SEQ ID NO: 91551 - DNA, 1953 bp, Homo Sapiens
  misc_feature (1159)..(1159): n is a, c, g, or t
caaaccctaggctaggtacgaggcctgggtgttaaatcggcacgaggctcgtgccagcgggctcttggtacctcagcgcgagcgccaggcgtccggccgccgtggctatgttcgtgtccgatttccgcaaagagttctacgaggtggtccagagccagagggtccttctcttcgtggcctcggacgtggatgctctgtgtgcgtgcaagatccttcaggccttgttccagtgtgaccacgtgcaatatacgctggttccagtttctgggtggcaagaacttgaaactgcatttcttgagcataaagaacagtttcattattttattctcataaactgtggagctaatgtagacctattggatattcttcaacctgatgaagacactatattctttgtgtgtgacacccataggccagtcaatgtcgtcaatgtatacaacgatacccagatcaaattactcattaaacaagatgatgaccttgaagttcccgcctatgaagacatcttcagggatgaagaggaggatgaagagcattcaggaaatgacagtgatgggtcagagccttctgagaagcgcacacggttagaagaggagatagtggagcaaaccatgcggaggaggcagcggcgagagtgggaggcccggagaagagacatcctctttgactacgagcagtatgaatatcatgggacatcgtcagccatggtgatgtttgagctggcttggatgctgtccaaggacctgaatgacatgctgtggtgggccatcgttggactaacagaccagtgggtgcaagacaagatcactcaaatgaaatacgtgactgatgttggtgtcctgcagcgccacgtttcccgccacaaccaccggaacgaggatgaggagaacacactctccgtggactgcacacggatctcctttgagtatgacctccgcctggtgctctaccagcactggtccctccatgacagcctgtgcaacaccagctataccgcagccaggttcaagctgtggtctgtgcatggacagaagcggctccaggagttccttgcagacatgggtcttcccctgaagcaggtgaagcagaagttccaggccatggacatctccttgaaggagaatttgcgggaaatgattgaagagtctgcaaataaatnttgggatgaaggacatgcgcgtgcagactttcagcattcattttgggttcaagcacaagtttctggccagcgacgtggtctttgccaccatgtctttgatggagagcccccgagaagggatggctcagggacagatcacttcatccaggctctggacagcctctccaggagtaacctggacaagctgtaccatggcctggaactcgccaagaagcagctgcgagccacccagcagaccattgccagctgcctttgcaccaacctcgtcatctcccaggggcctttcctgtactgctctctcatggagggcactccagatgtcatgctgttctctaggccggcatccctaagcctgctcagcaaacacctgctcaagtcctttgtgtgttcgacaaagaaccggcgctgcaaactgctgcccctggtgatggctgcccccctgagcatggagcatggcacagtgaccgtggtgggcatccccccagagaccgacagctcggacaggaagaacttttttgggagggcgtttgagaaggcagcggaaagcaccagctcccggatgctgcacaaccattttgacctctcagtaattgagctgaaagctgaggatcggagcaagtttctggacgcacttatttccctcctgtcctaggaatttgattcttccagaatgaccttcttatttatgtaactggctttcatttagattgtaagttatggacatgatttgagatgtagaagccattttttattaaataaaatgcttattttagggctccaaaacacacacaaac

SEQ ID NO: 91552 - DNA, 535 bp, Homo Sapiens
tgttatcccccaaaaggacacatacaaagctcagttcttgagctgtgcttatgcaatactatagtgatcagtaagctgaatgtatttgcttcacttctaactttttttaaaagtgatcttgaggaatgctttgttgatcttgaattaataattcaaaaagggggtgggggaagatggggtctttctaagaaatgcagaatatttcagttttgaatattaaatctcttacaactacaaaccccttcatagtctccatccattcagaaaaacaaagccaaaggagaatttcttgtggaaaaaaactaaggaagttccccacataaccagccgaagaggaaaggctttccctgtcctctctcaagaggaagccacagcagccgtttgtcatgttactgctaccctggcttttaaaaagtgacagggagcaggactttagattaggactttggtggatactctgtatagttgagtataaaatccctacaatgagttagacttagtttcctaaataaataaacgtgtctacataaaaaaa

SEQ ID NO: 91553 - DNA, 583 bp, Homo Sapiens
tgcggccgccctgaacggggagcaggcggccctgctccggagaaagagcgtcaacaccaccgagtgcgtcccggtgcccagctccgagcacgtcgccgagatcgtcggccgccagggttgtaaaattaaagcactgagagccaagacaaacacgtatatcaagactcctgttcgtggtgaagagcccatttttgttgtcactggaaggaaagaagatgttgccatggccaaaagagagatcctctcagctgcagagcacttctccatgattcgtgcatctcgaaacaaaaatgggcctgccctgggaggattatcatgtagtcctaatctgcccggtcaaaccaccgtccaagtcagggtcccttatcgtgtggtaggattagtggttggacccaaaggagcaactattaaaagaattcagcagcagacccacacctacatagtaactccgagcagagataaggaacctgtctttgaagtgacagggatgcctgaaaatgttgaccgagcacgggaagaaatagaaatgcatattgccatgcgtacaggaaactatatagagctcaatgaagagaatgatttt

SEQ ID NO: 91554 - DNA, 526 bp, Homo Sapiens
  misc_feature (34)..(34): n is a, c, g, or t
caggtcattcacaattgccattgtaacatcacanacatgttgtgttgtccacccacatggtttcctccacctctgatgagactgtgagagatgcctcggagaatatcattggtaagcaactctcacccacttttggagagtttgacttgttctttgactggtcaccacttagaaagaaattgctatatatcttagacgtttacgctgatatctctgtggatatgtatacaggtatattttcagggggaagggaatgagaggggaaatttgagaaagaaagtaagaaatcaagtagttgtcttgatttagactttcccgaattttgtggtttttcttagaaacacatggtctagcgcagaggtttttctcatgagttgaccgatttaaagattaatcaacaagcttcagaattgccaaaaaactacctaaaatagtataaaaatttttagtatgagaatagtttttcacatatgtgaatttttctggatacaaggttcatagactgcacaggtgttcctgattcaaa

SEQ ID NO: 91555 - DNA, 498 bp, Homo Sapiens
ttttttacttgtgtgtatttcaacacgtttgatttattggttaagtgaagtcaccgatgatcaaatatccttgatgggaatccccagccctccccattgccatctgcatttagagaatcccaggaatccatgtgggtagaggaaggcgggcaaagaataagagacttttaggtctgagttggtccattagggaattagatgtgtttgtgctcattttaagcagaagaaatacactgctagaggaagaagagaatcccagctcgaatcctgcccactggagtccatggcacaacttccagatggtgatattcagattcttttgatatttctccagctgttgaaaacccaagggagactggcctttggcggatggattaagcgccgctcattcagttccattttacggaaggacctgcctcagccccgtatgaggctgcggggattccaaagtaaagtcaaggagatggggttcctgcctgcaaggagctttccacctag

SEQ ID NO: 91556 - DNA, 402 bp, Homo Sapiens
tcagcaactcttcatgtgggctcttcccttccccctttcaaaacttgcaattaaccctggtgattcagagcaaactgcgtagagtatgcaagatacagggaaacactgaatcctggggctgacagtttacatcctggctgtttaccaagtccatcttgaaaatcttactgtgattcatgaatataaatattcagtatctttcactgtatctatgcccactattgagcaggtctatattttcagtcctgtttatatgctatttacaatgatcgtcaaacacacttaagcaattcctttttattcctcatgcaatgggaagtaagcaaacattccatgaggttcattttatgaagcaataaaagaaagttagtcatcaaataaaataaaatggtaaacacaaaa

SEQ ID NO: 91557 - DNA, 519 bp, Homo Sapiens
  misc_feature (133)..(133): n is a, c, g, or t
  misc_feature (208)..(275): n is a, c, g, or t
cgcactgatcccacctggcttacaggtgctgtcacacaggtacgccttcttgtgaatcatcagtcaccatttgcccctcgcagcaaccctgtcttggaggaaggtccttgccgacacccgcctctccccaccnttaggctcccttgctccttcattcaaccattgtttacatgtcgttcaggactgctgactaaacactttcaagcannnnnnnnnnnnnnnnnnnnnnnnnnnnnnnnnnnnnnnnnnnnnnnnnnnnnnnnnnnnnnnnnnnngttataccaagtgtccctgcctctcctgcctcccttcccacttcctccatgtcttcctctctgccaccctgaggcagcaagaccagcccctcctcctcagccactcaacatgaagacaacgaggatgaagacttctatgataatccacttccacttagtaaatgctttctcttatgatattcttaatgacattttattttcccaagcttagtttattgtaagaatacagtataaaaaaacatac

SEQ ID NO: 91558 - DNA, 1059 bp, Homo Sapiens
gggtccggaattcccgggatcggacctccttcccggcggcagctaccgagagtgcggagcgaccagcgtgcgctcggaggaaccagagaaactcagcaccccgcgggactgtccgtcgcaaaatccaacatgaaaatcctcgtggccttggcagtctttttttcttgtctccactcagctgtttgcagaagaaataggagccaatgatgatctgaattactggtccgactggtacgacagcgaccagatcaaggaggaactgccggagccctttgagcatcttctgcagagaatcgcccggagacccaagcctcagcagttctttggattaatgggcaaacgggatgctggacatggccagatctctcacaaaagacataaaacacgattcctttggttggactaatgggcaaaagagctttaaattctgtggcttatgaaaggagtgcaatgcagaattatgaaagaagacgttaataaactacctaacattatttattcagcttcatctgtgtcaatgggcaatgacaggtaaattaagacatgcactatgaggaataattatttatttaataacaattgtttggggttgaaaattcaaaaagtgtttatttttcatattgtgccaatatgtactgtaaacatgtgttttaattccaatatgatgactcccttaaaatagaaataagtggttatttctcaacaaagcacagtgttaaatgaaattgtaaaacctgtcaatgatacagtccctaaagaaaaaaaatcattgctttgaaacagttgtgtcagctactgcggaaaaggaaggaaactccctgacagtcttgtgctttttcccatttgttttccagggggaaaaatggtactgaggatttttggaattacactggattttgtatcctctgaaagcatgtttccatggttttggggaccatataaaaaatgtttttttaaaaagtttcaaggggaattcctaaagggccttcattttcatggaaatgaaagggggttgggaataacttaaccttttttaatttaagggaaaaaataattcct

SEQ ID NO: 91559 - DNA, 575 bp, Homo Sapiens
  misc_feature (59)..(59): n is a, c, g, or t
  misc_feature (137)..(177): n is a, c, g, or t
ttaaacagaatggtttcatctgggtaggaggccagagaaggaaggaattcacacggcanatacagtgatataggtaatgctctagttcagcagtgtccagtagatctttttgcaacaatggaaatgttccatatcgnnnnnnnnnnnnnnnnnnnnnnnnnnnnnnnnnnnnnnnnngagcactccagagagtggcttgtgtgactgaggaactgaatttttaattctctttaagtttaagcgggcacatatggctagtaactcatattggatagtgcaattctagttctagtggcaaatagacctatgtttattgttaggcatgaaaatttacacgtatgttaaaatagtcttaggtatatctaaaatgcagcataatcttaaaaagccatttaaaacaaaaagtaagcttcagaactcactttggtaactatagttctgctgcttccgtaggatctcagcatgacccagttagtccccaggccagcacagcaggtgataattaacccttctttacatttagcctcagaaaataccaggcatcagaacaaggatccctgaggagtaagagaaaa

SEQ ID NO: 91560 - DNA, 586 bp, Homo Sapiens
  misc_feature (97)..(97): n is a, c, g, or t
atcacatcaccaaatcctccatgtcaagcactagcagatcagatagcaaataggccttatgaatgccttttatgcatttagacttgattttgtaacngataagcaacacatcatttctgttcagtatagctttctcaagtctctggtgatttagatcctctctcataaagtatattcttctcaggaaaggaatcttatattcagaatgatttataacaaatattatgagtgcatggcatgtgcatgtgtgttatgcataaattacatggttcccagactattttgtaggtcacggttgccgcttttctaagaagtgaaagtcagccattgtgctgtactacactgtcagggtctgttatctgaggtaaaatgattgcttctaagacatttttatgtgtccacatgagtggccacacattgagggatcattttcattttctgtcaagatagaaaccattaccaatttgttatgttttcttttacttggcaaattattctattcgcatttttggctgagctgctgtattggcatggtatacaacagacatttgggtaccattcagcagcattatactttttatgtaaa

SEQ ID NO: 91561 - DNA, 469 bp, Homo Sapiens
cttcgtgccctcgtcctcgcccttccccttcagccggcacacattcctgcccaagcagcccccggaacctctgctgccccggaaagccgagccccaggagagcgaggagaccaagcagaaggtggagagggtggacgtgaacgtgcagatcgatgacagctactacgtggacgtgggcggctcgcagaagcgctggcagtgccccacctgcgagaagtcctacacctccaagtacaacctggtcacccacatcctgggccacagtgggatcaagccgcacgcgtgcacgcactgcgggaagctcttcaagcagctcagccacctgcatacccacatgctgacccaccagggcacgcggccccacaagtgccaggtgtgccacaaggccttcacccagaccagccacctgaagcgccacatgatgcagcacagcgaggtgaagccgcacaactgccgcgtgtgcggccgc

SEQ ID NO: 91562 - DNA, 1025 bp, Homo Sapiens
ggcacgaggattgcacacctaaaccttcgagatcatcagctgcctttcaaacatttaattggccaggttatgattgacaaaaatccaggaatcacctcagcagtaaataaaataaataatattgacaatatgtaccgaaatttccaaatggaagtgctatctggagagcagaacatgatgacaaaggttcgagaaaacaactacacctatgaatttgatttttcaaaagtctattggaatcctcgtctgtctacagaacacagccgtatcacagaacttctcaaacctggggatgtcctatttgatgtttttgctggggttgggccctttgccattccagtagcaaagaaaaactgcactgtatttgccaatgatctcaatcctgaatctcataaatggctgttgtacaactgtaaattaaataaagtggaccaaaaggtgaaagtcttcaacttggatgggaaagacttcctccaaggaccagtcaaagaagagttaatgcagctgctgggtctgtcaaaagaaagaaaaccctctgtgcacgttgtcatgaacttgccagcaaaagctatagagtttcttagtgctttcaagtggcttttagatgggcagccatgcagcagtgagttccttcccatagtgcattgttatagcttttccaaagatgctaaccctgctgaggatgttcggcaaagggctggagctgtgttaggcatttctctggaggcatgcagttcagttcacctggtaagaaatgtggccccaaacaaggaaatgctgtgcatcacgtttcagattcctgcctctgtcctctacaagaaccagaccagaaatccagagaatcatgaagatccacctcttaaaaggcagaggacggctgaagccttttcagacgaaaaaacacaaattgtttcaaacacttaattggaaatgttttctccatctccctaccagacttacatgtagtgaaatagaatttgtattatttaataaaattttagggtttggtttttactattgaaaaa

SEQ ID NO: 91563 - DNA, 1233 bp, Homo Sapiens
cagtcgacggtaccggacatatgcccgggaattcggccattacggccgggaggagcgtttttggagaaagctgcactctgttgagctccaggcgcagtggagggagggagtgaaggagctctctgtacccaaggaaagtgcagctgagactcagacaagattacaatgaaccaactcagcttcctgctgtttctcatagcgaccaccagaggatggagtacagatgaggctaatacttacttcaaggaatggacctgttcttcgtctccatctctgcccagaagctgcaaggaaatcaaagacgaatgtcctagtgcatttgatggcctgtattttctccgcaccaagaatggtgttatctaccagaccttctgtgacatgacctctgggggtggcggctggaccctggtggccagcgtgcacgagaatgacatgcgtgggaagtgcacggtgggcgatcgctggtccagtcagcagggcaacaaagcagactacccagagggggacggcaactgggccaactacaacacctttggatctgcagaggcggccacgagcgatgactacaagaaccctggctactacgacatccaggccaaggacctgggcatctggcacgtgcccaataagtcccccatgcagcactggagaaacagctccctgctgaggtaccgcacggacactggcttcctccagacactgggacataatctgtttggcatctaccagaaatatccagtgaaatatggagaaggaaagtgttggactgacaacggcccggtgatccctgtggtctatgattttggcgacgcccagaaaacagcatcttattactcaccctatggccagcgggaattcactgcgggatttgttcagttcagggtatttaataacgagagagcagccaacgccttgtgtgctggaatgagggtcaccggatgtaacactgagcaccactgcattggtggaggaggatactttccagaggccagtccccagcagtgtggagatttttctggttttgattggagtggatatggaactcatgttggttacagcagcagccgtgagataactgaggcagctgtgcttctattctatcgttgagagttttgtgggagggaacccagacctctcctcccaaccatgagatcccaaggatggagaacaacttacccagtagctagaatgttaatggcagaagagaaaacaataaatcatattgactcaaaa

SEQ ID NO: 91564 - DNA, 950 bp, Homo Sapiens
gggtgaggtgtggagtgtggctggccaccagcctgcaggagggagggctggaaggtggggatatggggaagggctggagaagaagagagaaatacaggacttgaatcacaacttcctctcaacaaggctgttagggccctgggtggtggtgggatcatcagctgggagtggggtgtctgagctgtggctggccatctgcctactgatcccagagctctcagcccagctgaggctgcacatgtggaccttctgcctcctggtacctcctggcccagtcaggctcagtgtctgttgctttccagaaccctgggctacgacatccaggccaaggacctgggcatctggcatgtgcccaacaagtcccccatgcagcattggagaaacagcgccctgctgaggtacctgcaccaacactggcttcctccagagactgggacataatctgtttggcatctaccagaaatacccagtgaaatacagatcagggacatgttggaatgacaatggcccagccatacctgtggtctatgactttggtgatgctaagaagactgcatcttattactcaccgtatggtcaacgggaatttgtgcaggattcgatcagatccgggtgtttaataacgagagagcagccaacgccctttgtgctgggataaaagttactggctgtaacactgagcatcactgcatcggtggaggagggttcttcccacagggcaaaccccgtcagtgtggggacttctccgcctttgactgggatggatatggaactcacgttaagagcagctgcagtcgggagataacggaggcggctgtactcttgttctatagatgagacagagctctgcggtgtcagggcgagaacccatcttccaaccccggctatttggagacggaaaaactggaattctaacaaggaggagaggagactaaatcacatcaatttgc

SEQ ID NO: 91565 - DNA, 582 bp, Homo Sapiens
ttttttatatgttagtctttattgcttcaaaattttgcaaaagatttaaagagaggatgtaatgtaaaaaaatgagccaacaatgctttatttacaaattaggaaatatattcataacaaaaaatcaagcttatgtttttttccttcccttattttaaagattactatgtcatagatgtgatcttctatataataactttccccaaaagttctatgttaattaaacgccaggaactcaaatcattttacatggattaagaaaatgtgctacatggctcttagaaagcagtggctgaaaacagatgtaaggtggtcatatgtaattgccaaagacgttttcaaggtatgcttcaatatcaggaatactagtgctgcagtcactgcatgtctgaaatgtctacaatcaacagttgagtgcctgattcttctgtgtcccaattatctaagactagtgatgttctgactttcttcccagaagcggtattctctcgtttgcagctcttgtaagcaagttcatacttcctctttgaaggataggtctgttgcagcttcatctataaaacttgccgatatcttctacca

SEQ ID NO: 91566 - DNA, 610 bp, Homo Sapiens
tttccggttcccgttttggaccccaccttgaccccgaggggcggagcagattgggagcgccgccccacccctgccaacctcgtgctaacaagtgaccagtcatccccagagatagatgaagaccggatccccaacccacatctcaagtccactttggcaatgtctccacggcaacggaagaagatgacaaggatcacacccacaatgaaagagctccagatgatggttgaacatcacctggggcaacagcagcaaggagaggaacctgagggggccgctgagagcacaggaacccaggagtcccgcccacctgggatcccagacacagaagtggagtcaaggctgggcacctctgggacagcaaaaaaaactgcagaatgcatccctaaaactcacgagagaggcagtaaggaacccagcacaaaagaaccctcaacccatataccaccactggattccaagggagccaactcggtctgagagaggaggaggtatcttgggatcaagactgcagtttgggaatgcatggacaccggatttgtttcttattccttcacttttggggaaaatctcttgtttttaaaaagtgataaatttggtgttaggtcaa

SEQ ID NO: 91567 - DNA, 549 bp, Homo Sapiens
cacaagatacaatgtgtttgttttgcagaaattgtctctatcacctgtgggcttttgctacccatagagctacttgtacctaattcaaccaataaaaataatgctagaaactgaagccaacaaagctgtcaaaatttgtcttgggttcttgggttagacaacttgttgagattttataatacatttccttttttctcctctttttctaggttctttcctgctggatgcgaaacactcaattatcacttcctcatgtgtgtagtctccctcactgagtcagctctcactggggccttcccatgacttgtttgttgtctttatctgtctgaagcctcatcttcctttgacatttatctccatctggaaattctataatcttccttttcctcttgtcttgatcttacataaaatcaacactgtccattgaaagttatgtttaagaagcattgttaacaaaactatcatgaagtcccttgtaccttgttaaaaaccactgtattcataactttgttgtttttttcaaatatatttttctctggattgaaaaaa

SEQ ID NO: 91568 - DNA, 525 bp, Homo Sapiens
  misc_feature (515)..(515): n is a, c, g, or t
gtcactgtcaaagaaccagatgggacacaacctcagaatggcagccatggcctctgatcacctagttcaacaaccccttccctcattttacaggatagaaatgcaaaactcgtgaaaagcagaaccttgaccaaaatgtgaacccagaattaaaagatccaccggctactgactcacttgctactcacagtacttgctctcagcctttggataaaactggtgatttagaacttcggatatggaggacccaaacacctgagccaagactcctcttcagaaagagccaagaccccacaatgctagatgggaccccaaggacaccgaacagttacaacaaacccaccagaactgcttaatacagttactacacaaacgacccctgttcccagctaggctctttcccaaccaagacaagaattgcaacccccattaaggaccctgcccgacaactcccttcttccgggaatggtgctaggccccagaagtcgctgataaaaattaacatgccaaactcntatgaaaaaa

SEQ ID NO: 91569 - DNA, 510 bp, Homo Sapiens
cttccacatacatctgtgaaatgaacaaggaagtgaggcttcccaagaatttagcttgctgtgcagtggctgcaggcgcagaacagagcgttacttgataacagcgttccatctttgtgttgtagcagatgaaatggacagtaatgtgagttcagactttgggcatcttgctcttggctggaactggataataaaaatcagactgaatgccaggacatctgagtacctatctcacacactggaccaccagtcacaaagtctggaaaagtttacattttggctatctttactttgttctgggagctgatcatgataacctgcagacctgatcaagcctctgtgcctcagtttctctctcaggataaagagtgaatagaggctgaagggtgaatttcttattatacataaaacactctgatattattgtataaaggaagctaagaatattattttatttgcaaaacccagaagctaaaaagtcaataaacagaaagaatgattttgaaaaaa

SEQ ID NO: 91570 - DNA, 613 bp, Homo Sapiens
tgagccactgcgcccggccagccctgttgtctttcaaagaacctcggccccagtgatggctgatctcactcccactgtctcgtagaattacactccttcctggggatccctcttcctgcagccttgtccttggggagtacagggaagtacctgcagtgaccctgcccccatgaccttggccaggcaggatgattccagagcccgtactgtggggatcctcactgaccagcccagccccatccgcaagccaggctgggcctgggcataacttcgctgggctctcccaagaccatcagcagtgcatccagccccctggggcctgggctgctgctggttcttcatcagtcccttggtctctagcctcggccagggctgctctgctctccgccctcctttgtgtatcaagtgtcgctcacagccccattcactggggagcctttcggatctatttggtctttctcatgtcccccactggtctgtaccccagggagcgggtgcttgtactgtgtgaatccagtgttcacattcacacttaatgacttccttggcaccaatcatgtatttcaccgtttgcactttttgtatttcaataaaaatgttgatgcaaaaaaaa

SEQ ID NO: 91571 - DNA, 534 bp, Homo Sapiens
cataacctagaatgtcaagacactcaagataaagaccaacaagaccttcaatccagagttacacaaaaaggagatatgtacactagagacatcaaaccaggggacatgaaatgtatagggcaaacctcaggggacctgcaatcagaagacgtgaaggcagattttcattcttcttctggccaaagctcagtacaagacacatgtttagcctatttgtccaatctagattcagaacaagatgtgcaaccagacacttcagcttcctcaaattcatataaagaagatgtgaatttaacttctacttcatgtgatccaaaagatcaacagcaatctgaagactctgactaacatgcagaatctacccaataccacactgcccccattaatggaattaaattgagaaaaacaatattgcctcctccaatctgtgttctcaactgtggttgccacctcattaacttacaaaaaaatgaagggcatgctgagcactcaaacaatttgttcttacttaaaataaaatgacaacaaaccaaa

SEQ ID NO: 91572 - DNA, 399 bp, Homo Sapiens
tgatgggattcaaacctgggtggccctgagaccagagcttccgctctacccacttcactatacttctcttactacaggtacacagcccttttatctctgctttcctgaagcagcctttgtaagtggaaggattgtactgaaggctcagcagcaatagagctaatgaaatggaagctgggcagtgctgagtccctgggtcacagttaccgagaggaaaagtgggctggctgagatttcatcccaggctgcctgctacaaagctcctcatctgcctccctcgaatcaagtgctacatccaataatagggactaaacccacatctgtagcttctgagtcaagagatctgaatagagaaatcagcagttaaaataaaattaaaatagctctgaacatttaaaa

SEQ ID NO: 91573 - DNA, 757 bp, Homo Sapiens
gggggcggcccaagcggtttcaaacggcttagagcaggccgcttggttctgacccagctgaggaaatactcttaattctaaggaaaacctggaagcacaatgggagatgacagtgagtggttgaaactgccagttgatcagaaatgtgaacacaagctgtggaaagcaaggttaagtgggtatgaagaggccctgaagatcttccagaaaataaaggatgaaaagagcccagagtggtccaaatttttaggattgatcaaaaaatttgtcactgattccaatgcagtggttcaattgaaaggattagaagctgcacttgtttatgatgaaaatgcccatgtagcaggaaaaaccacaggagaagttgtgtcaggtgttgtaagtaaggtgttcaatcaacctaaagctaaagccaaggagctgggcatagagatctgtcttatgtacatagagattgagaaaggagaggctgttcaagaagagctcctgaaaggcttggacaataagaatcccaagatcatagtggcctgtatagagacactgaggaaagccttaagtgaatttggttccaaaatcatcttgcttaagccaattatcaaagtgttgccaaaactctttgagtctcgagagaaggctgttcgagatgaagccaaactatttgctgtgggagattacagatgggatcgggatgctctgagacccccattacaaaatataaactctgttcagttgaaggaactaaaagaagaatggggta

SEQ ID NO: 91574 - DNA, 476 bp, Homo Sapiens
gcggccgcacaggccctgggcatcaatccagcagggctcccgactcactccctggagaccagctccccaaccacccggccctgatggcatcccgctgcggccaggtgtcctctcagccgaggtccttgtcactgcctagctgcgtccgcctgccacaccagctcacccgagatgtaggtggcctggacgtgaagggagtcgtcgagcaccacgaagtctgcgtcagcaccaaagtccagggtccccttactcttctccagccccagcaactgggcggggtgcagggatgcagcctccagggccgactccatgctgcagcctgtggcctgcaggaagtgccggacacagacgtccattggggctatgctgccactcagcgtcttggtgccttgagagcagagagggcaggctctggggggcgtcgtgggccacctggcatgcgggctgggacctgggacccagtggtcagggcgctt

SEQ ID NO: 91575 - DNA, 1102 bp, Homo Sapiens
ccgccgcggggctccggagccgctcgctcccgacacggctcacgatgcgcggcgagcagggcgcggcgggggcccgcgtgctccagttcactaactgccggatcctgcgcggagggaaactgctcagggaggatctgtgggtgcgcggaggccgcatcttggacccagagaagctgttctttgaggagcggcgcgtggccgacgagcggcgggactgcgggggccgcatcttggctcccggattcatcgacgtgcagatcaacggtggatttggtgttgacttctctcaagccacggaggacgtgggttcgggggttgccctcgtggcccggaggatcctgtcgcacggcgtcacctccttctgccccaccctggtcacttccccaccggaggtttatcacaaggttgttcctcagatccctgtgaagagtggtggtccccatggggcaggggtcctcgggctgcacctggagggccccttcatcagccgggagaagcggggcgcgcaccccgaggcccacctccgctccttcgaggccgatgccttccaggacttgctggccacctacgggcccctggacaatgtccgcatcgtgacgctggccccagagttgggccgtagccacgaagtgatccgggcgctgacggcccgtggcatctgcgtgtccctagggcactcagtggctgacctgcgggcggcagaggatgctgtgtggagcggagccaccttcatcacccacctcttcaacgccatgctgcctttccaccaccgcgacccaggcatcgtggggctcctgaccatcgaccggctgcccgcaggccgctgcatcttctatgggatgacgcatatggtacgcccacaaccccgccgctttgttattgcttacgtgcccatcactggggttctgttggtatcaattcatcttgccttggcctggtcatgtcggcattctgaattcttaatgaattgtcgtcaattcctcttgaagccttaattctagttctaatctccatctacttttttgtcccccgtttaccgatatgactgtatagactcacccttattttgtttaaaattatttcatttacaatatacatatta

SEQ ID NO: 91576 - DNA, 1596 bp, Homo Sapiens
caaggtagcgaggcctgggtggcgaattcggcacgaggggctccggagccgctcgctcccgacacggctcacgatgcgcggcgagcagggcgcggcgggggcccgcgtgctccagttcactaactgccggatcctgcgcggagggaaactgctcagggaggatctgtgggtgcgcggaggccgcatcttggacccagagaagctgttctttgaggagcggcgcgtggccgacgagcggcgggactgcgggggccgcatcttggctcccggattcatcgacgtgcagatcaacggtggatttggtgttgacttctctcaagccacggaggacgtgggttcgggggttgccctcgtggcccggaggatcctgtcgcacggcgtcacctccttctgccccaccctggtcacttccccaccggaggtttatcacaaggttgttcctcagatccctgtgaagagtggtggtccccatggggcaggggtcctcgggcactcagtggctgacctgcgggcggcagaggatgctgtgtggagcggagccaccttcatcacccacctcttcaacgccatgctgcctttccaccaccgcgacccaggcatcgtggggctcctgaccagcgaccggctgcccgcaggccgctgcatcttctatgggatgattgcagatggcacgcacaccaaccccgccgccctgcggatcgcccaccgtgcccatccccaggggctggtgctggtcaccgatgccatccctgccttgggcctgggcaacggccggcacacgctgggacagcaggaagtggaagtggacggtctgacggcctacgtggcaggtgaacgccctgacccactgggtcccaagtcccagcccgcatgccaagtggcccacgacccccccagagcctgcccctctcttgctctcaaggcaccaagacgcttgagtggcagcataaccccaagggacgtctgtgtccggcacttcctgcaggccacaggtcagtgagcagcacgggtgcgggtttaggtggtctgtgagtggtgggtccccaaggggctggaccgggtgcccggactgtagcccaagctctgcccacaggagctcctatggcatgagtgcacatggcacgcacacaaacccaggcgacaggcagaccacccacggtgccattcccagggcctgctgcagagtcaccgatgacagccagtgccggtgggcctgggcaacggccggcaaacgccaggacagcaggaagtggaatgtcaacgagctgacggcccacaaggcaggctgcagcatggagtcggccctggaggctgcatccctgcaccccgcccagttgctggggctggagaagagtaaggggaccctggactttggtgtgacgcagacttcgtggtgctcgacgactcccttcacgtccaggccacctacatctcgggtgagctggtgtggcaggcggacgcagctaggcagtgacaaggacctcggctgagaggacacctggccgcagcgggatgccatcagggccgggtggttggggagctggtctccagggagtgagtcgggagccctgcttggattggtgcccaggccttgtt

SEQ ID NO: 91577 - DNA, 1314 bp, Homo Sapiens
cggggctcggagcgctcgctcccgacacggctcacgatgcgcggcgagcaggcgcggggggcccgcgtgctccagttcactaactgccggatcctgcgcggagggaaactgctcagggaggatctgtgggtgcgcggaggccgcatcttggcacccagagaagctgttctttgaggagcggcgcgtggccgacgagcggcgggactgcgggggccgcatcttggctcccggattcatctgacgtgcagatcaacggtggatttggtgttgacttctctcaagccacggaggacgtgggttcgggggttgccctcgtggcccggaggatcctgtcgcacggcgtcacctccttctgccccaccctggtcacttccccaccggaggtttatcacaagggctgcacctggagggccccttcatcagccgggagaagcggggcgcgcaccccgaggcccacctccgctccttcgaggccgatgccttccaggacttgctggccacctacgggcccctggacaatgtccgcatcgtgacgctggccccagagttgggccgtagccacgaagtgatccgggcgctgacggcccgtggcatctgcgtgtccctagggcactcagtggctgacctgcgggcggcagaggatgctgtgtggagcggagccaccttcatcacccacctcttcaacgccatgctgcctttccaccaccgcgacccaggcatcgtggggctcctgaccagcgaccggctgcccgcaggccgctgcatcttctatgggatgattgcagatggcacgcacaccaaccccgccgccctgcggatcgcccaccgtgcccatccccaggggctggtgctggtcaccgatgccatccctgccttgggcctgggcaacggccggcacacgctgggacagcaggaagtggaagtggacggtctgacggcctacgtggcaggcaccaagacgctgagtggcagcatagccccaatggacgtctgtgtccggcacttcctgcaggccacaggctgcagcatggagtcggcccctggaggctgcatccctgcaccccgcccagttgcctggggctggagaagagtaaggggaccctggactttggtgctgacgcagacttcgtggtgctcgacgactcccttcacgtccaggccacctacatctcgggtgagctggtgtggcaggcggacgcagctaggcagtgacaaggacctcggctgagaggacacctggccgcagcgggatgccatcagggccgggtggttggggagctggtctccagggagtgagtcgggagccctgctgga

SEQ ID NO: 91578 - DNA, 527 bp, Homo Sapiens
gacccacccacaagaaacattccttctcccggacagctggacccagacacacggatccctgttatcaatcttgaagatgggactaggctggtgggggaagatgctcctaaaaataaggatttagttgaatggctgaagctgcaccctacttacactgttgatatgccaagttatgtaccaaagaatgcagatgtgctgttttcctcatttcagaaaccgaaacagaaacgacatagatgtcgaaaccctaataaattggatataaacactttgacaggagaagaaagggtgcctgttgtcaataaacgaaatgggaagaagatgggtggagctatggcgcctccaatgaaggatctacccaggtggctggaagaaaatcctgaatttgcagttgctccagactggactgatatagttaagcagtctggttttgttcctgagtcgatgtttgaccgccttctcactgggcctgtagtgcggggagagggagcgagcagaagaggaagaaggcccaaaagtgagatcgc

SEQ ID NO: 91579 - DNA, 506 bp, Homo Sapiens
  misc_feature (89)..(90): n is a, c, g, or t
  misc_feature (160)..(160): n is a, c, g, or t
atagtgtcgtcaacacagcaggatctgcaggaatgggtggagcacctcagaagcaaacgaaggtcacgttgtgggaaaccccgccatannagcctcattcagtgccatctcataccgtaaggacttggtgcttctcctccttccagactcaggcgtggcnatcccgtggctgagctgtcagcaagtgatcagttgctttaaaacctaatcaatatttggataaaaagtgcaaaacacttgcttcacatttctctgcagatctttggccctcttcgtgcagtagtgaattgttttccaatgagtgttctcgagaaacaaccctgaattgtgcctcctcacgcacagttcagaggtgcttgggtgggaagctgcttctgctccatgtggccctagaagactgatttaggggagttttacactcaactatagatgatttttctgagaattttaactgtttattatgcttcatttaagaaaacaaaaaataaatgattatgatgatgaaa

SEQ ID NO: 91580 - DNA, 506 bp, Homo Sapiens
gagaaattaattgaggctcatttccaggacagaggggcaagctgggtctgaggagccaagcagaaaaacttcccaaaatcactgggtggggaggggtcagagacttactgctgccccagctgttctgactctgcccccagcttttggccccacccttttaaagcaccttcagaggttcccaatggtgacagtaaacaagtctccactgtcctggccatctctgctgtgttcaccctactcctgatctttctggctgctcagggactgacagccaagatgtgaggctgtgatgagcaggaacagggaggcctggagcccccagccattgtcatcacttccctgatctgcctaaattctgcccagcagtccgtgaaaatggtttgctgatgacatatgtaaggactttaactcccctcaagcaatctgctcatctcaaagggtaaaacattggctcactcctaatgcaataaatgacacataaggtcacaattcaatggtaaaaaaaa

SEQ ID NO: 91581 - DNA, 553 bp, Homo Sapiens
gcggccgcgctcgggcgcccctcgcgcagcgctccatgcccgtgtggtgctgccgctgctccctggccggtcatttcagaaactatagtgacactgaaactgaaggagagatttttaattccttagtgcaatactttggtgacaacttggggcgaaaagttaaagcgatgccattagttgaagaaacttctttactggaagattcgtcagtgacttttcctgtggtaataataggaaatggaccctcaggaatatgcctttcttatatgttatcaggctacagaccgtatttatcatcagaagcaatacacccaaatacaatcttaaatagtaaattagaagaagcaagacatctttccattgttgatcaggacttagaatacttgtctgagggccttgagggccgatcatccaatccagttgcagtacttttcgatacacttcttcatccagatgctgactttgggtatgattatccatccgttttgcattggaaattagagcaacatcattatatccctcacgtagttcttggtaaggtccacctggtggg

SEQ ID NO: 91582 - DNA, 335 bp, Homo Sapiens
aaaatacctactctgaaagagactctctgtatagctctgccctcctgaattgcatgtccaaattgcattggaaaaaaatgaggaaaaattctggactcccaaggtagtagttggaaaagggagggcttcataagccccccagaagtgtcttgtggaccccctgaaaatgcttccagatccccagtcctcagatcacaccttgggaactactgtctgtcaccctacagtaagggaggaaacaacagcagaacttcatgttagctcagaccagctgcagatgctcatctgaactttgagaatggtcaaataaaagtaaaacctgatggaacaccaaa

SEQ ID NO: 91583 - DNA, 219 bp, Homo Sapiens
cccctcctttcctcctcctgccccacaatatattattcatctggttttaatgctacataaatatgcattgtctcatgcctgtttgtgttggatgccttgtgctaagctgtaacaaaatgttgcttcttttgctgtctgtatacagctgcttgctttaaattagtagattctgaaatagctttccttgcatgtctaaaataaaagtattgcatgtaaaaa

SEQ ID NO: 91584 - DNA, 694 bp, Homo Sapiens
tttttcaaaagtcaccaaggcaaaaaaagttgcaagcaatcttggttactgagaatagaagtgtagtgaaatactaagtactatccttggcttggggattaaacctatataacaaaagtgaaaaggggtcatggtctaagagacacagaactattttagaagagttcaagttcacatggtagttacctctaggttcatcacactgcaatggcagaacaggcttgcagatacagacatgaacaatgcaccgagaatctggtattatcaaggactgggttgtaaaggcatcattagtatatgtacagagcttcaattccctaggcttttttaaagaaagtggtatttttatttattggtcaactcagaaataatttctcaaagtttattcagcttttaattaggaacttataccaatttttctaaccctggggagaaaacaataagaaaaaaacccaacctatatttccaactggttttttaaaagtccaacaaattcaaagtcaactttttggtgacattttatatagaatcagagcttaaatgtagtaactttcagatttcttccttttacaattaagttgtgatatcggacttgcgacgtgaccaacttaaaaatgcctaatgatgttttgggatcagtttatttgctgcactatttaaggtctttgcctgtttcaccaaatccttttcacta

SEQ ID NO: 91585 - DNA, 735 bp, Homo Sapiens
ctttatagtacaagtacttccttattaaaataagataactttcctccaataatcaatttttaaaccatttctgcattgtcatggtttcacatgtctttaagcttattttgtatagtttgcaacctaaatctatgcaacattttctagtactgacaaacctacggtatttgagttatgggctgacattcatggtcttgcaggcaaaactcaagttcctaggtaggactgagaagtggtcatgagccactgtgctcagcctcagtttattttttactcataaataactcagatttgatttcttcttatgggtttgctggaagtaaaaatcacattcacaaccactgaagccagacatttgattactcttaacaattaacagtattatttattaggaaagtaatgctgtaagagtcagcaaaatggggcctggcttcccggggctttgtcctagtcagcaacttgccttgcactgccctcttcctgccacctgtgtccagcctgagcaagaaaagatctgatgctcagggaatccctcattgggaaaatttaaatatggaccgtatagtagatgataatattgaaattaggttatctttttattagatgtgatgatggtaatgtgataatgtaggtgaatgttcttatttttaggtgaggcgtggggaatgtttccggatggaattttctatgtcttcaacttactttcaaaaaaacaatacagcaagtcctcaaata

SEQ ID NO: 91586 - DNA, 554 bp, Homo Sapiens
ttttttcctggtggagtgattcaaaccttcattcatgaagggtctggatcacttgtagtcctgcctggattgggctgctataatttcccattgaccttaatcacagggcatggtaatactaaaagatgccctaatggatctcctgtattccatgcaactcttcctcttccttacctccgttgcggcgtagtagactgatttcatcttcatagtccaggtcaatcaccccagccaacactgtatctcccttcttagcctcttcacttaaaggtaggaggaacccaaagtgtccaggtagcaatcttaagtttcagtttaatggaatttttgtgtctcctggtggcagcattcctccctctagaactaagacctctgtgccagcagaaagtaatgtcgcgggaacaggaagcaaaaattttgctagtgtatcactagggttgatggtaagtggtgccacttccacttccaccccttgataccgggaccacgtgaatcccggctatgggagaaacagtaccatatattggacgctgattcaaaacacacacagccct

SEQ ID NO: 91587 - DNA, 416 bp, Homo Sapiens
ccttcttattgattgttcttgctttttcacacggctccttaaggtggtgaatttgtaaccgaaaggcccaggtgagatgtgcaaatatcactggattggaggagctcacttggaaagccagtattcctcctgagctaatgaaaagaaaggctgtcgtcttatgccaaaagcaataccaaccttgttcacgggctggtaagtttcaaatccaaggaccacggatttcaactccaccctcattgcgtccctcagatctgatatttgccacttgatttctgcttttcaaacgccttttctgcctgtgttacctaaattacacagtaaaggatattggcaagtgtttagccaaatgccccaccctgaggaaataatttttctgcccatatctcccaataaagatgtctatgcctttaaaa

SEQ ID NO: 91588 - DNA, 428 bp, Homo Sapiens
acagcccgagggtacccaggccaggagggccctgtttatccccatttgaaatgggaaaaagcctctgattaaaccgcttgcccaagtctcctggcagtaagtggtggagcaggatttcgtcccagcctcatgctgtttccacatccccacagtggccccgggctgtgctccttccctggacctgagcttcactattggaccagatgagcctctcggatccatcccagcctggcacgtctagatcctgcctcccaacgcaggctgctgagatgttcacttgaatctctcaccatggacattacccaaacattacctaatgttttccagagagaagaatcctatttctttctgtgttttagattccaaaccaaaaagggacataattgtgtggtgaaaataacaagggacttcaaatcagaaaacccaaa

SEQ ID NO: 91589 - DNA, 1559 bp, Homo Sapiens
  misc_feature (1201)..(1486): n is a, c, g, or t
gtggaccggtccggaattcctgcgatatcgtcgacccacgcgtccgggaatacctctactcactcgtctaccaggcccttgatttcatctctggaaagaggcgggccaagcagctctcttcggtgcaggaggacagggccaatggggttgccagctccggggtcccccaggaggcagagaatgagttcctgtcgctggatgacttccctgactcccggactaacgtggatctcaagaatgatcagacgcccagtgaggtcctcatcatccccctcctgcccatggccctggtggcccctgatgaaatggagaagaacaacaatcccctgtacagccgtcagggtgaggtcctggccagccggaaggatttcaggatgaacacgtgcgttccccaccccagaggggccttcatgttggagccagagggcatgtcccccatggaaccagcgggcgtttcccccatgccagggacccagaaggacaccgggaggactgaggagcagccaatggaagtttccgtgtgcaggagccctgtcccagcactcggcttctcccaggagccaggcccctctccagaaggcccgatgcccctgggtgggggcgaggacgaggatgcagaggaggcagtagagcttcctgaggcctcggcccccaaggccgctctggagcccaaggagtccaggagcccgcagcagagtgctgccctgcccaggaggtacatgctgcgggagcgggagggggccccagagcctgcatcctgcgtgaaggagactccagacccctggcagagcctggacccctttgactccttggagtctaagcccttcaagaaacggtaggccttactctgtgcccccctgtgtggaggaggctctgggacagaagcgcaagaggaagggctgctgccaagctgcagtgacttccaccagtggtacctggctgcctatgcatgaccatgccgacagcaggcggcttcggcgaaagggtccgtcctttgcagacatggaggtcctgtactggacacacgtgaaggagcagttggaaactctccggaagctgcaacgcgaggggagcgtggcatgaggcacgcggccttcgggccttgacgaaggaaggcacaaccggggagggagcaccctgggcacgcacacggcggggcagcaggaaggcagtctacgacgccggaggacacaatgggagnnnnnnnnnnnnnnnnnnnnnnnnnnnnnnnnnnnnnnnnnnnnnnnnnnnnnnnnnnnnnnnnnnnnnnnnnnnnnnnnnnnnnnnnnnnnnnnnnnnnnnnnnnnnnnnnnnnnnnnnnnnnnnnnnnnnnnnnnnnnnnnnnnnnnnnnnnnnnnnnnnnnnnnnnnnnnnnnnnnnnnnnnnnnnnnnnnnnnnnnnnnnnnnnnnnnnnnnnnnnnnnnnnnnnnnnnnnnnnnnnnnnnnnnnnnnnnnnnnnnnnnnnnnnnnnnnnnnnnnnnnnnnnggcaaagcgagagggccggaggagagccaagacagagaggggagggcgacgcaaggagggaggagagatgaga

SEQ ID NO: 91590 - DNA, 977 bp, Homo Sapiens
ggcagtaactataacggtcctaaggtagcgaggcctgggtggcgaattcggcacgaggcagcaaaatggcgccagaactagtggcgggctgaggacgccgtacccctcggaaggcagccctgcggtccctttgccgcccgttccctcccggacatggaggacgtggaggcgcgcttcgcccacctcttgcagcccatccgcgacctcaccaagaactgggaggtggacgtggcggcccagctgggcgagtatctggaggagctggatcagatctgcatttcttttgacgaaggcaagaccacaatgaacttcattgaggcagcgttgttgatccagggctctgcctgcgtctacagtaagaaggtggaatacctctactcactcgtctaccaggcccttgatttcatctctggaaagaggcgggccaagcagctctcttcggtgcaggaggacagggccaatggggttgccagctccggggtcccccaggaggcagagaatgagttcctgtcgctggatgacttccctgactcccggactaacgtggatctcaagaatgatcagacgcccagtgaggtcctcatcatccccctcctgcccatggccctggtggcccctgatgaaatggagaagaacaacaatcccctgtacagccgtcagggtgaggtcctggccagccggaaggatttcaggatgaacacgtgcgttccccaacccagaggggccttcatgtcggagccagagggcatgtcccccatggaaccagcgggcgtttcccccatgccagggacccagaaggacaccgggaggactgaggagcagacaatggaagttcccgtgtgcagggagcctgtccagcactcggttctcccaggagcaggccctctccagaatggccgatgccctggtgggggcgaggacgaggatgcagagaagcagtagagtcctgacgctcggcccaagccgttctggaccag

SEQ ID NO: 91591 - DNA, 1080 bp, Homo Sapiens
  misc_feature (792)..(792): n is a, c, g, or t
  misc_feature (913)..(913): n is a, c, g, or t
  misc_feature (921)..(921): n is a, c, g, or t
aagaggctggaccggtccggaattccttccctagcaacatggcgccagaactagtggccggctgaggacgccgtacccctcggaaggcagccctgcggtccctttgccgcccgctccctcccggacatggaggacgtggaggcgcgcttcgcccacctcttgcagcccatccgcgacctcaccaagaactgggaggtggacgtggcggcccagctgggcgagtatctggaggagctggatcagatctgcatttcttttgacgaaggcaagaccacaatgaacttcattgaggcagcgttgttgatccagggctctgcctgcgtctacagtaagaaggtggaatacctctactcactcgtctaccaggcccttgatttcatctctggaaagaggcgggccaagcagctctcttcggtgcaggaggacagggccaatggggttgccagctccggggtcccccaggaggcagagaatgagttcctgtcgctggatgacttccctgactcccggactaacgtggatctcaagaatgatcagacgcccagtgaggtcctcatcatccccctcctgcccatggccctggtggcccctgatgaaatggagaagaacaacaatcccctgtacagccgtcagggtgaggtcctggccagccggaaggatttcaggatgaacacgtgcgttccccaccccagaggggcccttcatgttggagccagaaggcatgtcccccatggaaccagcgggcgtttcccccatgccaggggacccagaaagacaccggggaggactgangagcagccaatggaaagttttcccgtgtgcagggagccctgtcccagcactcgggcttctccccaggagcaggccccctctccagaagcccgatgccccctgggtgggggccaaggaccanggatgccnaagaaggcagtaaaagcttcctggagacttcgggcccccaagggccgctctgggagcccccaggagtcccggaaaccccccaccaaaagggctgcccctggcccccgaagggaactttccttccgggaaaaccgggaagggggggcccccaaaacctgt

SEQ ID NO: 91592 - DNA, 1078 bp, Homo Sapiens
  misc_feature (71)..(197): n is a, c, g, or t
gttcaagcaattctccgtgcctcagcctccctcgtagctggactacaggcgcccgccaccaacccggtaannnnnnnnnnnnnnnnnnnnnnnnnnnnnnnnnnnnnnnnnnnnnnnnnnnnnnnnnnnnnnnnnnnnnnnnnnnnnnnnnnnnnnnnnnnnnnnnnnnnnnnnnnnnnnnnnnnnnnnnnnnnnnncagccgacatgccttttaatctactcaaggattggagatattgttttgtctcttatccttctggccatgtgcctctagatatgatgggatcagggttattgagtctagaatttatgtgagatgatacaaattcaaaaccaaaaggctgctccaaaagatggtcttatataggtttaatagattacacggacagaccacatgagggggcggaatggaaaaagtcaactgttggcagttacctttgtcactggaataaggcgcgtgaacattattgctggggacagacacattctggtggtgtggctggttcacagtttctaaaaaatgaaaccagattctcatgatgtgaaagttcttctgcaacagggaaagaaacgatgttccaattcaactgagtatctccttctgtgagtgcccggaagagagaagggatcggttcatgcagctcctccactgtgctctttgaagttggaggtgtgtcactataatttcgaggattacacataccaacacagtcacagcactcgtcccaaagggccccaagacacagcatgcactccttacagcaggagcaattgccttctcccggccggcactggcagagctcctgaatgaggcatttgctcacatcactagcacagagtgctttgttacagctcagtgattcttggaagccatgtcaggaacatcaggatggctagagtaagcacagcaacatagtgtaacttcatgtttcttcaaagaagatgatcagtaactcccaggaaacatgcgccacggtcccgcgaagtcgcccacccctagatccccgccgggtcggccgagcccggggcgcgcggacgcgtgggtcgacgatatcccggaaatccggaccgggacca

SEQ ID NO: 91593 - DNA, 596 bp, Homo Sapiens
gccctgcgggacaggctgcgcctagggtcacctgctcttcttcagcaactcagaaatattctccttgaccattgaatccaatgttgaaaagtcccagtcggccaactgcattagtcgatcatgggcctccctaaagaggccagagccaatattcagctccacctgcatacgccactcagctagcttggagctgttgaggaagacattatagatggctgccatgggcttgatcattttcacccacggacaccagggcagccagtgagatttggttcccggtgatgaacatcttatcctgcagaaaatactcctcaaagagctgcaggctgtgcttcacctcttccactgcatgctccatcgtctcagctgaaacttcctgccctgttatctatgggatcagcaactatcacttaagataagatgcccatctttgaggctgggcagcttcctgagggggtagatgtcaatgtatgctttgctgagtggtgaccttcagcagatccacaaactgaagttgaactggatgtctgcttcttccagaagatgtatacggcacggcagggtgctgagcggcggtccatgtagagctacaggcc

SEQ ID NO: 91594 - DNA, 1016 bp, Homo Sapiens
  misc_feature (51)..(51): n is a, c, g, or t
  misc_feature (146)..(146): n is a, c, g, or t
  misc_feature (214)..(214): n is a, c, g, or t
ctgacatcgccatcctgaagctcctagacaaggcccgtatcagcacccgantccagcccatctgcctcgctgccagtcgggatctcagcacttccttccaggagtcccacatcactgtggctggctggaatgtcctggcagacgtnaggagccctggcttcaagaacgacacactgcgctctggggtggtcagtgtggtggactcgctgctgtntgaggagcagcatgaggaccatggcatcccagtgagtgtcactgataacatgttctgtgccagctgggaacccactgccccttctgatatctgcactgcagagacaggaggcatcgcggctgtgtccttcccgggacgagcatctcctgagccacgctggcatctgatgggactggtcagctggagctatgataaaacatgcagccacaggctctccactgccttcaccaaggtgctgccttttaaagactggattgaaagaaatatgaaatgaaccatgctcatgcactccttgagaagtgtttctgtatatccgtctgtacgtgtgtcattgcgtgaagcagtgtgggcctgaagtgtgatttggcctgtgaacttggctgtgccagggcttctgacttcagggacaaaactcagtgaagggtgagtagacctccattgctggtaggctgatgccacgtccactactaggacagccaattggaagatgccagggcttgcaagaagtaagtttcttcaaagaagaccatatacaaaacctctccactccactgacctggtggtcttccccaactttcagttatacgaatgccatcagcttgaccagggaagatctgggcttcatgaggccccttttgaggctctcaagttctagagagctgcctgtgggacagcccagggcagcagagctgggatgtggtgcatgcctttgtgtacatggccacagtacagtctggtccttttccttccccatctcttgtacacattttaataaaataagggttggcttatgaaatacaaa

SEQ ID NO: 91595 - DNA, 420 bp, Homo Sapiens
tgggcatttccttggctgacagtggatattcttgtacccttcttgggtcctgggatctcttgaaatccccaataaagagagagttgtgctatttaagctgaccagtatctataaacgtgtttgcatgagtttacatcccaggattccatgattctgtaaatgcctatgcattcatgtctgtctccatgcatgtgaaaacaggagagtgttttcattttgtgtctaggtttgtgtgagtaagcaagaaataaacctttgttgttgtaagccactgagatttggagagtgttaccacagcctaacctagtctatcctgactgacagaaaggacttgttcatttcgcttctcaaagtgaaaaatctgttatccaatagctaccatagatgaaaacaaacttggatttttttctttgtccaaat

SEQ ID NO: 91596 - DNA, 581 bp, Homo Sapiens
gacacgctgcccgcggctctgtggaccagcagtgcggtgctgggactgctgctcctggctttgcccacgtatcacctctggaaacgctgccggcacctggctgaggacgacacccacccaccagcttctctgaggcttctgccccaggtgtcggcctgggctgggttaagggggaccggccaggtcgggatcagcccctcctgagtggccagcctttccccctgtgaaagcaaaatagcttggaccccttcaagttgagaactggtcagggcaaacctgcctcccattctactcaaagtcatccctctgctcacagagatggatgcatgttctgattgcctctttggagaagctcatcagaaactcaaaagaaggccactgtttgtctcacctacccatgacctgaagcccctccctgagtggtccccacctttctggacggaaccacgtactttttacatacattgattcatgtctcacgtctccctaaaaatgcgtaaaaccaagctgtgccctgaccaccctgggcccctgtcgtcaggacctcctgaggctttggcaaataaacctcctaaaatgat

SEQ ID NO: 91597 - DNA, 459 bp, Homo Sapiens
  misc_feature (75)..(135): n is a, c, g, or t
gcggagagggggcgcgctgacgtctcgccggcttaacctgttgctctcgagactgcgtcggagcccgcaggcagnnnnnnnnnnnnnnnnnnnnnnnnnnnnnnnnnnnnnnnnnnnnnnnnnnnnnnnnnnnnnccacgggcttgcagccggacgcccggactcggagacacgatccgctgaacgcccgcaataagaaagaaaacccaccccacgctgctctccacctcaacgaggtccggaatgggaggcggggtgcggttctcgtccaagttctaccccatttgctttgtggctgcatccgaaacggacgtgccccgggaaggcgtccacgctccaagacaaggttgcctcagtgcagtttctacagcccgagtttaaactagtcctttgcattctacccagccctctgcaatgcggatgtattttaattcttaaattctttatggaacagcaaaa

SEQ ID NO: 91598 - DNA, 550 bp, Homo Sapiens
ggaacaggaaaagaggagccaggcttttttggaaaattggcggcagcggtggcatacgggaaactgaaatctttatctaatctcatcctttgtatattcgtcttggatttgctgaagaaaattaaaagccaggcctaccactcctatggcacagtattgatgagagacatcagtggagctccccacctccaccccaggcttggaacttagggaatgactggtttttgtcatttcacacaacagctgaaggattctgtccccacctcgtcctctgtgaagtctgctggacgtacctgccagaatcttctgaagatgacgtttgctgaacactgacccacaggggtttgatggattattgacaatgagacaagctgtcttttcatcaattagatattccagttgtttcaggtcaatttcccaagatttctctggctggagagaaagaaaggatgagactaagatgattctgaaacatttagggggaatcctcacttatctcaagggtccaatgtaagcaataaagtctgtctctggcttcaaacacaaaaaa

SEQ ID NO: 91599 - DNA, 685 bp, Homo Sapiens
gtatggcggtcaagctcaggtgactccacagtggccctgtagccgggcaagcaggagcaggtctctctgcatctgttctctgaggaactcaagtttggttgccagaaaaatgtgcttcattcccccctggttaatttttacacaccctaggaaacatttccaagatcctgtgatggcgagacaaatgatccttaaagaaggtgtggggtctttcccaacctgaggatttctgaaaggttcacaggttcaatatttaatgcttcagaagcatgtgaggttcccaacactgtcagcaaaaaccttaggagaaaacttaaaaatatatgaatacatgcgcaatacacagctacagacacacattctgttgacaaggaaaaaccttcaaagcatgtttctttcccttcaccacaacagaacatgcagtactaaagcaatatatttgtgattccccatgtaattcttcaatgttaaacagtgcagtcctctttcgaaagctaagatgaccatgcgccctttcctctgtacatatacccttaagaacgccccctccacacactgccccccagtatatgccgcattgtactgctgtgttatatgctatgtacatgtcagaaaccattagcattgcatgcaggtttcatattctttctaagatggaaagtaataaaatatatttgaaatgtac

SEQ ID NO: 91600 - DNA, 651 bp, Homo Sapiens
  misc_feature (436)..(459): n is a, c, g, or t
  misc_feature (504)..(584): n is a, c, g, or t
cagcctccccacagtctcccaggggcacgtagcctcagaggagcttcctgtctgttaccagagagaagccctgtgcctaagaaactgaagcagcaggtaaagggacaggtgacctaaaagaagacaaaattgctgggagatccccggagatcccaggcaccactgatggtgccttcaaaagcttggctcagagatctcttggagcagcctggagtcaggggcctagcttaaattccagttcagccacttgctagcaggctgtgggaccttgagcaagccacagaatgttcctgggtctctttcttcttctgaaaatggaaactttgcaaactataaagactcaagcaaatgaaagccagaggatagtaaatccaagatctggttctttgaaaggtccaaaaaataataataataacctcctcatgaggctgatggnnnnnnnnnnnnnnnnnnnnnnnntgcaagattcggaataaaaaaggaatcataaaaagagtaattatnnnnnnnnnnnnnnnnnnnnnnnnnnnnnnnnnnnnnnnnnnnnnnnnnnnnnnnnnnnnnnnnnnnnnnnnnnnnnnnnntgctatgatcacacctgtgaatagccacagcagtctagcctgagcaacatataagaccccgtctctt

SEQ ID NO: 91601 - DNA, 749 bp, Homo Sapiens
gggctagagccaataattcaggacagtactggcaccaagctccttgttggcttgaagacatcaacacagtccttgatcccaagagagctatggaggctgcaacagcagcaggacaaggctgccttccctgaggtttggttaaaaacacatcgctcaagtgtgtcctcaagagccagttatggccctgtgttaataggcctcactgggaatactatgtggcagtggatgcagcgagagctaccttttcagtataaggtattttcagcatacctgagggacttccagagagtccttggcaggggctcagcgattgacagttcacgctaagatactggttgacagtctccccttatccctagctgaaaaagaggagccccttagggcctcccagagacagacaagctgagcccaactcagcacagtatgaagtagccaatcagctgcttgcccaaggaaactgtttttaccagttttagcgaaatagcactggacagttgccaatcactaacactgtgtgtgattgcacccaagtatttccctccatcagtgaggcagtacagtggggcctctgtatgtgtttgactaaattgcatttctgttttgctggagaaaagaccaaactgaaagaggcaggcttctctttgtgctcctgatacgacgttgccacagttaatccgttctgatctctgctttgattaacagaattagagaaataaactgtccaggatgatctgtatacgtcaggaaaa

SEQ ID NO: 91602 - DNA, 402 bp, Homo Sapiens
cgcccgggggtcttggggcgggactccacctgccgccaccactcgcttcgctgatgacatcccattagcagtaatggagttagtgagtgcatggcggagactggacccaggccgcctacaagggccagaatcccaccccagccatagcctcgaggcaggaagtgcagtgggcaagctccctgccaaagcccaggaacgtgtgattttgtatccagtacagcttcatctcggtggattttccttcctaaccacctcctcctccacaggttttgtgaccgtgctgacccctacgcagacctcatgagagtcacaagccatcgcaactgacagtttaaacgtctgcctcttatctctaagggagggaactatctcttatgcaatgtgatatccatggctgctaaa

SEQ ID NO: 91603 - DNA, 275 bp, Homo Sapiens
aaactacctttcccagctcttcctgcagctaggggcagccctgggataaattctggacaatgaaatacaggcagaagtaaatcatatacgatttccatgaagggaccttaaacaaaagtgtgcccttctcttccccacacattcctcctcctgtctgaaatgtagatgcaactgctggcatttgagcagccatcttgggccatgtggtagcttcttatggatgatctaggactaattcaagggtctagatttacctccaaactttgtttatctac

SEQ ID NO: 91604 - DNA, 662 bp, Homo Sapiens
  misc_feature (365)..(365): n is a, c, g, or t
tttaaaaaatgtaacaaactgacagccttgaaatctccagaaagtgctatgtaaacattctttaaagcagtattgaaaaaaagataaattctctgcacggtgagggaggagagtggatacaaacagcaaattcaaagccactcttagaccgtgagaagtaactagttggtctgggaagtgatttagcagtcccctaaaatacaacacgttcttgaaagccatgaatccacacgaagcttcaagagagaagcccttgacaaagctggggcaagaccggcccttaggacagccagcaacgctacttcaccaccctgctccagcggactgcggctgccgcgctgcccacaggaactcaagttccgccncagccaggtcagagagacagacaccccagagaggccggcttccccagctcgctccgtgaagcctgggcagctcagcagcacgaaccgacacctcaatctccgcagcatttacaaatgggccgccacaatcgccgcctctgtcggagccccgcccccgtcccgaggtcctggcttccatgtcttgattaaacagcaggccaagtaaaatgtttaaagaaatcaaatgaagtgccatttataaccgttataactgaaacaaacgactgctaaagacaaaactatttcacagaaatttgg

SEQ ID NO: 91605 - DNA, 1037 bp, Homo Sapiens
  misc_feature (17)..(17): n is a, c, g, or t
ctaaagggactaagctngcggccgcgatcccccgacgggcgcgccggcccctctgatctggctcccttggaaagatgccacacgtggcggtcgcaagtttattcgactgaaaacgcccccgaggcgctgggagaggaaactgcaagagaggtgcacgccctcggccgcctcgccgtcgagccaaagccccaggacattcacccgatcaccccgacgcgggtggcgagggtcccgccgagcgccaggtctaagagacactttttcccgagtccactgacggcttctgaacccctgctccggccggtccgcaccgttccggcattctcttgctcagtaacaatttcgcagaatcccatcacgtcacaaaccaaaccccctccaattggccagtggggagggtgattcaactctgtttactttctccccctgccagtcagaacggccttcggtggagaggtgcgtctagaactgaggcgtgcggccaatccgactgttccgtttcgctgcctcgtgctacccctacagcctcgaacactgacatttaaaagggtaacagctgggaggcagggaaggggcagccgcacactttcggagtgcctcgcggtcccgtggccggtccgggcctcctggctcacgttccagcttgcggagctttgggacacatctttcctagtcagttgcgctcgttcctatggcaaaagagaacttcagcttcggttttccagctcccaaacagttaagtgacttcctgcaaacgctacagtcccagcaaccagccttccaatcaaaagtaagttggttgatgtcactggcattggctcggccaatcacaagggcgttccgaaagcaagcgctcgacacttgtaaacgcgaagagctgtagtgaaactggacacatctttgtattttgtgttgctggtagtaaatttgagttatggatgagaggacaggggtgatgaataaatgcagtgtgaatctataattaaaaaaaccccattatgtcaggataagtccaagaataaacacaaatgagtaag

SEQ ID NO: 91606 - DNA, 469 bp, Homo Sapiens
cacctggggagcggtcctgctggttctgaaattaaatgtaatgccaaacgttcttgccttagccacaccaaaaaattgggtgtggcggctgcccgcggcgagtgatggagacacagaccaagagaagaaaaaaactgtaggttttattgagcagagtgacagtacaaagcttacacagcatggaaggggtccggagagggtagccactgttggttttgggtgattgccttttaatctctttaaggcgggaaatacatgtggtgggaagatgttaccagagagagaaacaaaggcagtaaattattttgtgacatgtcttagattttgaggaaaaacagaattgcaacttaggttttatctaattttatctactttatgaccttgcagcagcatggcaaaagagacaggattttacaggactttacaaagtatgttcacaaggaattggaattgggagcatagataaggt

SEQ ID NO: 91607 - DNA, 407 bp, Homo Sapiens
  misc_feature (338)..(338): n is a, c, g, or t
ttggttaaatgtctttaatgagccaagcacggtgtatcctccctgccttactccatttagtcatcaggacaaagcaggttttattaagctccatgtaggactgagatggtgaaggaacttgcccaaggatcacacagcaagtcagtggtctagctgagaccccaactcaaggctttcagcaaacccaattccgtgtctggagtgtggcctcaagccacatgtcatttgttccttagactcagacccgtctcgcccccacaacgtgtttatcctttgcatagccatgtggtgcttctcagggagactactgaaggaaagaggcagtgctcagaaacatncagattcacacatctactgaagcagtctagggctccccacctgatcctgcactccagccgcccagtgct

SEQ ID NO: 91608 - DNA, 501 bp, Homo Sapiens
aataataattggctttctgccccaactaaaggaattttaggcttctgcaacaagtggaggaggcattttgaagatgggacacaaagaagtcttctttctccagatccagaagtcaggccttgtaagaattcaagccaaaaaaagttcatccatgggaaaaacggttcttctatcatccagcacgtatttgtgccaacagagctgagggacttgagtaattcaagaggctaggggttggggggcagatgtgtccagtggctcccacagccccgccgtcctgaaagtcacgccagttaatgtgcctcggggtggatcagccctcccgacagatgactactaggaaattaatccccagttaataatgtgctttggaccaagtaagtcaagattatttttcctacaattatacaaagatatgcttttccagaagggaacttctggaaaaagaacaaataacactatgcttaaaatattattcacatatttagagaagaaagaact

SEQ ID NO: 91609 - DNA, 500 bp, Homo Sapiens
catctgtcattgttttgggagccccgatcagagcttgtggagcgccaccttccagggctcagtggctgtgttgctctcctgaatttgcttcttgagctctagctgctccttggcaggctgaccccccacagcaggctattaacataggcatccttcacgctcacacccaggcgctcgcttctcatcttcaccctcttcccggtttatcttttaccctcagactccaattcccatctttctgccacatttacatctcaagccaggcacttcccctgagccaggtatttatctccagctgtccccttgaagcccacagactccttaaggtcaccttgtccacagtgagctcttctgtgcaaaccaggcacatgagccagagagctagccgcccacccgaaactggtccctggacccctccctctcctgatcatccactatacccaggctgacaggaagtcagttttactgtttatcaataaatcaataaatcccagaaaaaa

SEQ ID NO: 91610 - DNA, 512 bp, Homo Sapiens
agcaacaacaacagtgtggcttgaattaaggaaagtttaacaatgaatacagtattgccaagtcatcatttatgggtggagacgttgaccacagcagttgaggtgctttcaactggatcttatgccctttattttaatcccaattgatagttcctcatttgtattttatgacttagaaatactcctacgtgatgctcgtttgtttttctcccaggcttctggaaagtgctgatcatgattgcttcctatcatttggatcccaaagttgataacttaacataagtgactgaggttttagtagaactgggttttactaatcgtatctcctccttgaggtgctgttcccttcattcctttcctttatgacaggtgaatgcattggctatgctgattttatttgcatcctggcgagtcttggagaatcaatctcgttaaaatgatgactgcatttgcctttggagaagaggtttattgtctaagtaaaactcttatgtgaaggtgtcatttatgta

SEQ ID NO: 91611 - DNA, 715 bp, Homo Sapiens
  misc_feature (136)..(136): n is a, c, g, or t
  misc_feature (303)..(338): n is a, c, g, or t
aatgctcatctctatttgcagccaggaatgaacgatgggtcagatgatatggatacgtcagtagaagatataggtggtcgttcatgtgtcactcgctttgtgagaaccttgttattaattatggaacatggtgtanaacctcacagtaaacatcttacagagtattttgccttcctttacgaatttgcaaaaatgggtgaagaagagagccaatttttgctttcattgcaagctatatctacaatggtacatttttacatgggaacaaaaggacctgaaaatcctcaagttgaagtgttatcnnnnnnnnnnnnnnnnnnnnnnnnnnnnnnnnnnnntatcctctctctggcagaagaaaaatacaggccagctgcccttgaaaagatgatagctttagttgctcttttggttgaacagtctcgatcagaaaggtgaaatgtttcgaatttaaaatgtttaaagcatgtttggttttattatttttacataattgtttaccactagtttttccactagctttttattatatatgtttaattatgtaattgttattcactagcttttattatataattccttttaaataatactactattaatcaactcttgtggcataagaatttcagttttttctaccaaacttttacttcatctatgagtcgtgttagaaatagtcaccgaaaaaatatacagtaaaatatctaacaaaaaa

SEQ ID NO: 91612 - DNA, 696 bp, Homo Sapiens
  misc_feature (626)..(635): n is a, c, g, or t
atgctaatccttcagaagcgtgtgacttccgatgagaggagcaatttccaggaagcatgtaaataatattttagattcctatgagatgtttaatttgcagtcaaaagctgtgaaaagaaaaactactgcagaaaacgtaaacacacagagttctagggattcagaagctaccagaaaaaatacaaatgatgcatttttgtacatttatgaatcaggtggtccaggccatagcaaaatgacagagccatctttacaaaacaaagacagctcttgctcagaatcaaagatgttagaacaagagacaattgtagcatcagaagctggagaaaatgagaaacataaaaaatctttcctggaacatagctctttagaaaatccgtgtggaaccagtttagaaatgtttttaagcccttttcagacaccatgtcactttgaggagagtgggcaggatctagaaatatggaaagaaagtactactgttaatggcatggctgccaacatcttgaaaaataatagaattcagaatcaaccaaagagatttaaagatgctactgaagtgggatgccagcctctgccttttgcaacaacattatggggagtacatagtgctcagacagagaaagagnnnnnnnnnngaatctagcaattgtggaagaagaaatgtttttagttatgggcgagttaaattatgtccca

SEQ ID NO: 91613 - DNA, 489 bp, Homo Sapiens
ggggtgttctcaccatgccctttctacaaacaaaaaaatgaagatgtggagacttggagacaggtggcacctcgtgcttcctccgaagggagagcccatttcctaacagctggatcaaaggcatgaaatgaacatggagtccctgaagatgaagagaaggcatggcttccagggagaaattgtacattacaggaatgcagatgtgattcctatggatgagggtaacctagaggctagaagaacaataggacagaagaagcctgggtacctgaacaaccttgtggagcatagacacctacgtggcctggactgccagctcacaatgggcctctctgtgagagaaggaaacttccctcttgtttaagcaactgtgcttttgagaatctcttggtctataccctaatgaataaggccatcataaatggatatcaaagtaaggaaatttgtgtaaatgatttaataaaacattacctcaggtatgaaataaaa

SEQ ID NO: 91614 - DNA, 729 bp, Homo Sapiens
tgatgtaactaaaggttgaaatcctgtgcctactattgctcaggggttttgaggagatcaccactgctaaaagcagtgacttacaggtaagaaggaactcttacaggattccataactcacttgctgggctcaaaaacattgtgcaaaagcctctctcttaaatagctcatggccagagacaactttaacacctcttctgtatgataaatcatgttattgcaatttatgtgacactagtatctactgtacagtaaccactccaagtcctcttaagcggaggcttctcaatatactgatttctaatgccccacaagtgccataaagtgattgctgttgaccattgtcttgttttaatgtcccctaaataataataaacttgaatgctaaaaaaaattattgtcattcaggaatatatttcttgtaaaccattgtatgatgaaaaaaataaatttccctcttggcaacttaatttgtagataactgaggttgtttttagataggagtcctacactgaatttggaatctaggtgactgtttaatgtcattaagggaatattgtattggctacaatggctcagtaaagtaactggtttctatgtggttatatcaatctatttctgtaacaccgtacactagttttccccctagagtactccttgtaatgctgagaaagtgtcagaaataatgactgtccacctatatctgcaataaaacgtagagcatggaaa

SEQ ID NO: 91615 - DNA, 744 bp, Homo Sapiens
  misc_feature (103)..(113): n is a, c, g, or t
  misc_feature (478)..(491): n is a, c, g, or t
ctattagaaaagacccacaaactggctgaaaagttctcaaacttactagacctggcttccccccacacaaagatttttttgtgatcataaacattagagtgannnnnnnnnnnaaagaaaaacaagattgttaagggacacagatcaaggggaaggcaaggttctgctttttctgagcagaaagatcagatatgcaggtgcagcattcattttaagtgactggagcaggttgtatcagtttattaattggtctcgttgaactgaagtactttccaggatttcagaaagtgcagtttcagcttgttggtaccgagaattgaaatttgcattgactgtggcagtgtaagaaatttttctgagaaggtagttgtagataagtaattacataagagtgaaataataaggtgaaccagtctgaagtaatagttctgaacaagtctgccaacatttgagacatgtataccataatctcagcagnnnnnnnnnnnnnngtgcggtaataatgttgaaatgggactggagatgtcaaatgggttggtttaaaaatatccctaaactgctttagaaactaaacgttggagttgaataaaagtgaatctggatttcctgaatagcaccgtggcttgagtgtgctgtcagtatgtaagccagtccaccaacttaagacagaagtgttgctattccataaatacagtagaactccatatgctgagtttttcaatttcttctgttagaaagtttgga

SEQ ID NO: 91616 - DNA, 478 bp, Homo Sapiens
cggtgccagattggcctcactttttggactggatcaggcagctgctggccatggaaatgaatttttccagtacacagccccaaaacagcctaagaaaggccagggaacggcagcaacaggaaatcaggcaacaccaaaaacagcaccagccaccatgagcactcccacaatactggtcgcaacagcagtccatgcatatcgatacacaaatggtcaattatgtaaagcagggcaaatttggtgctgcagttctggggaaccacacaaccatgagaggtgagagtgctcccacatctcatgtatattcagatgtcccaaataataccaatgagctggcttttatctggcttgcctgatgtcttgtttatcagaagataaggatgattgtttgtattgaatgttaatttataacatcaagcatatagtaaatgatcacattttgcttactattgtgcattaaaacaaatcaaaccattaa

SEQ ID NO: 91617 - DNA, 938 bp, Homo Sapiens
tgcggccgcgcagggccttgcaggaccgctggggaggatgttgttaacgtaaagagccaggctgatgaggaaggttcatgagtcctttgggtataagcgggagttggggcggccggagggcagatgactctgagaagggcaagcactttaaccttttaagcccaaccagatgagttgcctgcagtttcggaggccttcagagcatttcactagacctctgtctgtgtcggtccagtgtctttagccaagctttgattaaagatgacttccttgtttgctcaagaaattcgcctttctaaaagacatgaagaaatagtatcacaaagattaatgttacttcaacaaatggagaataaattgggtgatcaacacacagaaaaggcatctcaactccaaactgttgagactgcttttaaaaggaaccttagtcttttaaaggatatagaagcagcagaaaagtcactacagaccaggattcacccacttccacggcctgaggtggtttctcttgagactcgttactgggcatcagtagaagaatatattcccaaatgggaacagtttcttttaggaagagcaccatatccttttgctgttgaaaatcaaaatgaagcagaaaataccattcaaaatgaggcacagcgataacttcttcacatgctatttcaaaaagcctgtttaataaagctgaatgttaaggtgtatgtaggttattgcaggaactttaggaattaaatatgttcatattcttcgattatctcctaagtgacagtgaagatatgagaatttactggcaagtcacatgttatcacctactactatttcaaggtcatgaatttgctttctaccaaacccatagatgtgttaaacacgaatattaaaaggtggactctttattaattaaattattgtcagtgttgtgagtgtgttgctttaaa

SEQ ID NO: 91618 - DNA, 978 bp, Homo Sapiens
  misc_feature (817)..(817): n is a, c, g, or t
ttttttgcccactgaaagtgaaagggcaggtgcctctgaaggttgatgggtacatgagggcatgactctagggggggcgcccttgtacctgccaacttcaacagtcttcgcaccgggctcctccactggcaatggcccggcgacttccactggaggatgaggagcccagggagtccgaagaagagctgctaatgcggtcactgtcctgacctcgaccccaggaggtgggggcccagccccctcgaagtggtctcaggcttaaggtgggggaactatccgatgttgtttcaggggcactgctgtcaatgctggccatgcctgtgtgcttcttcttaggccgtcctggggacccccatccccgtccattatagcctccacgactgccaagtgccaagcggctaggaaccttcccttctggccttggggtcaaagctgcctcagatggaagaccctcacagggggaatgtggggaactctcaggcacattcttctctgtgaagccctcagtggggcctggcccagcccctgccacactccctggttgagcaggccctgcagagcctgaggtcagtggttgcagggcccctggggcagatgggcccccgtgctttgaaggagacctctggctggctgtggttgggcggctagatgagtagaaagaactcagcgtctgtggcttatgtgtctggctctctcggtccaagagtttgtctaagatctggaagacagaagcagtgacctccagagaagcagtgacaggatgccctttagctcctgacttctattaccttcctttctccttgaaacagccaattgntacatcctcagggagccttccccacttacaaccacaggatgacctcctggtttacatgtctttttgtaacttatttaaccccaacatatcttggtatcctccattaacaccacagggcagaatatactgatagtcaataaatactgaaataagtgaaaaaa

SEQ ID NO: 91619 - DNA, 679 bp, Homo Sapiens
gtgcagtgtcacacaccaaagagtcatcattcagattgtgccacagaggcatcattcttccatatccaaagcagactgacagtcgatagcgatattcagtcatctgattttcctgagcctccagacgccctagaagcagacactttcccagatgaaattcatcaccctaagatgactgtggagccatcatttaatgatgctcatgtatccaaattcagtgaccaaaatagcacagaactgatgaatagtgttatggtcagaacagaagaagaaatctctgacaccgaccttaaacaagaggaatcaccctctgatttagccagtgcttatgttactgagggtttagagtctcccactatagaagaacaagttgatcaaacaattgatgatgaaacaatacttatcgttccttcaccacatggctttatccaggcatctgatgttatagatactgaatctgtcttgcctttgacaacactaacaggtactgtaatataatacttactatgtgcctgataaattttagatggaaaaaaacagacatttaattaacttgtttcagtctttcttgatccaataagctactagtcctgttgagttctacactgtggtagaataccttaaattcttgacatggattagagaataaatatatacatttaagactaacttgaaactc

SEQ ID NO: 91620 - DNA, 578 bp, Homo Sapiens
tccatcgcagcacactgcattagtgtccgactccctcctcttagaacaggtgaggtgctgccacttcatgaggccaattttcccagcttcccattgccgcaccacaaacatcctctaaagccagacattcagccctttcctcaatcagtctctgaatcatgtccagggaagttcaagagtgggtttccacaagtttccatgttttttacacatacatttccaaaatacaatgtgattcctttgaagaggaaaatgaataatacattgaattagaaacataaataaaatgaccagtaattgtgaaaattacagttcttttcaacctactttcatactgaagatgcagcaaaatgtgaatgggaaaagagatggcctgagaagagagatcaaatggaaaggagaggaaagaactcagtgctgcctattagtagttaattctgtcactcaccactacatcacttgagacaaatctatgccactcagaatctccttctttcctggacttaactctaattctagagtctctgttactgcttgggccatgacctgggcatactaataaagtatggtattgaacc

SEQ ID NO: 91621 - DNA, 208 bp, Homo Sapiens
ttttatgcccgtacggtaaattttattgtatataagtgacatattaacaaatgaatatgatataaaaagcatatataataagacaaatgctaaacaagtcatgttgctatgagagtagaaatatacacactggtggggctttacaggggagaagggagtagcaaaaaccggatttgggcttaaagtgaaaaatcaaatactattaggc

SEQ ID NO: 91622 - DNA, 451 bp, Homo Sapiens
cagaaagattaaggaaataatctagagaagattggatgctggaagaaagggaattgaaaggcttaaaaatgacacccaagttgttagttcttgccacagggtgagtggtacaattaaaatagggttgttgggggagatgttaatttgggaaatggaaagaagatatataaaattttggacaagtgtagaagtctactaataagattaaggtagattatattttaaattaatactgtggcaattaaattttacagcaagtagcaaaaaagtactgctttccccagatgacatctggatgctttgctattccctccttgatgtccatagtctgtttctgtctcctagtcaaaacagtgttttgatgcgctcagccctagatcattcttactttttaaagatcttcagctattctctttgtatcatgcatcatcactaaaaaatgccatccgtc

SEQ ID NO: 91623 - DNA, 638 bp, Homo Sapiens
ggtttcccacggcatctcaaacatgcttctgtcactgagaaatggagattgcctgctagcaacaggtccggttgattcttcactgatggaaatgcattcctcagctgagaagccagtctctccagtacattccacagtggtcaacctctggtcccccttgaccctggtccttttccctcctctccttccccaagaaaaaagagttctcatgccattgccggttggtgactgacttatctggaccctcatagaatgaatgctgttcaagggatcttcttctgatggcctgccaaggtgatgcctattctcaggaggttctgatgtcatctgggtgaccagctggagggaggtgaagccagcagtgaggaagctgtccctgtactggaccattttgatggcgctgagccagtcatccacggtggtaaaggccgtgaagtctgggatggagcggtcgatcacgggctgggaaggcacggcggtgatggttgccacagtcttgagacttgccgggttccggatcatcttatctagggtgttgacaatctccgcaaaccggggccggctgttccggtcccttctgccacagtccagcatgagctgtgtaaagcacctgggacagccatgggtgggggcagccg

SEQ ID NO: 91624 - DNA, 1254 bp, Homo Sapiens
cagtcgacggtaccggacatatgcccgggaattcggccattacggccgggtgctgtccaaatccaagtgagaagagatgggaaacttcttctgtctcagaatgtggaaggcattcagcagtttcagcttagaggaaaacctaaagctaaatacctcgttcgactgaaaggaaacaagaaaggagcatctatgttgaaaattctagctaccacaaggcctactaagcagtcatttccctctcttcctgaagacacaagaatcaaagcctttgacaagctccgtacctgttcctcggccaccgtggcttggctaggcactcaggaaaggaacaagtttcgcatctacaaaaaagaagtggatgataactacaatgaagaccagaagaaaagagagcaaaaccaatgtctaggaccagatataaggaagaagtcagaaaaggtcctctgtaaatatttccacagtcaaaacctgcagaaagcagtgaccacagaaacaattaaaggtcttcagcctggcaaatcttacctgctggatgtttatgtcataggacattggggggcactctgtaaagtatcagagtaaggttgtgaaaactagaaagttctgttagttaccttcttatagagatatattatgtagaactccagaagggacattaaatcactttaagtataaactgactactcccacagttgagagaagttgtgacctgtacttgtactatggaaggaaggatatcaacgtgtgtatattgatgtttatataagtaactcttgaaggagacttgttctagcgtgccccatggtacctagtgtgtgtctgatgccggttggtgtcaaagatagagggcttcttgaaggaacttgccattccttgctttgaccactgcatgaactgcttctaaattattttattacctaaaaatttaaaatatgccattcattgcacacacccacaaatgcaaatcattcctctctatagatgctaggatatatataaattattttataaattcttgttttaaatgtcagtgtttctatgattgtaaactattaaattcttttcctattaaagtacagatctaatctaagtattattaagttgatagccctctagtcagttatattgctattgtaaattcttgtttgttgagtaaaatgtttaaatactatatgtatctcatgtacaaagttgacatacattatattcatgtacataaaattaaagagattagattataaaatgttcattttc

SEQ ID NO: 91625 - DNA, 908 bp, Homo Sapiens
  misc_feature (374)..(399): n is a, c, g, or t
cagtcgacggtaccggacatatgcccgggaattcggccattacggccggggtttggattagtgtcttaaaagattactgtggtgctcagccaaatcttatcaagtcgtgcaggaacccatatgttaagaaaatgagcttgtagtcaaaagactcatctaatttgagctgagtggagctcagctgtgtttgacccacatcctcccaatttgttctgtatttaggtagttatttatacaagagtctttaagtcattctaaatattttttcttgaaagttttaactaagtgagaaataaggtagtcttcaaaatcttggtcatctgttcggatgagggaaagtacctcatgagttgcacattacttctacaacaggnnnnnnnnnnnnnnnnnnnnnnnnnncagtcatcttcaaaggcagcattattagattccagcaatctgaaatctattattccagcagtctgaacacctaaatatgttatattggaaatcatgactgtgagactaatattgtcctctaggatggaggtatattggagaagggtggttagcacattcatcagacatctgcttatgctgtggtcaaggccagtcattgacaaattatatcaggatcaatatcagaccctccaaaaagtatttgaaatatattacagtcatcacggtacaagtacactcacctgttatactaacaagtatctaaccgtggttaaaaaccagtgagtcacggttaaacacattgtgacaatgttctaaacgacattaaaaaattcgcaacaaacttcaactcaacccacacacttcacacctcttctagaagccaacttccagcacgaccagactctcacacttacaggaccgccagttcccaacccagcatgctccatgcgaaaacccccgagaaatct

SEQ ID NO: 91626 - DNA, 582 bp, Homo Sapiens
cgccacccggaaatacttgggttgcgctagaatacgcgatgggtctgtgttcgggtaacctggtgctcatggtgggttattactattgttgttttactttactgcttttcttgctttcattagaaatgttactgagagaagcctcaaagagcgcagacctggggtcgtttggatgggttcatttcaactcaaatccactaattcaattcagttccacgactagtttccagcgcacaggtacacatggtagacgtcaagtgtatgccgtatgcatatgcacagagacgctatttgaaggcaactcttggagaattttgagataaaattcactctcctggagttacattcgcaatatatgaatatggaaaacaggcaatcagttgtatttaaaatttgccaacacgtcccagcaatccactctcacctaagaatccaaaatggggcattgaaaagatttactggcattctggttgtttaatattgaaaacaagcgtaaatcagttcatttctctttatatttcttttcaaatttaacaataccataataagtgtaagtaataaaaccatattttgctaaagaaa

SEQ ID NO: 91627 - DNA, 485 bp, Homo Sapiens
cattctccaagccctgtgttaaatagagcttctctcagggaaagatttcattctgattggtgttcaccttcaaactgcgatgagatccatgaccgggtaaaaaatgtcttgaaatcacatcaggctcatcaaagacatttatatgatgagagagacctagagaaagatgatgaactggaactgaaaagaagtcttttatgtagagactctgcctatgacagtgaccccgagtatagctcatgtcagcagccacgtggcactttccatttggatgacggtgaatactggtccaacagggcagcctcttataagggaaaatcccaccgacccatctttgagaacagcatggacaagatgtacaggaacttatacaaaaaggcctatagttctgcttcacatacacaggaaagcttctgagaccatccatgataaacctcattagtgtccgtgtcaatttctcaatgaaaatgtttaaaaagaaaaaa

SEQ ID NO: 91628 - DNA, 619 bp, Homo Sapiens
gatataagaagaatttttgtagatgacagcttcaatccagggaagagatgatggtggcttggaatagggcgttaatagtagaggtcaaaagaggtggtcagctttagatatattgtgaaggtagggtctaccagatttgctaatggattggatatgggtgctaaaagaagaatcaaggatgacttcagggtttttggcctgagcaaccagaagtatggcattgccatttactgagttggagaagactgaaggagaagcaagtttgggagggaagaccaagaattcagttttggatatgctgagtgtgagctttaattagatttctagatagagatgtcaaataggcagttttatgagatcacagggagtgaggacatctaagaaaggcgaatggtccaaggaaacttcttccccttaaaaaatgagtgtacagctaaaatcataagcaactttaaaggcatagattgaaatagtataaaatgtagaaaacctcccataccttgaaagctcacttcaactgccttctgcccaacttaacattttaaagacattttgatatacatacaaatctaagctccaagaagcctaagaaaaccccttaggggttaccttggcccat

SEQ ID NO: 91629 - DNA, 170 bp, Homo Sapiens
tttttttaattttgcattctatatatttgagaaactaatgtataaaaattcaagataattacaattggaaggggaccaataattccactttttaatcgaaaataatccatatactcccaataaactcacagtaaaataagcttcaaaaagccttaagacaccaaaagagg

SEQ ID NO: 91630 - DNA, 596 bp, Homo Sapiens
atctcccagtttgactttaaagctaagaagtatagaaaggtcgctggcaaagagatctactcggataccttagagagcacgcccatgctggagaaggagaagtttccgcaggactacttccccgagacacagttaccgacaggaaatgaacacagaggctccccggggcaaatggcctccccgagagaggaggcggacatgtttggaatcagagacaagtgtctggtgcagcacgcagggagcctgccaccccgccaccccgccatagagctccctgggtcgtctgggcatggccccatgcagcagccagaccagtagcctggggatgccttggccagcctcctggagctttggcacagcccatgttgtttggcaagcagggcagcctgagcacagcaggggatgtgggctcagtaccagagccagctcgtggtgtgaggacggatcctcctcgacgagtagagccatagcctggcgtccaagtgcgtggccaggccgggaggagtgtacaggaagtctctgtaccttatgctcaattcttctggaagcctaaagctgctctgaaaaataaagcctattacttctttataaaaaaa

SEQ ID NO: 91631 - DNA, 1089 bp, Homo Sapiens
gcggccgccccgggcaccgcggtgctgctggtcacggccaacgtgggctcgctcttcgacgacccagaaaacctgcagaagaactggcttcgggaattttaccaggtcgtgcacacacacaagccgcacttcatggccttgcactgtcaggagtttggagggaagaactacgaggcctccatgtcccacgtggacaagttcgtcaaagaactattgtcgagtgatgcgatgaaagaatataacagggctcgagtctacctggatgaaaactacaaatcccaggagcacttcacggcactaggaagcttttattttcttcatgagtccttaaaaaacatctaccagtttgactttaaagctaagaagtatagaaaggtcgctggcaaagagatctactcggataccttagagagcacgcccatgctggagaaggagaagtttccgcaggactacttccccgagtgcaaatggtcaagaaaaggcttcatccggacgaggtggtgcattgcagactgtgcctttgacttggtgaatatccatcttttccatgatgcttccaatctggtcgcctgggaaacaagcccttccgtgtactcgggaatccggcacaaggcactgggctacgtgctggacagaatcattgatcagcgattcgagaaggtttcctactttgtatttggtgatttcaacttccggctggattccaagtccgtcgtggagacgtctgcacaaaagccaccatgcagacggtccgggccgccgacaccaatgaagtggtgaagctcatatttcgtgagtcggacaacgaccggaaggttatgctccagttagaaaagaaactcttcgactacttcaaccaggaggttttccgagacaacaacggcaccgcgcgccagtgtctctgcaggagtggcgtgagcggcggccgggacagctcctgacagatgggcaggatcagccgctgccttgtcattgtccacagcgccctgcctgccttcactttgtaatcaagaagaatgtgggagaccatgcgaaattggtgatcatgtttgtgaaaaatctcagagagatacaaattatcaattcaac

SEQ ID NO: 91632 - DNA, 211 bp, Homo Sapiens
  misc_feature (92)..(103): n is a, c, g, or t
ccccaattgctaaaacttagcactctgttttgtgataatttcctagtttgcctcctttgctaactagaatttctgggagcagaacttatgcnnnnnnnnnnnnaatcttcatgaccctgacagcaggacagcacttggtactaatgtgctctaaaataattcaattggaaaagcaagtagtatccttttctaggtagtacaagactatatt

SEQ ID NO: 91633 - DNA, 490 bp, Homo Sapiens
gtcacactcaccttgcccctcacctctggccttgacaaccatcttgctttacaagtgaattccgccaggtttctaaagatggtcacaacacaggtgccaggaatgccttcctgggtacatggagttcccgcccacgaccacagaagacattacacaaaactggccaaaaggtatgaaatggcaatctgacaacaacctgacttaaaagccagtaaagacatcagaaaagatgttggtgtgcagcaagaaacccttcgcagcacctcacatgggcaaaaccaaagaggtaagaccctgatcttcctaatggcagacagtgaactacgaccaccccagaaatcacataaaagcatagaaggtaatttctattcaacaaataattactggcactcacagagaaaagcatggtgggacacaaattaatcaggcaaggcactgccctcgaggcactttcagtcttggcggggagtagtggagggcaaaaaagaaa

SEQ ID NO: 91634 - DNA, 518 bp, Homo Sapiens
acttgaacacagagtctttgtgagagagattcagaagaagagtaccatagcatggtatgaagacttacctgcttcctgtcactactgcgtctgacctgagtttatattgctgctaccgctgtgtaaaaacagtacgtgcagtatactgtactcatagccatttcataatataggacctagactctcatttgtaaacgttctaaccctagtttataatgggggaaattattcagatatcatttttaaatgaattcctacaaatacaatggttttaaaattgggtttgctgaatatatatacatcttttccttctttgtgtatggatagaccacggtatgcatatctatcgacactataaatatatataaatccttagaagaattgttcttttttaaaggtctattattggattcacaatgcactttgagtttgattgtttagatatacaattcagagcagaagttggcagataccacgggaaaaactttctgaaatttctgtaacaaatgttttgcaat

SEQ ID NO: 91635 - DNA, 514 bp, Homo Sapiens
cctagcaagacagcgactgggcaacgcacctgtgccaaaccctgccagaagcccagcacgtccaaggtgatcctgagggctgtggcggacaaggggacctgcaagtatgtgtccctggccaccctgaagaaggctgtttccaccacgggttacgacatggcccgaaatgcctatcacttcaagcgtgtgctcaaggggctggtggacaagggctcagcaggtgaccggcaggggggcctcaggctccttcaccctgggcaagaagcaggcctccaagtccaagctcaaggtcaagaggcaacgacagcagaggtggcgctctgggcagcgcccctttggacagcacaggtcactactgggctccaaacaggggcacaagcggcttatcaagggggttcgaagggtggccaagtgccactgcaattaatgaggcaggccaggcaagcagtcaggggtgccaagaccgccattggctcagtgcagtgggaataaaaggaacataacttatttcaaa

SEQ ID NO: 91636 - DNA, 538 bp, Homo Sapiens
aatctaaaaggaagatgcattaaaattctgagaggtagaaaaaaacacagccatcaactctagggctactattacgtcttacagaatacctattgagatattacacctattttatcttaaagagctagggtaagtttcattcatgtcactgaatggaatgctttaatgctcacagataccttcagtcataattactgccaccactaactggcactgtcaactcacttctggcttcagataattaggctattcaagtatatgaaaagagtccaagaggatgaaactaggcaatacagcaacaaagctcctccattaatctatctgccactcagccagtcaggtgcctctgactgccctgataaaagatggccaggttactttgctgccctcttcagtttcttaaagtttgaagagctgggaagaaataggaataaactcagaagcaagaaggtgtcgaactacctcttagcaaagaagcaaaaatgaattcaaccatacactactgggcaaagagtatactatgggtcagagcaaagtg

SEQ ID NO: 91637 - DNA, 413 bp, Homo Sapiens
tgcccctcagagtggaggcaggtgcagaaagcgcccaacctccacttgcagcaaagcaacctgccgcggggcacgggcgaattcgattttttaaccatgaaccagaagatgctgaagccacacagaacacctccggccccggtgactgaagagatgctacagcggtgcaagaacagccacatggagccccctctgggtggactgcgcttcttctcaacacaatacaaggacgagtttcctttcaagtaccagggcccagcagccctgagactgaaaaatcctcaggagggcttcgtgcccctgggcacgcctcaccagcgcggctgcagggagaagatagaccctctggtcccccagccctctatgtacccgtgtcccagccagcaataaatgccatcttggcaacattcaaa

SEQ ID NO: 91638 - DNA, 446 bp, Homo Sapiens
  misc_feature (14)..(14): n is a, c, g, or t
tctttccctctttntgggtctccatggaacagacagctgagacaagcctgctagcctcattgcctttgcacaagctcttccctctgcctggaacacttgttgcttcaggagtcggctcgatgtaacttctacagggacctgagccccaatccaagttagacacctggttattgcagcagcctgtatctcaccgtcccagaatgaatcatgactgcaatgaaaacgatggcatgagcatttgttaccatcaagcttccgccctagattatgagctccctgaggacaagcagagggttcatctctctttatagctagaacccagcacagcgcctggcactcaggaggcacccaattactttggctgactggatagacatacatacagacggacggataaatggctggaagaggagtgattgaaaaaatacattttaaaatgccaaaaa

SEQ ID NO: 91639 - DNA, 613 bp, Homo Sapiens
  misc_feature (12)..(12): n is a, c, g, or t
cggggtcttgcnggccccgcacaggtggcaggcgcagacccggcagagtctgttcacgtcgtccttgcagtgctgcaggaacggcccgctcttccgtctcatggggttgtcaaccatggggctcccttcacccggccgctcaatcttgaagacttcgtccacgaagatgatccgacagtcgttcagagaatcatcccccagcaccacgttggcgtagagttcccgcgccgtcctggtctcgcgcttcctggagatctccgcgtcgtaccagaagccccgctccttggggttgtcggggttgtagttgagcatgaccacctggcccacctccaggtcctgccacttgatgatggtgcgggcgcgcgctcggacgtccctggagttcatctggaccacgccgttctccgggtagtcgtcgtatttcacgtggtaaatgacgtcctcctccagcgccggcctggacgtggagctgcagggctcgtcccgggagggggccttccgcgtcaccctgaccacctgcgcctcaaaccacgcccccatgttcgtgtcccgagcatcgacgtactcattgaccttgtacagccccaattccgtctcatcccacatgtcctca

SEQ ID NO: 91640 - DNA, 599 bp, Homo Sapiens
tttttcttcctccccctatgttctctttgtaggacatgagacttcacaacctgccaaaaaattagcttcctaacaacatgagacctattcgtctaggaataaactgtcctagccacaaaagatcagacaaaacccaagaccagagagtcattttcttctaaaatgctttatctgaaagattttaaaaagaaaagtggggagaaatgtgaaaggaaaatagaaactcgggactccaattcactaggccaaatggaaaaatttaagctgaaagctgagtcatgcaagcaactgcctttcctttagttcctaagcagatagctacagataaaggtcaaatatctccactctatcaccttatcttgtgtacagcacagatttactgagcataagacgaatacataattcactattcccctatgtggttttatcttgcaacctgtggattcagtaatgtgaccctacacttcctatttcccctccagcctgctttgcccctttaaatattgaagccctcaaaatcatctttggagaaaggcacagatctgtatcctgggtgtgtcttcaatcgtggcacaataaacttctaaactgattgaaaa

SEQ ID NO: 91641 - DNA, 1220 bp, Homo Sapiens
  misc_feature (900)..(909): n is a, c, g, or t
cctagcgcccctggaagccaagaatatgaggaagtcttcttccttcgcgccttcttcttccttacgctccaggcagcctgacagagccgctcgaaggctctgctggccgcggctagccggtgaggagggtggggggaggggccgtcccgcgtgtgggggagtctgaaggcgaccaacgagagggagggccggagcggggaggtggctcggaggcatgtccagtaaactggggatgaaaatcctcccaggaacccgattattaatgggttgagggaagtggcaggtgcagcggttgcgcaaagacaatgatgcttagtagccaggacttcatggccacaaaattgtgtgtagagagggccacagcagcctgaaaaccattttcgtccccttttaggtttacccattccactggacccagccaccacccactcctgctgtctggtaaactttcctcctgtttctggggccatgtctggcatgaagagtttttactgaatagttttcattgatcgcaggccagttctctcttctcacccctttattgaagtgacagtgaaaatctaagtgagaaagcactgttacaggggctgaaaaggctacaggagaccagagccattgacttttatttttaaaatgaagatctcttttacttgaaggaacttaagaattttggcattcaaataggggctggaagacttgaaagcagtagaaatttcaccacaggtgataggaacaggatgatcacgaaatgaatatctcctgacttgcacacctagtgagcagagccaggaaggacctccttcaccttagcatttggaacaggctgcaaagttcattcttcctcatagcagcccctgcattcagtttggtttagttgttttatgtggtttctagcctgannnnnnnnnncagggtgcagcagaagtctcaggtagctgagaagttcatggaatcttcttatttgctacacctttcactactgcttgtgatatagtgcagggtcgggatgtgcagacatttctcaagtgcactgtgtacctacacagcatgctgcaatttggctactgaagtcaagagaaactggcttgaacaactactgagctgtaacataggaagcgcatttcatttgataacaggaacacagcttttgtgctaataaaatgcttcgccacttcccacaccacaccatcccccccatcttccacacacctgctcacatc

SEQ ID NO: 91642 - DNA, 405 bp, Homo Sapiens
tcctgaggcctctccagccctgtggaaataaatgattattattcttcaagaagaaatccactaacagcatccttttcagaatgaagatctgaaaaggaagagattatctcctctttaatgctgtatcccaaagcctagaagaaccagagacttactagctaatcaataaatattgctgagtaaataaatgacagacatttgcatgcaggcctcaaggagcagctgaagtgatagaggtagaatgaggcaataaattattagcaaagagagcggagtatttacaggcagcgatatactaatgaacctaaaaatttggagaatatttggaaaaataaaagagcttgcatccctggaatgcaacgaaaagaaaagtgctcaaaaagtgataatatacacagtgtcaaa

SEQ ID NO: 91643 - DNA, 1036 bp, Homo Sapiens
aaggctaggtacgaggcctgggtggtaattcggcacgagggacatccagctttaatcatggagacgggcgtccgggcagcggagttcatcaagaattacatgaagaaatattcattgctgccttacttgattttagtattgaaacagttccttctgcagagggacctgaatgaagtttttacaggtggaattagctcatacagcctaattttaatggccattaactttctacagttgcatccaagaattgatgcccggagagctgatgaaaaccttggaatgcttattgtagaattttttgaactctatgggagaaattttaattacttgaaaaccggtattagaatcaaagaaggaggtgcctatatcgccaaagaggagatcatgaaagccatgaccagcgggtacagaccgtcgatgctgtgcattgaggaccccctgctgccagggaatgacgttggccggagctcctatggcgccatgcaggtgaagcaggtcttcgattatgcctacatagtgctcagccatgccgtgtcaccgctggccaggtcctatccaaacagagacgccgaaagtactttaggaagaatcatcaaagtaactcaggaggtgattgactaccggaggtggatcaaagagaagtggggcagcaaagcccacccgtcgccaggcatggacagcaggatcaagatcaaagagcgaatagccacatgcaatggggagcagacgcagaaccgagagcccgagtctccctatggccagcgcttgactttgtcgctgtccagcccccagctcctgtcttcaggctcctcggcctcttctgtgtcttcactttctgggagtgacgttgattcagacacaccgccctgcacaacgcccagtgtttaccagttcaggtctgcaagcgccagctcctctcatggccggcttacccaccgccttgccaattgcccagtggcaaacctcagcccaccacttccagaacactgatcatgacaaccaacaatcagaccaggtttactataccgcctcgccc

SEQ ID NO: 91644 - DNA, 415 bp, Homo Sapiens
cagagtacatgcatggaagtgctaccatagctgctctgaaatcagaggaaagtggaattataagaagaccccatctgacaaggctcataaaggagagcaactcttatggaatacatccaagatatatacgtctttgaagaaagacatcactcaactgtgaaagatcaccatgacccctgctttaatttcatcaaaaaacttagtccatcagctcagttaccctttagccttgcatgggaattgactcagagcttctgcgagatcagggtgaatatgaattgtttagcttcagatgatcattcctaaagtgaaaactcctggaacttattggcaaaaaagagaactctttgctatttctaatataaatgtgttattagaattggtctactgttctaataaataacagtaatggaaa

SEQ ID NO: 91645 - DNA, 793 bp, Homo Sapiens
ctcgggcgggggccggtccctgcaccaggtgacctgttccggcccggatccgggcggcctcgccatgcagcggcgcggcgcggggctcgggtggccgcggcagcagcagcagcaacccccgccgctcgcggtcggcccccgggccgcagccatggtcccgagtggcggcgtcccccagggcctcggcggccgctctgcctgcgcgctgctcctgctctgctacctgaatgttgtaccatctttgggtaggcagacttccctgacgacatcagtgatacccaaagctgagcagagcgtggcttacaaagactttatttattttactgtctttgaaggaaacgttcgcaacgtttctgaagtctcggttgagtatttatgctctcagccttgtgttgtcaatttggaagcagttgtttcatctgagttcagaagtagcattcccgtgtacaaaaaaaggtggaagaatgagaaacatcttcacaccagcaggacacaaatagtacatgtgaaatttccaagcattatggtttacagagatgattatttcatcagacattccatctctgtatctgcagtgatagtacgcgcctggattactcacaaatacagtggcagagactggaatgttaaatgggaggaaaacttgctccatgctgtagcaaagaattataccctcctgcagaccatcccgccttttgaacgcgctgtcaaagatcatcaagtgtgccttgagtggaacatgggttatatgtggaaccttctggctaacaggattccacagttgtctctggat

SEQ ID NO: 91646 - DNA, 607 bp, Homo Sapiens
ccactgggctcagcactggagctgagagcatcgctggagatagacgtggcagagaagaggttgcgagcatggccccagccagcagctcccacgctgcccctagtcctgggcatggagcgagccttggtgtcagagaccagggtgtgcagtctgagctcctctaccttactaaagagaggcctcttttatttaccagagccacagccctgctgcctcaggaccttttcattctgccggtgctggggctgtctatctgcaagctggaggtgttgagagcaggaaaaggaggctgtgaggaagggttcgggcagctcctcctgctctcagaggtggcctcctcctccaggcatggaggtctgtccactactgggcttctgggctatttgcccctgatttgctccctggtacgggctcttgttaacaggcaggcaaggggtgcggggaccaggcgagggcttcaaagggtacagtaccaaatcttccaaactcagcacttgtgccctggggtctccaaactgtcttctgccctaggatttattcatactgttaaattaccagtttatgcaaatgatatgtaaataaagctcaattttttgaaaattcaaaa

SEQ ID NO: 91647 - DNA, 441 bp, Homo Sapiens
ttttgtttttcattttgatccttgatttattacaattgtaattttgacagcaaagtatgtttctatatcaagtggcctttttttctttgtaagcaggacatgacttttctaagccagatgtaattacatcattggagcaaggaaaagagccctggatgattgtaagggaagaaaaaggaagatggtgtacaggtaaaaataagtctgactgtgggaagccatctgtgtaaataacaacctgtgtggtcagggaagagacatacacttgggatgttagttggaaatctccattcacagcagagaaaaggtgtgtgatttataaggaagataaatactctgcataagctacccagtgagcttcaccttcaccttaacattcctggatgggaacttgctatccttgaagtgacaaaagaacaaatgccatccctccaagatctg

SEQ ID NO: 91648 - DNA, 881 bp, Homo Sapiens
  misc_feature (479)..(503): n is a, c, g, or t
tgaggggataaaaacagggaagattccaccatctcccctgtgacctcagcacctaagcaggcactcgactataggctttccttctccatgattccccaactctatacatcttacttccaaaccccattctaaggtggcctggctcccagggaaaggactcagctcagggcagggcagggacagcccccagccagacggtattgcacattctctgttccttacttttaatctcaactgacaaacttgggcatctcgtacctctgagcacctctgagcttggggagagggagacgtaacagaaatggcacttcatcatgagggagggaggaagaggctagacagacatgccacaaggcaagatgacttgtggggaaaacatttttaagaaaaagcttccaattttgtggaagagagaaaagcaaaaccaaacaatttatccagtgctttcaaagcacagagggcaagtaaagatgtaagannnnnnnnnnnnnnnnnnnnnnnnnattttaaaataatcccagacccagttccattaacccccctccctctcccaccacttacagtcaggggtaccacattccccggaaaaatactcataaaacccaatcactacctgttactagcatctagcttccagatcatttcaccactgggggagcccagacactggctgcatctctgctcctttaagtgctcaatgaatttggggtaagggaggaaagacaaaagccaggaaggcccgtagggccagtatagtcacccacagtggcacctggggtgtggggagttagagcgccagagtaggggaactgagcctgattctttagctctttctcccgacgcgtgggtcgacgatatcccgggaataccggaccgtacca

SEQ ID NO: 91649 - DNA, 427 bp, Homo Sapiens
gaggaagtctgttctggaggcaccatgacaaagcaccagacagaaagcagtcacgtgtggggagatgagcagagacaccacttctcaagcacctgattattctttctcagtatttagaagcaaaaattatccttaagaaaaacaaccgcaaacgcaacacaggctacacagatgagaaaatggggttccccatcttcgttgaaggccccacatcatttgccatgaacttgcagaatatttcaagagagaaggctgaaaaggaaggtgactggaatattaagaactgtgagatattctgaggaaactctaatttgtaaattggtagaaatgccagtaatttgttgggaattgaagaccctctgtattcaagagcgaagcttggcagctgtgcactgttgttttataaatcaatattacatctgaaaaa

SEQ ID NO: 91650 - DNA, 288 bp, Homo Sapiens
ccatgtgacagtgagcggggtccccgctccaggagacgctcgagtctgcgtcccggccctcagcactgtccactgtttcggtgccagcagagaccagcaggcccgggacagttggtgtttggccgtgccgctgtctaacttggtgtgcagagtgaattgccgctgccggagcggagagaggcggagcggccaggagagaggggatttctgtcagcgccggcctcgggagctcggagacatgaacggcttcacgcctgacgagatgagccgcggcggggatgcggccgc

SEQ ID NO: 91651 - DNA, 455 bp, Homo Sapiens
atttggagccttttgtgaaactcaaggccagcactcataagtctatcacatctgcgtcctgtagctgcccgacctgtgtgggcgagcacatgaaggattgcctcccaaattttgtcaccactaattcttgccccttggctgcttctacgtgttacagttccaccttaaaatttcaggcagggtttctcaataccaccttcctcctcatggggtgtgctcgtgaacataaccagcttttagcagattttcatcatattgggagcatcaaagtgactgaggtcctcaacatcttagagaagtctcagattgttggtgcagcatcctccaggcaagatcctgcttggggtgtcgtcttaggcctcctgtttgccttcagggactgaccatctagctgcacccgacaagcacccagactctttcacataacaaataaaatagcagagttccctttcaaa

SEQ ID NO: 91652 - DNA, 560 bp, Homo Sapiens
gcggccgccacgtcggggtgcaggctgagcatctccagcagtgcgcgcgtgccgcccttgcgcacgccgatgatgatggtctgcggcaactgctgggcagagccgtttggggccacgccatcgcggacgtcatcctggagggtccccgctttccgcagaagctcctgctggcctagctcggcggggcgggaaggcactagctggggctgggccaccagcagcaccgcgcccaggagcagcgcggccatgctggacaccacggtggcttcactgggccgcgcgccgctgggtcatgaagtgccgcagcagggaagcctcctagtcagtggcacatgggcgtttcaggccttcaattactgagccgcgcctctgtccagcccgtccggcgccctaaataggctcctgggctgggccatgggcagcactgccgagcacccgcggcgggtagagcaagtttctggatggcccggggcaggcgggcggggagaaggcgcaggcacccactgagacccggcggtcgtggcggcgactcctggctgccacggcgcagaggaccttgc

SEQ ID NO: 91653 - DNA, 539 bp, Homo Sapiens
  misc_feature (492)..(492): n is a, c, g, or t
agcggaggagcaggcgccggagatgatgactttgaccagtttgataagcctggcgcggaacggtcgtggagaagaagagctgctgatgaggactgggacagtgaacttgaagatgatttacttggagaagatttgctatctggcaaaaagaatcagtcggatttgtcagatgaagagctaaatgatgatcttttgcagagtgataatgaagatgaagaaaatttcagttctcagggtgttacaattagtctgaatgctacatctggcatggttacatcatttgaactctctgacaacactaacgaccaatctggagaacaggaatctgagtatgaacaagaacaaggagaggatgaactggtttatcacaaatctgatggatcagaattgtatactcaagagtacccagaagaaggacagtatgaaggccacgaagctgagttgacagaagaccaaatagaatatgtggaagagccagaggaggagcagctntacactgatgaagtgttagacatcgagatcaatgaacctttagatga

SEQ ID NO: 91654 - DNA, 1116 bp, Homo Sapiens
  misc_feature (1023)..(1023): n is a, c, g, or t
gcggccgccgcgccggggcccagccggagccgccgccctcgcccttgcctttgcctgcgcggctcagaatcaccatccgcggcgcgggagacgagccggccgtcccgggccgggggacccgcccgccatggccaccaaggctcgggttatgtatgattttgctgctgaacctggaaataatgaactgacggttaatgaaggagaaatcatcacaatcacaaatccggatgtaggtggaggatggctggaaggaagaaacatcaaaggagaacgagggctggttcccacagactacgttgaaattttacccagtgatggaaaagatcaattttcttgtggaaattcagtggctgaccaagccttccttgattctctctcagccagcacagctcaggccagttcgtcggctgccagcaacaatcaccaggttggcagtggcaatgacccctggtcagcctggagtgcctccaaatctgggaactgggaaagctcagaaggctggggggcccagccagagggggctggagcccaaagaaacacaaacactcccaacaactgggacactgccttcggccacccccaggcctaccaaggaccagcaactggtgatgatgatgactgggatgaagactgggatgggcccaaatcctcttcctactttaaggattcagagtcagctgatgcaggcggcgctcagcgaggaaacagtcgtgctagttcctcatccatgaaaattccccttaacaaatttcctggatttgcgaaacctggcacggaacagtatttgttggccaaacaactagcaaaacccaaagagaaaattcccatcattgttggagattatggcccaatgtgggtttatcctacctctacttttgactgtgtggtagcagatcccaggaaaggctccaaaatgtatggtctagagagctacatcgaatatcagctaacacctactaacactaatcgatctgtaaatcacaggtataagcactttgactggttatatgagcgtctcctggntaagtttgggtcagccattccaatcccttctcttccagacaaacaagtcacagggcgctttgaaggaggaatttatcagcatgcgcatggaga

SEQ ID NO: 91655 - DNA, 495 bp, Homo Sapiens
tagctgtgttaggttttgaaagcaatggaatataatctccaacatggctcttttttgaggatcttttgcaaaggtaactttggctctgtaaggttttatcttttgcactgactttagaatctaatccttggctctgatgagattctattgcgatcctttaaaaggggtaagaattaggatcatcaggactaatatgacctaagtttgtattgagttagtattgagagcattggctgaagtttagggtttgtgttgccatggggccttttcttatcccattcgtttattgcaaattcccttaaaaaagatagacatgtcttccaacttagggacaaaatgcagtaaaaatccagcctgaggaactaaatattccaggtggactgtctgccgttttttggtcaccaaaaatgtcatgcaatttcaaagtcagtttggcaaatttattccaaaacagggatgaattcgaatactgggaatctgagggagaagttaaaa

SEQ ID NO: 91656 - DNA, 457 bp, Homo Sapiens
gatttgggttcatacttggagtagaaagatatcagatatgcttagtaagtggcagaactgtatgggagaatccagtgaaatcagactttgccatttccttctctgtaatcttctgagtggtggcagtgaccacccttgtggatatagtactgagcacttgggactgagtcagctgctttcccattctagccctccctgcaggaactggctctagcttgtctgatttcccacacataaaatcatgccctcttactgactttttgttaatgttctgacaatcaatctgtagcaaggttctactgttttcagtttcatattacccctatatgcatcaaagctgcaacttcccttgcctctttgtccctaggttctgtttatttcatttaccctagcaattatggatttctattacatggaactcatctcttgatttaaattaaagtgtatgtgttgagtc

SEQ ID NO: 91657 - DNA, 779 bp, Homo Sapiens
  misc_feature (700)..(718): n is a, c, g, or t
cagggagaagaagcccaccaagctccaaacctagtggcccaaaaaaatcgacccatgaatgagaatgttcaaatgaatgcacagggaggtccagtactaaatgaagaagactccaatcgagactggctagactggatgtacacgttctcacgagctgcgattctccttagcattgtatacttctattcttcttttagtcggtttatcatggtaatgggagccatgctactggtttatttacaccaagctggatggtttccttttaggcaagaaggaggtcatcagcaggctcccaacaataatgccgaagttaacaatgatgggcaaaatgcaaacaacttggaacttgaagaaatggagcgtcttatggatgatgggcttgaagatgagagtggagaagatggaggtgaagatgccagtgcaattcaaaggcctggattaatggcttcagcttggtctttcatcaccaccttctttacttcactaataccagaggggcctccccaggttgccaattgacctgaaaaactgtgccagctacaaggagggtctgacttcaggaaagtggtttaaataacagtgcaatttcaaaaaaatttataactttcttttgatcatcatgtacagaggtgttttttttctttaggcttctcatgcatatgaatattttaagcacgaatggactactaaatatctgagnnnnnnnnnnnnnnnnnnnaaagatcctaacagaacatagcgtaacaatattggtcttccaggtgttactctatgttctg

SEQ ID NO: 91658 - DNA, 689 bp, Homo Sapiens
accaaaatcagggcatccaagattcatggtctgtttcaagcttcccccggcagtgcattggctcaagttcgtcccaagacatctgtctgtggacaggggaggaatcgaacacagggttctgtgtctgccctgctctgcccccagaagctagcaacagaccaccagccatccatcctcggtgagccagtaggtggtttgccacaggatcgagacggtgacctggccaggagcttctcccagggctttgtgacctacagtcaggagaacaattccgaaagctctctgcaaagttctagttccctcagcctttccactatggatgaggccagcctgcctgccgtcaacaagatagatgagtcacgggaaagcagtttagaaggggaccttgcggtgaagtctgtttttcctccggagtccatggggacactccagaggtttaaggatacgcaagagactgaaaccggctataggtacatgaccctacacttcccctaccggcccactccagcctcggagaaagtgcccagtttccaacacagctcagtgtctaactgcttgaccttgcgtgttcactggggctcagaggctgagatccacaagttctccttaggcaagagctctgtgaatctgattgaggtgtcccaggcaaccgtcaagacagagctgaggaggactctgtctttaggtac

SEQ ID NO: 91659 - DNA, 804 bp, Homo Sapiens
gcaactcagtgttggtccttgctaaaatgggggtcttagtaggctcaatgggaaggatcatcgttcttagaatattaagattgaggtgtttaacgtacaaacagatgttgaaccagcagatcacgaaatacacaaggacaagattagaaaatgtatataggtcagtcttagccattgtgcaccacagagtggcagtgtctcattttctagtactagcataattattgctactttcaaactctacgagaacagataagcaattctactttcccatattcctgagatcctattgtctgcagccactattcttcctgtacacaatgtgtggtatcagttaagattcatttgcggaaaatagaatccattttagctagtataaacacaaagatattgaatacttgggagggttgattaaataggctctagattagtttttcaggaatgagtcccaaagtcttcccagaaccaggccaccaaggaagcaatgactcttctatgatcaggaaatgacgtctctgaatcacactgctgctgccatgcctaggaaaccaccatcagaaagctgcgtgcaccgctgaccctagaaccacactatacccactatgatctgcaccagtgccatgcatatcctacgtcccgtctgtcaaggcccacaggacaagtggctagacactgaggtttctgctaatgctgcttcagaaaaatcaaacacctccacaactgtgcttgtcaacagcaatagcagaagtttggtgtgtctctggcaatatgattaatgtaaaaatttaatatgcttctcaaaaa

SEQ ID NO: 91660 - DNA, 499 bp, Homo Sapiens
  misc_feature (92)..(92): n is a, c, g, or t
tgcgttgcgtacattgtggctggtgcttggcttttaattcgtgcttgtacttccttttttgacaataaaagagtcaagatagcaccgaggcnaggagaaagggaacgtgtaagtttttatatatacagtttccaagccaacttcgggaagccttaacctttttacggggtgggggtggggaggtaaaaagttgtgatctctgagaaaataaccgccactactctggaagtgttcatcagcagttatacaaaaccgtgattttggctgctccctaacaaattcgtgattgcatgattcgaattgcaggtctgtagaatgaagttggctttgggtgtacgtgtgtttgataacttgcagggtggaaaagcagaacatgtgtaaaacaagtataagctttgtgtttggatatagcattgaaacctgtaaagctctacatgttcttcgcggggtgattaatttttatccaaaacttaggtgagagtttgctatttgaagtctc

SEQ ID NO: 91661 - DNA, 418 bp, Homo Sapiens
agacatcaacttcgcaacaaatataagacaaggatacaaggattcctatgtgatgcagctaggtttttatatccttctaacaaatggtgagcaggagacttttttggaaataattagttgtgaaattccatttttctgacagccccttaaatttgaagttatttcatttgtagttaaggttatcacatccctgccaattttactagattttttcagagacaagcattcagcatggcattagtaatgatggtttaaactaggtgcagaactgtcccatgaagagaagaatgatatcagtatttaaataataaaagaagagacaatgtatggtttatagtgattcattttaagattgctgtattttgattttgtggtttaaaataaatgcattaaggatcttttaagttaatacaaaaaa

SEQ ID NO: 91662 - DNA, 849 bp, Homo Sapiens
tttatcctatacttttaaatcactttattggtatgtaatttgtgtataaaaagctatacattggtgagatcatcggaaagcagccgacggtagcgcggacagatgcccgcgaattcggccattgtcgtcatcggttgcccgaccgctttccgggagactggagtcgaaggccgtgagtcagccataatggcaggtgaagaaattaatgaagactatccagtagaaattcacgagtatttgtcagcgtttgagaattccattggtgctgtggatgagatgctgaagaccatgatgtctgtttctagaaatgagttgttgcagaagttggatccacttgaacaagcaaaagtggatttggtttctgcatacacattaaattcaatgttttgggtttatttggcaacccaaggagttaatcctaaggaacatccagtaaaacaggaattggaaagaatcagagtatatatgaacagagtcaaggaaataacagacaagaaaaaggctggcaagctggacagaggtgcagcttcaagatttgtaaaaaatgccctctgggaaccaaaatcgaaaaatgcatcaaaagttgccaataaaggaaaaagtaaaagttaactttttggttttgatgtacacatattcaaaaagtacatcttccccccccacccaccccgaaaaaaatggggaacaacaatctatcaacaactgtgtctcccattatatagaaaaatatccctccaccacaaaattactaccacccacactctccccccccaccaatatactcttattatatacatgtaacactaattatttacttactaaagtaataaatatatttcaattactcct

SEQ ID NO: 91663 - DNA, 630 bp, Homo Sapiens
cgccggagcgtcatctgcgactccaatgccactgcactggagcttcccggccttcctctttccctgccccagcccagcatccccgcggctgtcccgcagagtgctccaccggagccccaccgggaagagaccgtgaccgccaccgccacttcccaggtagcccagcagcctccagccgctgccgcccctggggaacaggccgtcgcgggccctgccccctcgactgtccccagcagtaccagcaaagaccgcccagtgtcccagcctagccttgtggggagcaaagaggagccgccgccggcgagaagtggcagcggcggcggcagcgccaaggagccacaggaggaacggagccagcagcaggatgatatcgaagagctggagaccaaggccgtgggaatgtctaacgatggccgctttctcaagtttgacatcgaaatcggcagaggctcctttaagacggtctacaaaggtctggacactgaaaccaccgtggaagtcgcctggtgtgaactgcaggatcgaaaattaacaaagtctgagaggcagagatttaaagaagaagctgaaatgttaaaaggtcatcagcatcccaatattgctagactttatgattcctgggaatccaca

SEQ ID NO: 91664 - DNA, 623 bp, Homo Sapiens
cctaatgcagatcattccaccaagaaagctacttcctgtgacatgtgtgggccattcttgaaagacattttgcacctggctgagcatcagggaacacagcataaaaagattcatacttgagtggagccttatggaagtggtttttgtgagaaaatcttcagccaagtcaaacttcatgaagcagaatccccataccagaataattacctacatgtactgctaatgtggaaaagccttcagaagctactctgtttctgaccagcccaggaacctttgcagggccatctcacccatgcagcataaggcagaagccatagtcactttccatcttgcctggatccaaaaatttgcagcagtcctgtcctcatgcatggggaaaacagtaccctgagccttccttcctgtgttctctagggattcaggactgtgctcagctgaaccgatgctggttgaggggccttgagggaaatctaatttgagctcaggaagatgcacattccttgtggatgtggtcaagtctgtgtttaacccctaagatgtgtccattgaggccacaaatcaccctccactggaatcacctaccttgcctgcactaactggtgataataaagaccttattaata

SEQ ID NO: 91665 - DNA, 857 bp, Homo Sapiens
gttagtaaagatttattctgtaacctgacactcatctggccctttgcagtttgccagccatattcccatgtgatttcccactggatccaggcccccatccggctggcaggagggggctctgacgtacaggttggaaatcagaagtctgtgagagcgcgggagtgcatggcagctctgggtcccagacctggcccgacccctctgcttcacctccagctctgctgctcctctactcttgggtcgagatccctttggagccacagcgaggaaccctgtggtcctcaggcaggtgtaccttgagtcagccaggagccctcttttcctgtgtcaaagcctgccctcgggctctgctcacctctggtgaccctccaagatgcccctgccctcagtttcccctcatgatctggcctctgcccccttctctagccacagcctctagtacactttagcaataccaccagactagttagagttccccactcaccaagcaagacatgcagtttcatgcctctgtgccttcgctcatgctgtttcttccgactggaatgccttcccctgctcctcctgccttgtctgcctggcaagttcatctctcacgatcccctcaaaggccccctcctccaggaaggcaacccctgtgcccctcccctccaggctacctctgcactttgtcaatgcttctcttgtggcacttatcacactgtattttacttgtttacatgtttgtctccccttctagactgtgaatccttaagggcatggactgtatcttatgcatctctgtatttctgcgcctagcacggtgcctagcacacagtaggcgctcaataaatgttgaatgaatgaatgatttaatc

SEQ ID NO: 91666 - DNA, 1176 bp, Homo Sapiens
  misc_feature (546)..(637): n is a, c, g, or t
tggaaatgagacagttgagtccaaaccccaatgctgacagccatatgcatttgaaaatctatctagattacagatgggcatttattactggcagtggaaacaccagatagaagatcttaggagaggcccagaaatgcatcaccttgtcatgacaaaagagaaggcagtagagtagggatagttacaaatgcatccatcttaattattttcaataggcttgtaaatcttatcgatggaaggagaaaggagacaagatgtggaagaattgacatgtatcccaccataaaatggtagaagatgagttttcaatgagtagtcatagttgaaattttacaaccaaagctcccatttgattgtaatcttgccaaaatataatggatgtataaatgaacttggggtataagcaataatatccactagtgttgttatcagctactgtaaccaagtggctggttcatttggttgatgctgattatggcctttaaccatggtggtttgttgtgtgttttttatttcacaaaaagccaataaaattgtttagctatnnnnnnnnnnnnnnnnnnnnnnnnnnnnnnnnnnnnnnnnnnnnnnnnnnnnnnnnnnnnnnnnnnnnnnnnnnnnnnnnnnnnnnnnnnnncacaagagtgggggcggggcgagatcgaaaagaaaggcccccagagagggcgcaacacgagcagcggcgacaacaccacggtttattgcaactaaaagtggggaccctagaatgtggagtggtacgacttttgatgacgggctggcgagagcgggcggctggatatgtaacacgcatgtgtatacagcagtgtgacaacaaaagcagtatcgaggaggagcagactacctagttgagaagaggaacaataaccatacctgctcggagctagggatgggcgcaagaactaaaccgtacggttggagaagccaaaacgccagacaggacgagagagcagtactgaagaatgaagctgtccgtcgagcagggaaatacaaaaaaacaacgcgcacgcagccgagcgactagcagtagtgaggcggtagcacaaacacaaggacgaccgcatacgagtcgaccggcgcgcgcaaggcaagaaggtttactgctgcctctacgtcgagagagagtgcagtacacaggagagaatcacgtatgcc

SEQ ID NO: 91667 - DNA, 501 bp, Homo Sapiens
  misc_feature (203)..(219): n is a, c, g, or t
gcggccgcagcgctgaatggggtggaccgacgttccctgcagcgttcagcaaagctggctctagaagtgctggagagggccaagaggagggcggtggactggcatgccctggagcgtcccaaaggctgcatgggggtccttgcccgggaggcgccccacctagagaaacagccggcagccggcccgcagcgcgttctcccggnnnnnnnnnnnnnnnnncccccaacccttagtgcttccttcagaacaatggctgaattcatggactatacttcaagtcagtgtgggaaatattattcatctgtgccagaggaaggaggggcaacccatgtctatcgttatcacagaggcgagtcgaagctgcacatgtgcttggacatagggaatggtcagagaaaagacagaaaaaagacatcccttggtcctggaggcagctatcaaatatcagagcatgctccagaggcatcccagcctgctgagaacatctctaaggacctctac

SEQ ID NO: 91668 - DNA, 644 bp, Homo Sapiens
ggggtccctcttcctaggatagcgttgcgcgcatgcgccttgacgagtgagccggggagccatggacaactgtttggcggccgcagcgctgaatggggtggaccgacgttccctgcagcgttcagcaaggctggctctagaagtgctggagagggccaagaggagggcggtggactggcatgccctggagcgtcccaaaggctgcatgggggtccttgcccgggaggcgccccacctagagaaacagccggcagccggcccgcagcgcgttctcccgggagagaaatattattcatctgtgccagaggaaggaggggcaacccatgtctatcgttatcacagaggcgagtcgaagctgcacatgtgcttggacatagggaatggtcagagaaaagacagaaaaaagacatccccttggtcccctggaggcagctatcaaatatcagagcatgctccagaggcatcccagcctgctgagaacatctctaaggacctctacatagaagtatatccagggacctattctgtcactgtgggctcaaatgacttaaccaagaagactcatgtggtagcagttgattctggacaaagcgtggacctggtcttccctgtgtgatgttgaccatcactgccatcacatcacc

SEQ ID NO: 91669 - DNA, 1563 bp, Homo Sapiens
gggaggacagactgaagaaacatccaaggtggtcttgaaggacactgggatcctgtaacacagccccggatatctgtgttaccagccttgtctcggccacctcaaggataatcactaaattctgccgaaaggactgaggaacggtgcctggaaaagggcaagaatatcacggcatgggcatgagtagcttgaaactgctgaagtatgtcctgtttttcttcaacttgctcttttggatctgtggctgctgcattttgggctttgggatctacctgctgatccacaacaacttcggagtgctcttccataacctcccctccctcacgctgggcaatgtgtttgtcatcgtgggctctattatcatggtagttgccttcctgggctgcatgggctctatcaaggaaaacaagtgtctgcttatgtcgttcttcatcctgctgctgattatcctccttgctgaggtgaccttggccatcctgctctttgtatatgaacagaagctgaatgagtatgtggctaagggtctgaccgacagcatccaccgttaccactcagacaatagcaccaaggcagcgtgggactccatccagtcatttctgcagtgttgtggtataaatggcacgagtgattggaccagtggcccaccagcatcttgcccctcagatcgaaaagtggagggttgctatgcgaaagcaagactgtggtttcattccaatttcctgtatatcggaatcatcaccatctgtgtatgtgtgattgaggtgtaggggatgtcctttgcactgaccctgaactgccagattgacaaaaaccagccagaccatagggctatgatctgcagtagttctgtggtgaagagacttgtttcatctccggaaatgcaaaaccatttatagcatgaagccctacatgatcactgcaggatgatcctcctcccatcctttccctttttaggtccctgtcttatacaaccagagaagtgggtgttggccaggcacatcccatctcaggcagcaagacaatctttcactcactgacggcagcagccatgtctctcaaagtggtgaaactaatatctgagcatcttttagacaagagaggcaaagacaaactggatttaatggcccaacatcaaagggtgaacccaggatatgaatttttgcatcttcccattgtcgaattagtctccagcctctaaataatgcccagtcttctccccaaagtcaagcaagagactagttgaagggagttctggggccaggctcactggaccattgtcacaaccctctgtttctctttgactaagtgccctggctacaggaattacacagttctctttctccaaagggcaagatctcatttcaatttctttattagagggccttattgatgtgttctaagtctttccagaaaaaaactatccagtgatttatatcctgatttcaaccagtcacttagctgataatcacagtaagaagacttctggtattatctctctatcagataagattttgttaatgtactattttactcttcaataaataaaacagtttattatctcaa

SEQ ID NO: 91670 - DNA, 495 bp, Homo Sapiens
  misc_feature (38)..(38): n is a, c, g, or t
acagaaatgtgtacatgtgttcatccagagacatgctntaaatcttcacaaaaccactctccataataaccccgaacaggaaagcaccccaatgcccatgttggctggataagcacattagggtatattcacacgatggaatcccagactgcaatgggaatgagctgcaactccacccccaacttggagtgtattcaccaaccctagtgttgaacgagataaggcaaaaatgcaccataggattccatttatataaagtttaaaacccagcaaaattcatccatgcggttgcaagtagagatcagtcctaagaagacagtaaccagaagcgggcatgaggtggtgcttctggggtgttctgtttcttgatctggttgccggttacctgggtgctttccgtttgtgaacattcttggagctgtacacttttgatctgggcacttttctgtgtgtatgttatacttcaataaaaagttgggctttgtgactagcaaa

SEQ ID NO: 91671 - DNA, 392 bp, Homo Sapiens
ctcagtcccaccatggatctgaggaggaaagaacaaaaagaaagattttagctcgaaagaagtcaaaacgatctgctcttgaaaatagtgaagagcattcagcgaagtacagcaactccaataattcagcaggatctggggccagctcacctctcacgtccccgtcatcgccaactccaccctctacatcagtagagcatgcaccattttgaacgtgaattttcggtaaagtaaactatgctgatttctcagactttaaagatgctctgtttctgtgtgtgaaataggacccaaagtgtctcgattgctgaagtgatgaacaagtgggaaagcagatttcagactatttccttatctgaatatttaaatgaaatacagcatctttaaaaagc

SEQ ID NO: 91672 - DNA, 476 bp, Homo Sapiens
tggtacgggccagttggtgttgattagtgaaccacggacaaagggcatatgtcacatgagttgctcctggataaagtcacccagtcacttcctgatgaatatcctgcataaactcccaaagacaaaagagagttaaggttgtttttctcaccttagaccaggcagtgatagaagaactgggggaagagataattgtatttatcttggtgaaggtgacaaatcatggcaaatgagcaaaatgaaaaaggtttgcagatttcaacaaacttctaaaagatcagcttacagtcatgtatacatctcttcctttgtttctagtttatttgcatctcattactatgttctcggtttaggatacaagacaccggactttcaaatcaacaattgtttcaaaagactcctactggattcctgctagtgatgggagaaaattatcattctgtgagttgtcaataaatgtttaaccacaaaaaaaa

SEQ ID NO: 91673 - DNA, 648 bp, Homo Sapiens
tggtgttttaaatttgaatctacttaaatagagagatgtggcaccaaaattcaaattttgggcttctcttgaagagtcagaagatctggcactgcaggatgattccatcagggcagcatcagccaagctgaggggtggctgctcccagggcctgtgctccctgatctgcctagccccacctggcccagttactgcaggctgtggtggtgaccatgtctcatctcacacctggtcttttccatcactggcctggcccttgattctgtattttcaaagcaaactggggaggtgggcattagtatctctgttttgccagagaggaaaccgaggctcaaactggtttcaatatgtcatgtaggaaagtagtcatggcccgattcaatcatggctctgccatttaacagctctgtgacactgggtgagtcacttgccctgtctgggtcccagcctttccattcataaaacaaagaggttgagggctagctaggtagcaaacttctcagtataagaaacagatggaatccagagaagctgggagaggagaaggaaacaaaggagaggtgatggcccaacaacctagcagaaagacattttaaaaggatctctagccttagtaacatagcaagaccttgtctctacacaccaaaa

SEQ ID NO: 91674 - DNA, 522 bp, Homo Sapiens
tggagcccacacacggccttccccagtcggagcctccccaccagctctgtgcacggggccgaggtgaacagtcctgcacctgcagagctgctgaggccgcccctgtggtcaagcgggagcccttggactcaccccagtgggctactcacagccagggaatggtgcccgggatgttgcccaaaagtgccttggccacgctggtcccgccccaagcttcggggtgcacattcctgccatagcgcagtgaccaccatccaagctcagatctgtctgtctacgctcagatgcgtcggtggctgggctgccctgctcctggtcaggccggagcccgtcctaagacacacgctttgcagagctgtgcatgcgcagtctgctagtgtgtgtgtgcagcatacgcaggagcctatcctgaattttgtaaaatatcccaacagttcttaaatgaaaactggccttaagtctattcaagcatgacagcatttctctttgaggaattaaaatctttaggaaagtgaaaaaaaa

SEQ ID NO: 91675 - DNA, 560 bp, Homo Sapiens
ttttgttttctccttaacaccaacaccaaaaagtataaagtcacagaaactacttgagatgatattgcttcttaattttagagaaaacataatgctgcaggaaaactgactttacatttgatagaatatgtcttcagttttattatacttatttatgtaaatttattccatttcattccatagatacttatatgagcgaattgatggcagagtcagaggaaatcttcggcaagctgctatagatagatttagtaaacctgattcagatagatttgtttttctcctgtgtacccgagctggtgggttgggcatcaacttaactgcagctgatacatgtataatttttgattctgattggaatcctcacaatgatcttcaggtaaataatttccttggctaacaaaaaatgcattttttaaaaaagtaaaattgtgtaactttttggtaatccacatcttttatttttatctggacaaactaatgtatgtttctctatgaaatatctgtgccaaataaaataggtgaagttattttaattgttatgataaaaactataatga

SEQ ID NO: 91676 - DNA, 652 bp, Homo Sapiens
tctctctcttgatcatttggcattcttcatattacatcatcacacataaaattgttgattctcgtgttagaaggaaccatttttaaaagtacagtttcttacctgatactggaatccctgctataatatagctagtcattgccaagctacacttggaaaaaatagacgaaagaaaactcaaaattcatgctcatatgctattgagcatttagtgacattgcagctaccttatttgagaaggcagcattccactgataacatatatcaccctctaagtatggcatgctcctcttacaaacagttaagcttcagagcagtagtgcaggaaggaaaaaagtcccttcataaataaatccttttgcctaaatgaaagaatatacagtactcataaaaatggcgattagagcccagcatgagaaagataccctcataacactaataatattagcaataaaaataccctctgagatttgctattccagagaaaatatttgctattattgttattattattatattactgctaataataataatgggttgcttgctaagagattgagcctttgctgtaactaagtaagcatacttagaaagtgctcccctgaagacatttcttcaattaataaagaagactgacagatcttctcacagc

SEQ ID NO: 91677 - DNA, 1073 bp, Homo Sapiens
gggactgggagaacaggatagcagcaggagtcggggggccgccgaagatggggaacactacctcgtgctgcgtgtcgtccagtcccaagctccggaggaatgcccactcccggctggagtcctaccggccagacacggacctgagccgcgaggacacgggctgcaacctgcagcacatcagcgaccgggagaacatagacgatttgaacatggaattcaatccttcagatcatcctcgggccagcacaatattcctcagtaaatctcagacagacgtgagagaaaaacgcaagagtctcttcattaaccatcatcctccaggacaaatagcaaggaaatacagttcctgctccaccattttcctagatgatagcacagtcagtcaaccaaacctcaagtatacaattaaatgtgtcgctcttgcaatatattatcacatcaaaaacagggacccagatggaaggatgctcttagatatttttgatgaaaatcttcaccctctttcgaaatccgaagtgccaccagattatgacaaacacaacccagagcagaagcagatgtaccggttcgttcggacactgttcagtgctgctcagctgacggctgaatgtgccatcgtcaccctggtgtaccttgaaagacttttaacatacgcagagatagatatctgtccggccaactggaagcggattgttttaggggcgatcctgctggcctccaaggtgtgggatgaccaggctgtatggaatgtggattactgccagatcctgagagacatcacgggtggaggacatgaacgagctagagcgacagtttctttgaattggtgcgggttcaacatccatgttcctttccagtggcgatggccaggtattgattttggaccgtcgttgctctggggaggaaggggaacagaccggggagctttgccccttgggaagccccctgaagcaggggaaaaaggggctccaaaaaggcttgggagggagcaatcttgctcggccctttttgggggaagtggaccaagtgtacccagaggggaccccttaaaggaaagagaactccgcgcggaa

SEQ ID NO: 91678 - DNA, 440 bp, Homo Sapiens
ctactttgcctaaactcactaacaactgctctgatgagagtctctataaatctgctaataagtatgaagagattcatttgccacgattttcattaaagcaagggatgatcccaagacgttatgtcatgccttggaaagaaaacatgatattcaggaatgtgaatctgaagcaagcagaagtgtgtgggatccatactggccctttagaagactctctgtttttgaatcacagtgaaaggctttgccatggggaagatcgtaaagttgtcttccaaaaaggcccaccagaaataaaaattgcagatatgcctttgcattcgcctctctccagataccaaagcactgtgatttcccatggcttcaggaggcgactagtctaatgaaagaagaataaaataataaagtgtttcaatctctgctctcttacagtatatgacaac

SEQ ID NO: 91679 - DNA, 491 bp, Homo Sapiens
  misc_feature (79)..(79): n is a, c, g, or t
cgggagcttggaaagccggccggatcggacgctggcgctgagctacgtggtaaacccgggaacagttcctctccccgtntctctgggcccgaggtccgcgcctacaaaacgcgtggggtgtcacaccacaaggagacaccccgagaatgcggtcaggggccgcgagacggtagcggaggacagcgctcagtacaccgctcggcgctgcacgcctggagaacgcccggtgccacgggacgccttgggcccggttcgaatcccgactgcgccactgactcgctgaggacccgcgggcgagcgactccaccgtttcgacagggggtgcgggatgtgcggctcaaccagagaagccttgaggactcctagtgaccgaccgttcgtgcacagacaggcggctgcgatgcgacgccgccgacctgcgtccaccacagagaaccataggccgcctcggccggccgggcctgggcctgacgggagccggaggcggccgc

SEQ ID NO: 91680 - DNA, 652 bp, Homo Sapiens
ccgcacgtaggaagtggttacactaatagtagcgactggagggtcttgcttcttcaacgtcagagcccagagcaaatgcaagggtggatagacataatctattgtgtggcagctgtatcttctgcaccaccatttgcagcagcaatcggctctcagaagaagttgagccgcccacttctgcctgccactacaacaaaactgtctcaggaggagcatctgaagtcacatgaaagtaagctgaagcagatcaccaccgagctggccgagcaccgctcatatccccccgacaagaaggtcaaagccaaggacgtcgatgagtacaaactgaaagaccactatctggagtttgagaaaacccgctatgaaatgtatgtcagcattctcaaggaaggaggcaaagagctactgagtaacgatgaaagcgaggctgcaggactgaagaagtcgcactcgagtccttcgctgaacccggatacttctccaatcactgccaaagtcaagcgtaacgtgtcagagaggaaggatcaccgacctgaaacaccaagcattaagcaaaaagttacttagagtccatctgcggccaggaagtgctggtcatggagcaaaatagggtttttcaagatctttctggtaatccgtgaatatatttaaa

SEQ ID NO: 91681 - DNA, 475 bp, Homo Sapiens
aaactccaactgaaccactgacctgtgagtgagaaaaaataagtaaatgagattataaactacagagatgttgaggttgtttgttatgtgaaaataagaaattcaaaatcaaagtggttggaactttaaattattttgaaccttaaagaaatgtggttatgaggcccaagtcatacaacaggcagctgtaacctaggcagctgtaacctttgttcctctaattatggattagctttttctttacctacattgttttataaaatgttgtaaaagactaaaggatgccagagaagaccctttctctcttaactgttgatcttcattatagattagcttccttctttcttctcttacacaatgacctcacaactatcacattgtctaaaataaaatgttaaatattctcttatactcctttaaattgggaaagaaaacaagctataactaataaagttgcagtaactcataaactaaa

SEQ ID NO: 91682 - DNA, 686 bp, Homo Sapiens
agcagaaagaaatgggcctttctctgcctctgaactttactgcgaacacaacgatgctgcagctcatggagccctcatctaacctgtaggaaagctaacctgagagcacaggctgggaagtgaaactcatcaaccaatgagaagatgagtttctatcagattgtggagacttcaattttctagaaactacacatgttggatcacacttggtctcgatgctgctatttgagatgatgtgacagggtctccaggcttcctgatgttgtgccatataatgggtttgagaaggaatagacagaactctgacgaagaaaaacacatttgaaagggtggaattttaggcattaagataagaaaactctttaaagatcacgcagaatgcagcaaaggtcccaatggattttcactggagtaataactagaacatccctgactcttcttccagcacctacagcccacactgcttgagtttctgacacaagcctagattccatgtatcctggggtcctcaggacttaggcaccactgcctcacctctggtcgggtggggaaatgcaatgaccaatatttcgactactgctttctctggtgctggtttcactaagccttctgtattgaatatagctaggttagacaaaacaaaacaaaaccaatgcctttaagtaaataaaagcattttatataaa

SEQ ID NO: 91683 - DNA, 509 bp, Homo Sapiens
  misc_feature (97)..(97): n is a, c, g, or t
  misc_feature (117)..(117): n is a, c, g, or t
gtggctgcctttggagagctgaggagtttggctgaccaaagggattattaactatacttattctaccagagaagttgtcaacataggtcaaacattntacagaaatttccgactganggtctctccagtgtagttcgaaatgtgtttgactttgattcctacaacaatgacatgagggagatattgattaacactttacacaaatacgggatacctatcggagcaaagcctaccagtgtgcagctggcaaaggagtaaggcaaattcagtactcttctgattcttaaatgctgatagttcttgatttatcattccattctacaaaactgagttgctatggaaattactttccatgagtaagcttttcaaatacatgtatatgttgctgtttgctggctgcttttcagttaaatagcattatttataggcctgtaaattgaaaattttgattattatgtatgtcccatgagtagatgtaataaataaagggaaatatttgtttctttaaa

SEQ ID NO: 91684 - DNA, 333 bp, Homo Sapiens
accctccccgccaggccccgctccgctcccccaggtccaccccttcccaaaccagccccgacaggtgaccgctccgtggcccaaagcccgtcttcctggccaacagagaaaaataaagtttcattctgcacactgcctcccgccccgcgccccactttttgaggaacggggagccctttctttcctggctccttcccacatctgggagctgtgtaggcagcgcacccacacaaatggcctcgcacctttcccaaatcgggattccagagcgatccactcaacaagcctcagtgatttaataaagcaaaaattaaaaaatgaataataacgaaa

SEQ ID NO: 91685 - DNA, 653 bp, Homo Sapiens
tcatctggataaatactgcgcaaaagacattgagctcaaatgatgcagatgttgttttcaggttaatggacacgcaaagaaaccacagcacatacttcttttctttcatttaatacagcttttaattatggtacgctgtctttttaaaatcatgtatttaatgtgtcagatattgtgcttgaaagattctcatctcagaatacttttggacttgaaaattatttcttctctactttgtaaccaaatgcaatcggtgtgccttggattatttagtttattaatgaattaagtcaaaattacggctgcaaaatggctaaggtcaagtaaagcacaacattatgatttaatacgcttttgttgaaaccacagcttttgtgcccattgttttaacttgtgtgaaacaatacaaagcccagaaattcttttcggggcaggagaaaattttgttcaggggctactgtctgtatggccccagaaaaaattttcatgagagtagtttacaaaagccgtatttaaaagttaatattttcacactttttttctggatttctgcttataattaatgtaacttaaattagttgtgctctgctattttctgtatatttcatgttgtaattctttttttcaaataaaaattaattcttcaggttaaa

SEQ ID NO: 91686 - DNA, 978 bp, Homo Sapiens
  misc_feature (634)..(656): n is a, c, g, or t
  misc_feature (772)..(780): n is a, c, g, or t
ctggtttctacaaagaacacagtgttctttaccatgtgtgtttcgcccctgttgtccccccttgtttgtcaattctccccccatggggttcgcatgcgaacggcgcgcagagctttttagaagatacatgatggggtacccgtataacgggttcaccgtggcgcccaccatctgagtaggtatacccccttgtaaccgaagattaatgaggtacggactgtctgtgcttcacagcaaggaagaacctggatccagtagattgtttactctgattggtcgtggacacacgttttaaaggggttaaatataagcctccctcgtcgcattcatttataacatgagaaggtaccacatgttatgtttacacaagggtgaccttataaagtccatccacctgaaggaataggaaatacactttagtgcaccagcttctgataattgatagggagaggtttgacccaggggactccatccaggccagatgccaaccaaccatgattccaattgttaggaggccaaattttaagggagaacttagagggatttagaaaaaaagaaaataatataggttaaacaagagttttaccaattactcttcttataaaattaagggagaaggccccaattaggaggnnnnnnnnnnnnnnnnnnnnnnnagaacagtggatctctcttccactttaggaaaatgttatctgtctagaaaaatggccatttttggtagcaaaacttaaatgtgtaactgtgaaaaatgcacgtttaaattagtagnnnnnnnnntaacatgcaattctccttggctagaatgtttttgttcctccttgaaattttaaatcacacacgtagcaaccctccctgcccacctcagaaaaggtcacactgtatgcactgtatgaaccttgtcaaattctacgtattattcaaaaaagttttcggacgcgtgggtcgacgatatcccgggaattccggaccgtaacc

SEQ ID NO: 91687 - DNA, 488 bp, Homo Sapiens
atattccaaaacaaaaccatcaggtccagatgggttcactggtgaattctaccacacattgatggaaggaattatatcagttctctacaatctcttccagaagatagaagcagatagaatactctctaactcatcctgtgggaccagcattaccctaaaacccaaaccagacaaaggtattaccacaaaactacagaccaatatctctaatgattctagatgcaaaaaattctcaacgatttgtgaaaaaattcatataccacaaccaagtgggacttatctcaggtacacaaggctggttcaacatttgaaagtcagtgaatgtaattcattcacatcattaggctaaagagggaaaattacacaatcatattaatagatacataaaaagcatttcgcaaaatcgaagttttttattcataataagaactctcagcaaacgggaaatagagggatattttcttaacttgataaatagcatttacaaa

SEQ ID NO: 91688 - DNA, 541 bp, Homo Sapiens
cctcacccacattcgtaagtcataagtgagcttgcattaagaccatgaggttgtctgaaccagttggatgaaaagggaggacaataattctgaaattcattaagaaaacacaaggtggcagcagcggcccctcccgagcgccctcacctgtggccgaagcggggcggcaactgtgctcagtggaagaggctcactggccacacgtgggcttctctatgctcaggttttctgcaccaggctgacggatgcggggatccctccagaagtcatcatgggcatattctctaacatctcctccatccaccgcttccacgggcagttcctgctgccggagctgaagacgcggatcacggaggagtggtgagtaccatctgcgcatccccatggggcccctcaagtgttctctagacctgggttcatgtgcctgagagcgaggcaagtgctgggggactgtctcatggtggctgggcgcctcccttctctgcacggtcctgggtccgatccagactccagcctgggcaacagagcaagacactgtctc

SEQ ID NO: 91689 - DNA, 729 bp, Homo Sapiens
  misc_feature (59)..(59): n is a, c, g, or t
  misc_feature (188)..(188): n is a, c, g, or t
gaagaagagaaatggagtcacatgcaaacttttctacaaagtatgtcatcacaagacanagtcattgtcttcgtttctcgaaaagctgtgcgggatcacttatcaggtgacctaatccttggaaatatatcagtagagtctctgcatggagatagagaacagagagatcgggagaaagcattagaganctttaaaacaggcaaagtgagaatactaattgcaactgatctagcctctagaggacttgatgtccatgacgttacacatgtctataattttgacttcccacggaatattgaagaatacgtacaccgaatagggcgcacgggaagagcagggaggactggtgtttccattacaactttgactagaaatgattggagggttgcctctgaattgattaatattctggaaagagcaaatcagagtattccagaggagcttgtatcaatggctgagaggtttgaggcacatcaacggaaaagggaaatggaaagaaaaatggaaagacctcaaggaaggcccaagaagtttcattaatgtcttctgtactagtggggtagagaattcaagattttttagaaatatagtaagacagaagtattggacatgttggcagtatgaagagaccggactgatttgactgattcttaaaataatagtgtttgaaaatatagaatccagtgttttatactttctttaataaaaatagaagtatttaaacttaaa

SEQ ID NO: 91690 - DNA, 508 bp, Homo Sapiens
gaaagttcagagaggtcacacacagtggtctttattacagcattacacacacttcaggtaattatctagttttatttatccaattcctgaaccttccagaaatggatggataagttactattcaggataaaaacagccgtggaaatgaaaggaagagccatcttctaaagttacaatgtaactctaatgcctataatgcatataacatctaatgcatataaccatatttatcaaaataacattcatatacattattttcccctccaattgaaaccaaatgcagaaattcccccaaatgtagtcttttaaaaagtaaatacatatttgttttctttttaaagttaaaagaacaaaggaaataataatagtatttaggagagcttaaaaaagatatctatttccctttgtcttaactcagatccaccaggtggcagtaagtttttacccacaaacagttctggagactttgacatttgtaaaaataataaaattatatcatgtaaaaaaa

SEQ ID NO: 91691 - DNA, 699 bp, Homo Sapiens
ttgaaagggacgggcatttagtaatgagatatgcacagcagcatagtcagctgtgtggtgcattctcagctgtgcctcagcagccctgatgcagacatccagaaggagcacagccactttatccagagcaatcagccatgactgcctttgcactgtccatgctctcagcccaccacctcctccccctgccattgcagtggctaacactggagacgaagaccaagacaccaccgcctttctccagtacctctcaaatcagcacaggcaaggacaaaggcctcaatccacaactgctgaagatggaccctggccacatgggatggtcagacacgcctgcccagctatctgcaggcgaagaggctcagaagaggtttaggggcctgaaggacatcttgcttccatgtccatatgagcaggctatttctgctccatgagtcaattttgccatataaaatacttaatttcagccattccagggtgctgtaggatgcacagcttcccatcagcccacctgaactccagccatgccattttgataccaggaataaggtcacctgctttcctgccccttaggaggccagagccgtggaagcaaaatggcacttctgtttacctgttatattatttttttgtcatccttatatgtttgaaaaatgcaattatatgaaaaaagtttagtaattacagacataacagcag

SEQ ID NO: 91692 - DNA, 394 bp, Homo Sapiens
aagttgaacctcattcttccttgtttctctggtagaaaccatctaccctctaccaccttgcacagtgggcactggtcactcctatgtgctaagacaaggcagacatctgtgtgtctctcttaagtctttggaggaaatcttgagcagtctaagcctttagagaaaattcattcttttttctgactgatcacagcatacgtgtgacccagtttgggtcaggagggcccagccttggttctgctggacacttatgtgcaaggattcccttcatgtaaattcttggtctcacatgacacttggtcattcttccagcctccatgtcaccacgtggtgaatggctgcctcacattgctccagtttgtgcactaataaaagccttatattagaatctaaa

SEQ ID NO: 91693 - DNA, 670 bp, Homo Sapiens
tctagatcagagcagtttatacaaggatggtttggaaatccaatctgagtagttcagaccatgaccctgcttagcatgggatgcaggagaaagcagaggcagggtacattcagggcaagatctcggcctggggtctgagtcctgatgggaattcctttcactgcttgaaagttctcgtggcaaagaacttcctctgtatcaacaatacccacttctgctcagagctcatactgctgcctccccatctgagggaatcctctggaagagccatcaccttccccgctctatcccatgggcccagggcagtgcttggtgcctggcagggcctcaagcagtgtgctatgcgaaggcagaggcatcccctggagcagggctgaccagcagaactctcttgatgatgaaaacctttctgtgtgctgtccaatactggaggccttacccagtgcgatggaggaactgcacttctatttcatgccagcagtcacatgtggacggtgtctactgaagtggacaacaatacagcccagattctccttggcatatcacagtggctcttcttaccaaacggggagagagggaggcagtgcctgtcaatgtggtttggccctctgccgattcttggctcagggcaaatccctaagtggtcgtttaattcgaacctgtctggcgt

SEQ ID NO: 91694 - DNA, 598 bp, Homo Sapiens
cacacgtgttcatcccagcaagttgcttcatgcttctaggctctgtgtcatcatccatagtatagagtgtttctagattgcctaatgtcactcacactacgtcactgggcaggtgtgtggtacactagctctaacatcaagcagacctgagtttgaatcctggctccgtcttcaagcaatgggctcttgggcaagtaattttcccatctgtaaaaatggagatgataatacctacctcagggtctttgcccttattgttcattctcctggggacagtctttcccagatatccgcaaaggtcactcttttacctccttcaggtcttcactcaacttacctttttgtgagaactttcttgaacacaatagctaaacttgtaaaccatctggcatttcctatcctctttcctcattttattattttccttagcactcaatacctaacatactatatagcactcaattatcttatttattgcctctttcccacctctagaatgtatgctctataagggcaggattttttgtattctttactgctgtatccccagtttctagaatgatttaggtgattaataaatatttcttgcataaatgaa

SEQ ID NO: 91695 - DNA, 573 bp, Homo Sapiens
aaagaaatttggtcccccaagtgatccagtgacacatctctcagtatgctccagtccaaatttgacaagaaataggtttcctcaagaagagcgccagccacagttctggagtatctgttcctagacggaggtgaatgcactagatgaagtgcatgaacctgaacaacttgagggaaggacagtagtagatgctgggctgctgtcaagatcccccttacagttggggcacccattcatccagctgcccgggttgttgaagggtagtgatggctctcagatgactccctgtcctgaaatatcctcagccaagggaaactgactcatctaaaattttgccccctccctgggcacaggctgcacccatgactagtctttctggggacacaaagacttgattcccttgtctcaattgagacaattctcacggctgtctcaagtccagagctccctgtcagcctctgttgaaactgtattgcaattcaactgctccatttgccaagttctgcctttgcttctccctttgccccattctcatctttcaagatctttactcgataaatatttagcataaaa

SEQ ID NO: 91696 - DNA, 478 bp, Homo Sapiens
aaaaactgaattaagaatgtaacttggctccaagttctggatattccccacattatgtgagaactagagtagtcaagagggcaaatcatgccttgcaatcataattctcaattagagtcttgattctacaacttgctaacttagggagactaacttggggaaatttctctgagtcatattggaaaaatgagtgttaaaagcactcttgaccctatctacatcacaagatttttgtgaagattcacggaggtgatgtagacaaagcccttataaaacactggttgcatatttggaagctaataggcctccaagtgactgaagttgatgtgatgttagtacttgaggaatggtaggcagttggcaatcttgaggtcacatgcctgtcagcttcagcagatcattgccatgtgcaaagtggtcagacgtagagtgccagaaccttggtttttaaagaaaacctgggtatctaaaattttat

SEQ ID NO: 91697 - DNA, 435 bp, Homo Sapiens
accagcagttcaggaagtgaaccatgtagaaaactagggaaaatattcctttaaagaaagaacaagaatatgagttttgctgattggagtagttgaggtttgctaaatagcttctccaacatgatgtgctagaatcagatctttcttcttagatttatttaatctctgtgagcctcagtttcttgtttgttacattcagagaactcacaaaacatatagatgtgagaattaaatagtatgtcactaacctgcagattgcctagcacatagtaggtgcttaataaatgttaccttccttttgtttctctgtaaggatgtgcatgtcttaagatccttgagcaatgtttgttttccttaaataggcatatttgtacctaccctccattacagagatggagataaatatttattgtggaataataataaaattttaac

SEQ ID NO: 91698 - DNA, 546 bp, Homo Sapiens
cattcatccctagttcggaaattcaagctaactacttaccctttaaactgtcactgcatatgcaagtaccgctctaatttttggatcattaaagggagttacacaacttttaagtgaaaaaaataggtaacaaaacaaccacctgatagtaagttttctgataagactatagataagtggtagaggtaatcaattcttccgaagtgtttccttcgtgaataactggtagaggtaatagttttttcaatgtatttccttcatgagtaaagaaaatgtggattgaagtatagattccagtagcctagtttccacagcacgataacaccatgacgcctactgctgttcccaccttgggattctgtgtgctgccatcccacctgcagctgccctggaattcccttcgctgtttgccttcatctccctccacgtttgagaggctgtcaggcagcagcgaaagcttgttaggatgtcctgtgctgcttgtgatgagagcctccacactgtactgttcaagtcaatgttaataaagcatttcaaaaccaaaaa

SEQ ID NO: 91699 - DNA, 437 bp, Homo Sapiens
agaactgttctagtgaacggtggcaaaacatttgctgtggagaaaaacaagtcagtctggaaaggaaaaccaacccattttgaagataacttagcattcttggtgacttctgctacttattgtactgtaggtggataccaaaattctgtgacagccactaccacttaccttgaatgaaggctttcattaggaacaggggaatggcgttgttcttaaggggctagtaagcatgaacaggtgctttgtcgacaccagggcactaaatctggtcttaatcacctgaacctgtgtcagaagactctgcaatactcttcctatagttcgtcagtataagtccttaaagagacctgagacatgctggatcagtgttttccaaagtacagctcacaggctattaccaagtgttggtcaataaaggtattctgaggtaaaaaaaa

SEQ ID NO: 91700 - DNA, 498 bp, Homo Sapiens
cctccccccaagaagtaaaagaggatgattattaaaaattacaagtgccaccttccacactccatctcccaaacttcatttcacaatggctgctgacatcaataatgtcagacaggataatcaagtttgcataatgtaacagttctccaagggtccctctgcacaatcacccctcccagcctgcatatagggaaacagaccttagattaggcagaaaaggcccttagactgtcaaacacaagagtcctttctccacatgcgattttacaggagttagcctccatcagaaaagctgacttctgattccagtttgaccctttattggcaggaggacaggggcaaatcattgaatcatcctgtgcctcaattttctctgctttaaagtggaaataactctgtagtattctaaaagaatgtcgatcttgaatggcatatatgtaccatgtaattgatgaagtttattaagaataaaaatatggtgatagttcaattattaaa

SEQ ID NO: 91701 - DNA, 456 bp, Homo Sapiens
tctgtcgtccacacagcagtcagagatccttttaaaacataagtcagatcatcatgacactcacctccctgctaagtgtcctgcaaggcctttcacggtctgatcccctatcctttctctttcctcatctcctatcactcttgcccttgcaaattttcttccagcactctggcctccttgctgttcttcagtatggcaagcaacctgctgcccggagcccacacactgactgtcccctctcctaggacactcttccctcaagggctcccatatcttgcctgctggctcctgcatcttcttcaagtctgctcaaatgtcaccttctcagtgaggcccatcctggctatcctctttcagttctgacagaaaataatttattgctttattacatcattattttgttgtcttccctccatctgttcctactaaaatttaatctctgagaataaagaaaaa

SEQ ID NO: 91702 - DNA, 563 bp, Homo Sapiens
agctccaaagacccttgggctgacagagcaggttctcatttctcagctctttcccttatcacttgcagtgaactctgcccccaggagcagagtatccagttctgtgtccaagcactctatgaatctttacccttgttgaagaaatactcagagacagaagcatttagaaaaggaaaagtttacctgcaaagagagcaagagaatgactggcttgcctaataaaaaacggtgcaacgtctttcttttctgatggtgattgatatggtttggctgtgtccccacccaaatctcatcttgaattcccatgtgttgttggagggacctggtgggaggtaactaaatcatgggggcaagtctttcccgtgctgttcttgtgatagtgaggaagtctcacgagatcttttggttattataagagggagttttcctgcacaagccctcattttgcctgctgccatctatataagatgtgatttgctgctccttgccttccgccatgattgtgaagcctccccagccatgtggaactgtaagtccaataaacctcttttaaaaattaaaaa

SEQ ID NO: 91703 - DNA, 463 bp, Homo Sapiens
tttgaccttttgtgcatttttaatcgaattatttgtttttttcctactgagttgtttgagttccttacatattctggttattaatcccatgttagatgggtagtttgcaaataatttctcccattctatgggttgtctcttcactttgttgattatttcctttactgtgcagaagctttttagctttatgtgatcccatttgtccagtaatcagcccatcaagatgtgcatggcatttcactcatctggagataccgaggtaatcccctgcccttgtgtatttcataggttttttattaggcaagccagtcattctcttgctctctttgcaggtaaacttttccttttctaaatgcttctgtctctgagtatttcttcaacaagggtaaagattcatagagtgcttggacacagaactggatactctgctcctggaggcagagttcactgtaatcccagcagt

SEQ ID NO: 91704 - DNA, 1179 bp, Homo Sapiens
  misc_feature (1124)..(1124): n is a, c, g, or t
tactatcacggtttaaggtagcgaggcctgggtggcgaattcggcacgaggggatgacaagtggacagtttaagccggttcctcagatcctaatggagctgccccctgccgagcaacagaggctctttaacgaagccgcagccatcatcaggcacctggagtggacggacgccgtgcagctgactgcgctggtcatgggcagcgaggccctgcagcagcagctgctggccatgctggtgaactacgtcaccaaggagctgcgggccgagatccatgtatgatgactaggccgcagcctccggggaggtggggggcccctttaaactgactctgtgattctgaagaggtggcttgggagttgggagaagcccagcggatgccccctggggcaatctccacatcatcagtgtattactagtaatgtcccgctggagaggacaccgctgtgcagtgtcatgttccagaaattactgatgaagcagcatgtgttggctggcatgttgccactggcctgccatgacagccctctgactggccccccagtgaagagtaaaggcctgcctgccgcaggcttcggaggcgtctgctgagtcctctcacccgcatgggtctggggaagtgatcacgctcagccgacggtctgaccacacttcatcctccccccggggccttctcatcttgggagatgactcctcttcagagcacctgctgcaggactggatcccacccccctgctaggtcctggggtctcagggccttggagcagcccatgctggaatcatgtttacctcctagtgcaaccgtcccctacccagggactgtcgaatggccccacggaggggacgggcggcctgctgagtgaagccacaaataccgagtggacttgaccccggcccccactaggctgcacacctagactcgccctgccagggcctcgctcttcccatctgaaaagtcctggtagttcttgaggtttacttctcaaatgaaatatttttagtaaaaagtacaggtatatctcggagatattgtgggttcagttccagaccacctcggtaaagccaacatcacaataaagcaaggaagcgcattgttttagtttcccagtgcatctaagtcatgtntactgcatattgcagtccactaaatgtgcatagcattatgtctaacaaatgtaca

SEQ ID NO: 91705 - DNA, 428 bp, Homo Sapiens
tttttactcaagctggggcctatgtttggtattgaacaaaatggaatgctgcaattttctctctactgattttgttactacagaaagcttaatgtaaaggtggctgatactgctgtttccttagacactgacaccaaatacaataaagaagtctctcaagaggaaaacatggtgtgtttacaggagcaactaacagttggtttgtaggcatcctaaatggtggatggcaagcttgggtttcccaaaggtttctagtctttatacgtcttctagtaggtgcccaggttagtatggcctgtgttaccagagtaacaatgaaaatggctacgtctttaaatcaggccactttacagtgaactatggtccttaattgctatcacatttcaaacaagaactatgaccaattaaactttactattgttgaaaaa

SEQ ID NO: 91706 - DNA, 482 bp, Homo Sapiens
attcacatgttgaagtcctaacctttagtacttcagggtgtaacttatttggaaactagatcattatagaagttaaaacgaggtcataagggtgggccctaatcttactaacctgtccctataaaagggaaatttgaacacagtgacacccagagggaagatgatgtgaagacagagagagaagacagccatcagcaagccaaggagagaagtctggaatggatcctcccctcacagccctcagaaggaaccaagccagccagcctctcaatctcacacttttagcctccagatctgtgagacaataagtttatgttgtttaagccctccagtctgtggtactttgtaatgtagccccagcaaactaaaacatgggttggctggtggcattagaacaagttgcccatgaaaaggttacaggcagcctagaggacaattgaagatgcattctactttctgcctgcactgtgcatctagtgaag

SEQ ID NO: 91707 - DNA, 1086 bp, Homo Sapiens
cgaggttggcgctcctccaggaaagcgattggctgcgtggagtttagaatgggaaaggaatgccatcaacccctcggtgctttcagagggaccagcggggtaggagcgggttgagaggggggctccgggacctcatggagctctgcacgtgacctccacctcgactccatgcagtgcaccagcctgcaccccccaggttgcctttgatggggaatctgccccagccgagatgtccagatgttgctttagacctgaagggcagctcgggaggtccagtaggctgggaccctctatgtccccccatgggtgcagatcctttaagaagtgggcttaaggcctagacgtgtggctgatgaacgtggcccacggtcagcagctcacaggcggaccatcaccccaagtagggccaggagccagccaaggggccgtccaggggccccagccatgcccagagtcccgttggtggtctcaggcactgaggtcgatctcgtgatgctggtagatctgtgtggggcccttaaagcaagcagcaaagaggaagcgtctgccggccatagtgatgtgggcaaaggcacggggggccaccagggccggaggccccagctcctgcagtggctccaggagccccttgtcaggctcaaggcggaggacctggctgaaggcgaagtcgctgcctaggatggccagctggtccctggcgatgagcagtggctggaagacgtgggcaccgcgcgagggaagttgctgcagcagacgaaacatggagccgtcccagcgcatgaccatggagtccccaatgtagcgtgtgaggcacaggaacacgtccccaccagcctggaagtggcgtgtggcatagacatcctcggcctcggggatgtctgtgcgtctctcgaagcggccaccggtccagtggaagagcacgggccgctgggaagccgaggccagcagcaggtggggccggccgtccagctccagggcctcagcgtccgtgtcccggtgccaggcgtgcaggctctggtgcgggtaaaagccgggcccgtcgcggcacagcagcgtggtgctgcccgccttggaggcatcggccac

SEQ ID NO: 91708 - DNA, 500 bp, Homo Sapiens
ctccaagacaggagagtaataggaggaagagcaaatctgtcttcacctgcagtattaatgggtggtgggccagaatggaggaaagcaagtgagtcatgtgctgctacaggttacaccaaactcccatccctctgttactcactgctgttgtcaaagccaaactttatcttgctaatttctcacagcttggcacctaacaaatgacaaggcaggacatccaatgccttcgagctctgtggtctggcctgtctctccagatcagatttagagtgaggtagcagatgacataatattctctttggtgttcaatccgaagaggccaatgcttcagcacaatgtcccctagccatcacccccagcccgactccccaccaagcatcctgcatccctctgccacatcttcattcttttccattctgtcttttccccgagaccttctgaccccagcggatttcgaatagagcataatgatcaagaaaataaagacctggtacataaaa

SEQ ID NO: 91709 - DNA, 576 bp, Homo Sapiens
acagaaagacctgtcaaagtctttaatgctgacatccactgtcatcttcgaggggaagagtagcatgcaacatttttcaaacttagtccatgcaatcattttttctgtggagcatctcacaggatatactttgggaaatgcagttctagaactacatggagtccatttccatgatataactaaggccttatctataacctcataatagaagctcttctcccgtgtcttcactggaggaaattattcttagcccacatctacctatcacattcagagtttacaacactgaaatgtggaaatttggggctaacaactgattctttccctctatctgcccatgagcaacaaaaagcctgctgtaacaatgttccagctctaattgtgctggactgcatctcctgaaatcttctaaaaaccaaccacctagattcacaaaatagctgttttaaaaacatacacataaaagaacccaaactgtgaccattagttctcctaaaattcagtaggtaaatatcaagctacagctgttcataaatactggcaagaattagaaaacagtaaataattaactctcaa

SEQ ID NO: 91710 - DNA, 234 bp, Homo Sapiens
gattaattaagggaagagcttcaagcagagctccttaggttagatgaagcctgcgtttcacttctcttaaaaatgtttacaaactggaaacaaaatatttaggaagggaataacaactaacaaaagccagtggaattactctaaaagagagggtatcatggctaataaggatttggagatatcagagaacttagaatacaacatgaaagactatttaactcaggggttctgata

SEQ ID NO: 91711 - DNA, 481 bp, Homo Sapiens
gcggccgcccaacagggacgcgagccgggaccacttctgacccagcgtgcccaggccgaggaaagcgcggcggcggcagtccgaagacccaccgggactgaaagagaaggacgaggtcatcttcggacgggaggggcaagccagccatcctgggaccccaggcgtgcaggttctctttgagggtattccaccctgcaaaaagcatgtattcatggtcagctctcagcaaggccagtagcagagtggtaaaggccttggccctccaaggctgggaaaagacaatgacaagtcaaatccagacctatgttggatgttggtctactaggtgactgtctcctggaaatgttatgcagctcagcaaggtgaaggtgagaatatctttgctttttgataaaacacagaatgcatagatttcacatctcactatgtgagcccccacaaaacaaaacctagaggagcatgtgagaaaaacgcatctcta

SEQ ID NO: 91712 - DNA, 550 bp, Homo Sapiens
ggatttacttcatcaatgactctataataagtaataagggtagaacacattacaattcacaaaataattccacaaacattatctcacttgcttttaataacaacagtggaagaatgaacaactcattccagtgaggaatttaagactcagaggttaaataaagctgaatatgggaaagattaggcaatttgcccacctcaggacttgaactttggtgggcaggctttagctctaaagttcttctataccaaagctgtgtcaacattaaagctgggactggacttccaatctgaggacccagaagagtcagcatatcctacttaacttctaagggtagggtggcggggtatgatttctttattttgaactataatttatatggtgtctcctagaagtttatggcccatacaggtatcttccactgttgcgggaagtcaaggaccccgaacagagggaccggctggagcctcggcagaggaacataaattgtgaagatttcattttaatatggacatttatcagttcccaaataatacttttataatttctt

SEQ ID NO: 91713 - DNA, 512 bp, Homo Sapiens
cgatttcttttcatggttttactctagcaggaatggattccattctgatagtaattccagttttactgtcacatagaaggagatactttgcgaacctcaatgactgccaggtttagcacagatattaagaaccacagtgtcagaaatgaaagagtacaacttcacagaatgtgttgtctctgacaggttgatagccacttaccttctccatcttttcttcctcaaggatagcagctgcttcccacagatacaccaacaggcaattccagcccctctctaccacacttaccatttgcaggtgcctgtggcttgtctatttacaaccttgtccctacacagcagaagcggaacccttcaggaagttctggattcatcctcagcaggatctgtttcacaaactattctccagtcccaccttccctccaggtattctgtcagtacttacgattcccagatcttcttttaattgtcacgctgttcgtcccctcacaaaatcaagtaaaaactaaaaa

SEQ ID NO: 91714 - DNA, 1041 bp, Homo Sapiens
gcggccgccgcgcccgggaaaatgctgggcatgtacgtgccggacaggttctccctgaagtcctcccgggttcaggacggcatggggctctacacggcccgcagagtgcgaaagggtgaaaagttcggaccctttgctggagagaagagaatgcctgaagacttggatgaaaaatggattacaggttgatgtgggaggttcgtgggagtaagggagaagttttgtacattttggatgctaccaacccacggcactccaactggcttcgcttcgttcatgaggcaccatctcaggagcagaagaacttggctgccattcaagaaggagaaaacattttctatttggcagttgaagatatagaaacagacacggagcttctgattggctacctggatagtgacatggaggctgaggaggaagaacagcaaattatgacagtcatcaaagaaggggaagttgaaaattctagaagacaatcaacagcgggcagaaaagatcgccttggctgtaaagaggactatgcttgtcctcaatgtgaatcgagttttaccagtgaggatattcttgctgagcatctccagacattgcaccagaaacccacagaggagaaagaatttaagtgcaagaactgtgggaagaaattcccagttaagcaggctttgcaaagacatgttcttcagtgcacagcgaaaagcagtctgaaggagtcttcgcgaagttttcagtgctctgtttgcaattcttccttcagttcagcatcgagttttgagcagcaccaggagacttgccggggggatgccaggtttgtgtgcaaggctgacagctgtggaaagaggctgaagagcaaggatgccctgaaaagacaccaggaaaatgtccacactggagatcctaagaaaaagcttatatgttcagtgtgcaataaaaagtgttcttcagcatcaagcctacaggaacatagaaagattcatgagatatttgattgtcaagaatgtatgaagaaatttatttcagctaatcagctaaaacgtcatatgatca

SEQ ID NO: 91715 - DNA, 578 bp, Homo Sapiens
tcatggaattggagagtattatcgaggcttggtgcccattcttttccggaatggactcagcaatgtcttgtttttcggccttcgaggtcccattaaggagcatctgcctaccgcaacgactcacagtgctcatctggtcaatgattttatccggtggaggtctattgggtgccatgttgggatcctggttttccccaattaatgttgtaaaaactcgcatacagtctcagattggtggggaatttcagtctttccccaaggttttccaaaaaatctggctggaacgggacagaaaactgataaatcttttcagaggtgcccatctgaattaccatcagtcccttatctcttagagcataatcaatgcaacttatgagtaaaggttatatgaaaaaaaccaacagtttagtgccatttatcaactgaatagaccttctaagaagaatgcagtttggcctctttcttagttggccaaatacaagttggtgtcataactccaggccacagtgagttatgggcaaagctgttttgcttaagcctcaataaaacagaataaaagattccaataggaaaataaa

SEQ ID NO: 91716 - DNA, 839 bp, Homo Sapiens
  misc_feature (148)..(160): n is a, c, g, or t
  misc_feature (163)..(176): n is a, c, g, or t
gtgacctgttactaaaataaaatagcagcgtgtgctggctgaatccagtactcggaagtgagcagagatcgctgaacctgaggcagagttgcatgagcgagatcacgcactgcctccagctgggcaaaaggtgagactctgtctcccnnnnnnnnnnnnnccnnnnnnnnnnnnnnaataactgatcattgattctctttcccttcctgcagtctcccaaggtgtcaattaggaagtgccaaaatactaaagtctcatttaattttcctgatcaacttatgttctaataattaatgtggaaggagaggaaagaaagagaaaacaaatgagaatctaaggtagtaaacagcagcaacttagcgggaataaggggaacatggttctcactaaccaaataggactgataacgcttccaaaaaataaaatgttaggtgaagggaaatatggaaatatgttttactttctactaatagctgcaggcaggaaggtccaaacgcagggtttaactaagctgggggagtaggggagatgtttagagggaatactgaaagagaatcagtttcaaccataacccccatctactgtagagtatatccagaaatctagactactagtatggtatacatatgccctagaagcaacttaggtagtaaactcccatgaattgtttgtaatttatcttgtccctgggcagtttcttaggaggggtttcagaagcaagatctctacttccttcagaataataaggtagggaaggaagcctcaaaacaaagtggcaattggaggcagacctcgtgccgaattcggcgcgccgtcgacttcatactctctccactcag

SEQ ID NO: 91717 - DNA, 523 bp, Homo Sapiens
ttcactctgcaaccattttactttattactttatgggaaaatttagatatgcaaagcaatgcagataccaaaatatgctttccaagtgtttttggctgagtttgtctctttcagcagttctgaccctaagatacatacttatatggaaaaagctatggataaaaataaataaaatacatcttaatcatcaatatatagacaaaattgaatagaaaaaagtaagaacattataaagcatgaaaatttacataaaattattcctgaatgtgagggttgaaagactctagaggcctgaaatctatttgaaagagaaactttcaagaaaaggaaaaaagcattcctctacttagaatagatatgctatgatctgattctgaagcaatgggattgaactgaatgatatatgaggtttcttccatggcccactgatttagatgatagcagtaaaaaatatattagtgaaaatcatttaatactgtaaaagaataaacagatctggacaggaattccgtaaaaatacatg

SEQ ID NO: 91718 - DNA, 477 bp, Homo Sapiens
gcacactggtgaaaagacgttgatgcataacttctagagatgccatggttatttatgtcattataaacagcttattctaactgggaccccacagccacaaggaaaaacatacaattttatttacaaagaagactgaacccattttaacttctgtatcaaatgctctgagtaggttggcttcgatagtcatgttcagtcctgggtagaatgtggtctcattatacaacttcaccaccaaatcctagttctcgatgttatccaaagctgccttcttcctcaaagacctcagtcccctcccaaagcccaggggagcgtaaacaaatccctctctctcagggttacatgaaaagccaagtcatcatccaacacaataaaataagctggtgaaggaaagaaccaatcaaatctctttgattctggacttagggaaagcacttaggaaacctcatagtctgcccgtcagaggggaaaaaacgc

SEQ ID NO: 91719 - DNA, 483 bp, Homo Sapiens
agctaccccaaagcgggtgcatccacgaagacacaccggattcagttgttaggttaaatgagatgcacgtgtccggaaggaacccaggaaactcttggtcattccctctggagtaccagggtaaaacacatgtgcaagaactttgtcaatagctggggggagggggcgtcacacacgaccctctggtgacagtgagcaaagcctgggctgtgtgctctcctgccctgcacaccctgagctctgtccaggctgaggccgggggacctggtggcggctgcagccttctgggcccttccagccttggaagtcaggattcctttgctccaagtgagccttggggcccgagtcacaaagccctgaggctgaggaaccgcttaacctggggtgacctggggctgtgccccgccctgcccagcttcacctcgttttcatggaactggctcagcacccacactgcacccagatgccagcaggagcggccgc

SEQ ID NO: 91720 - DNA, 553 bp, Homo Sapiens
catctctgaaatgactctccatgatataatcaatggcatcttacaactgctaccagcagaacagcagtcatggtatactagtcatccaggaggtgtgaacttggctgttagtcttgccgacattattggacaactgcaacctcttgacgtttcaatcagtaaactctttaagagccatttgaggaaggaaaataagccttatttgttccctgaaaatattctgttgatatcttctggtaaagtcaagaaagtgccagcatcaaaacttgcagaatgagtactggaggcttaggggaaaaaatctcagaagcatactgttattagtagtagaacattctactaagatatgttgtcatcatcaaaattattcaagaattttgaatagtaattaagattactattataaatgggaaaataattagaatagtgaaactagtttatttcactcataatttactttgtatatatacctatgagtgatatatgataaaactacatttttaaaatcaaaaggtctttcaatatgtatacaataaaaatcctaagaattaga

SEQ ID NO: 91721 - DNA, 594 bp, Homo Sapiens
gccggacggcgccgccgacctcgtgcccctggaccgctacgacgcggcgcgcgccaagatcgccgccaacctgcagtggatctgcgccaaggcctacggccgagataacatccctgaggacctcagagaccctttctacgttgaccagtatgagcaggagcacattaagccgcctgttatcaagcttctcctgtccagcgagctgtactgccgtgtctgcagcctcatcctgaaaggggaccaggtggccgccttacagggacaccagtctgtcatccaggccctgtcccggaaagggatctatgtgatggagagtgatgacacccccgtgacagagtccgacctcagtcgcgcacccataaaaatgagtgcccacatggcaatggtggatgccctgatgatggcctacactgtggagatgatcagcatcgagaaggtggtggccagtgtcaagcgcttctcaacgttcagtgcctcgaaagaacttccgtacgacctcgaggatgccatggtgttctggatcaacaaggtaaatcttaaaatgagagagataacagagaaagaagttaaattaaaacaacagttattggaaag

SEQ ID NO: 91722 - DNA, 515 bp, Homo Sapiens
ctatctggtagatcacatgtagatgtacagtgtgtatattaagctgaatttcaaccaactttattactaagaccagcctagcagggcattcatctttgatgttcttccttttcacatttcagaaatcggcaatgcctggcccactcctgagagctctagttttctagttttccatttccagattgcgccagcattacagtaactaactctttctaaccaaccgtgatgccacgtaacttaccctatggacaaaagcaggaatgactaacacatcctaggagggaaagtccagtgtacctgtcatcacggacgcactgtggtcacagactggaatacgaaatactacagccctgctcccaggtgtgcatcttactggatgaggttgctgtgattgagatagttaaatacatgctaatttaaaaatgcagatgttttacatttgatttctaccaagagttgaaatgttgagagatgattaaaaataataataataaagtgtcttccattgttaaaaa

SEQ ID NO: 91723 - DNA, 669 bp, Homo Sapiens
gcggccgcccaggcgaggtgcggcctccgcacaggcggtgtgcgtaggcgcgcggggcccgccatggctgcgtcggagctctacacaaagtttgccaacgtttggatacctgatccagaggaagtctggaagtcagcagagctgctcaaagattataagccaggagataaagtcctcctgcttcacctcgaggaaggaaaggatttggaataccatctagatccaaagaccaaggagctgcctcacttacgaaatcctgacatacttgttggtgaaaatgacctcacagccctcagctatcttcatgagcctgctgtgctccataatctcagagtccgctttattgattccaaacttatttatacgtattgtggtatagtcctagtagctataaatccctatgaacagctgcctatttatggagaagatattattaatgcatacagtggtcagaacatgggtgatatggatccacatatctttgcagtagctgaagaagcttacaagcaaatggccagagatgaacgaaatcagtccatcatcgtaagtggagagtctggggcaggaaaaacagtctcagctaagtatgccatgcgatactatgcaactgtgagtggttctgccagtgaggccgatgtggaggaaaaggtcttgggctacaaccccatc

SEQ ID NO: 91724 - DNA, 458 bp, Homo Sapiens
tgcccttgcctcacccctaccctcccactcttcgcgcgcacaccccggctttcacaataactggatgagcgggcctggcctgcagcgacgacctagtgggccctgcctctccactcccgcggtgatgtaccgttaccaccctcttaaaggagcccaggaaggaggcggacggccccgtcacagagcgtgtagggaaaacacagcacagtgattatcaggacgaaaccaaacaatcggaactccgcagaggtgtagggagatgtgaggagaatgacacagatcaaagagctctttccaaagccagtattttccaaaccgcgggttataatctctagcgcattgtgaaattggtttggtagatcgggatcatcaccctccgtttttaataaaattgagaatagaacaaaatagaaaagtttcacagtacatcacgtagtaaaggagttgtttagagaaaa

SEQ ID NO: 91725 - DNA, 1146 bp, Homo Sapiens
aaggctaggtacgaggctgggtgtttgaattcggcacgaggggaggtggtgcgcctcgcgcggcagattcgaagctagggcggggcccgcgggctgaggcagcggctgtggcggcgacgctgggcgtgaggtggctggcggccgcgccctggttgggtccccactgctctcgggggcgccatggacgaggccgtgggcgacctgaagcaggcgcttccctgtgtggccgagtcgccaacggtccacgtggaggtgcatcagcgcggcagcagcactgcaaagaaagaagacataaacctgagtgttagaaagctactcaacagacataatattgtgtttggtgattacacatggactgagtttgatgaaccttttttgagcagaaatgtgcagtctgtgtctattattgacacagaattaaaggttaaagactcacagcccatcgatttgagtgcatgcactgttgcacttcacattttccagctgaatgaagatggccccagcagtgaaaatctggaggaagagacagaaaacataattgcagcaaatcactgggttctacctgcagctgaattccatgggctttgggacagcttggtatacgatgtggaagtcaaatcccatctcctcgattatgtgatgacaactttactgttttcagacaagaacgtcaacagcaacctcatcacctggaaacgggtggatgctgatccaggttcctcctggcactggaaaaacaatcctgtgtaaagcgttagcccagacattgagcacctagacttcacgcaaggtaccgatatgggcactttaatgcacataaacagacacagctcttacaaagtggtacacggaaagtggcaagctggtaaaccagacatgttcagcagaatcacagatcggcagacagaaaaggacgccccagagtagagccgggatggacgacggtggaaacgaactccaagcggccggaaaggacggcagagaggcacaaacaccaaaacgaacaaggggcaaagaagatacaccaatgccaacgaagaggacacccagcagaggccacgacaccacaccgaaacagccagcaacgaaagaaaacgagcaggcgcgcaggaccaacccccgacaacacgcacgaagaccaggagc

SEQ ID NO: 91726 - DNA, 537 bp, Homo Sapiens
agctggctatggtattttctcttaagatataatagataagatgaactctatataaagtggtggctcttcctttaggaaaaagaaaaataatagaaaagcagctttgtagaggaatgaaatgtcctgaaactccctactcccagagaaatgtcttccctggcttacttggatttattgaggcaaatccttaacctacttacatgctgtttgtttgttcaacctggaaagaaatccatttgcatcgcacccacccacccaaagaggactggagtatgctcccattcaggagagagctctgctgtagggatggtacactctacaattgctgaagaaagccagttgaatgatcaacagggaccactgtaatccttcaatcataattacaaatacacagactttgaggaaaagtaaaccattaattagaaacatctataggaacaggtggaacagatggtccttgagagattaataatggcaatagaagttaatttaacatttccattaaaattattaaaaaaatttgacagaatattgaaa

SEQ ID NO: 91727 - DNA, 450 bp, Homo Sapiens
aaaaaggaaagaagcactgatacatgctatgacatggaagaactctaaaaatattaggctaagggaaagaagccacatacacatacacatacacagatagtttatggttccatttatataaaatattcagaatagaaaagttcatagggacagaaagtagattacctggggagtagggggtgaaaaatgggtagtaactgcttaatgggtatgaagtttcgtttagggcgatgaaaatattctggaactagaaagtgatgatgatggtcacacagcaatgtcacatatacaataccacagaactgtacactttaaaatggttaaagggttttattttatgttatgtattttaccacaattgaaaaaaatgtttattaaaattaatgtgtaaacatttgtgaaagaataatgtgtagtttctaacatttatgtgtttaaaataatgagttt

SEQ ID NO: 91728 - DNA, 539 bp, Homo Sapiens
ctgggattctaggcccacagaatttttgctccagtgaagttggataagcactccgcctccccgcaaaaaccagagttctcggcttataaacacttcaataaactctggtgacattctccgcgctcgctccttgccctcgcggcagtcactgcagggacaaaggcggcctgcgcagacttggaagaggcgcggcccgcgtgggcggctttaccggccaaagacgttttcagttaaggggaggcatcttcagagctgagggtaactccccacagccaccccgcaggtagggcagccaaccccaatctggtcagcttaaaagtgtcctcggtttcgccccctttcccagcgaaccaacactggcagattggcctgcgagccgctcgctctgttgctctagcacatttatgtagccaaacggtcgaagagccccatctttaagcccaataaacacttaactttattctatttaataacacattttgttgtggcaatatttgtggattttggcaggtattaaaatctggtgatcataaatgaaa

SEQ ID NO: 91729 - DNA, 455 bp, Homo Sapiens
cttgatgtttactgctgttggggtgccacaaacaaaatattactgctcactgacaatgcatctggtcaccaaagagctctgatggatatgtacaaggagattaatgttgttttcgtgcctgttaacacaatatcctttcttcagctcatggatcaagggataattctgactttcaagtcttatttaagaaacattttataagtctatagcagtcataaatagtaattcctcttaggaatctgggcaaagtaaattaaaagccttctggaaaggattcaccgttctatatgccattcagaacatttgtgattcatggcaggtcaaaataccaacattaacagaagtttgaaagaagttattttaaccctcatggatgactttgtggggttcaagacttcagtggagcagaattacaagtggagcctgaagatgtgactgaattgctgcaatcttat

SEQ ID NO: 91730 - DNA, 1004 bp, Homo Sapiens
  misc_feature (744)..(744): n is a, c, g, or t
  misc_feature (883)..(917): n is a, c, g, or t
  misc_feature (921)..(960): n is a, c, g, or t
tgaaacaacaacagtgtaatctttaacagggatgttaaaggtaagaagtcaggaagataaaccaaaatgattgagtatgataaagaattttgcatggcgattaaaatagaaaacctataaatgtagaaaaagcaggtctggacttagcaaagaaacaatatagtttggagaaggcatgaaataagttcttttcatgttcactgctggtcacagccataacagagagtgatgtggagagctttgggaaggtttcacgttgagttacatcagtggtcaacaatggagcaacaagactccgtagaggatgccaccctgggagaattgcaagggaaaggaggctgaagcacaactggtaatagccttcagatatttaatggatatgcaaataaagctctgattaattgtattttcacttattatatatcatctttggacctttctaaaagtgggacactagaaaagatatactgaaactcaaaaagaatacttcagctcgagttgaatggaattcaagatgttgtggagggttcagtgggttggttataccaaagaatgctatagaatttccatgcccgaagaactgtgagaggagtatagattttttcaccaaggaagttactggcatggtttgagagatagaaggaattgattaagaaacctctcaaagtttcttccacttaaactggctctgagactctgggtctttggaaatgagaaaatacccagggaagagaaaacgaacantttaagaagcaggaaatgactctagatcagtatttctcaattacagccgtttaagacattttcttcctaatcatctctcccttgcacccccggccgtaatggccgaattcccgggcatatgtccggtaccgtcgactgnnnnnnnnnnnnnnnnnnnnnnnnnnnnnnnnnnncggnnnnnnnnnnnnnnnnnnnnnnnnnnnnnnnnnnnnnnnnctatcagagcgagctagcgccctatagtgagtctatacattctt

SEQ ID NO: 91731 - DNA, 942 bp, Homo Sapiens
  misc_feature (497)..(552): n is a, c, g, or t
  misc_feature (657)..(702): n is a, c, g, or t
ttttttgttgcaagctttatttagttatgactgataacactctatcaatcactattgttgataataatgtaacattatggtctgatcacaatttttagaacctagaagaaacattgattacattccagaaaagaaagttttgataacagtggtctcatggttgtcaaagttgagttcatctaattttagcttgtaggacttgattgcaggtggaattgaatgaaacaagaatgcccaggtaagtttaatggcaaaagagtcaaagatcggaccaattactggctcaaggtaattaatgtacatttattatatgattacaggtctcccaagtactagaatgcagagtttcctggctatgggataagcacaacttggaccaaaatgccctgtattaatgaaatcaaacttacttatcccagaaaacactgtctgctattgtggaggatgcctggtacacactcagaggtatgaaggggttcccataaatatagtatatnnnnnnnnnnnnnnnnnnnnnnnnnnnnnnnnnnnnnnnnnnnnnnnnnnnnnnnncatttcgtgctttgccttcatcttgaggctcggcttcaagaagtattttaccaaaatgacctccctgattagcataaaaaactgttgcggcaggaaggcttaggnnnnnnnnnnnnnnnnnnnnnnnnnnnnnnnnnnnnnnnnnnnnnncttatgctatttgattaagagttcatcagcaacttaaaagtagaaggcaaacagttgaaatgaaatcatgaaatcctaggtctgtggcttcttgtttcaactgctattgtgcatatttcttagttttcttatgccttaatttgcccatctgtaatatgggtagagtctttttggtagccatagtcagtagctctggtcctcctaaaattgttatgaagaataataattaaaatgattggt

SEQ ID NO: 91732 - DNA, 1069 bp, Homo Sapiens
tttgaagttggaagaagtggcaaaatgtgaaaagcaagaagcaagtattaccagagacacctatgaaaaagaaatctttctgaagaacatttttaaagtgccataatctgttcggtgaatccaaaggctgaaagagactgagtaacagctattaagtaaggtgaaaatgttattttacatggaaacctattttgttccataaaactaaataaaccataacccagaagtgcaatgagacacacacagcatgaccacattatttctgaaagctgaagagttgccagtctgttgatctcaaacttcatgaaccacacagttcagttcaaattgtttccctgaaattgctttgagcctctgccaaacagccactgaaggactccgaaaaatacaagaactgaaaggggcacatggcagatacaatcataaactttcatttcggagagcagtaaaaaaggagaagaagaacacactggtactccaacaagtcatagtttctgccagatgttgcaaaagtgagttagataactgacctttcttctggggcctgtgtcaactttgaatggagctttcaattgtacaataagcatctggacagttttgacatctttataacactctttgagttcttaaaaagctaccattttgtttaaagatgatttatgtgaagattaaaacaattacttaagtgctaagaataattaatcctgtaactccatatcaataccattatcttcccagaactgggtctctaactactaatcataatcaagacaccaactgtcaaatcaaatcaaaattaaaatttgattaattatttgatgatattaacattcaaatctagttccttcttaggcctaattttgtccttatgtttgctttgcactgaattattgtggtttaaatagcccattttacatgacaactttcaaacaagagcataaattctcataaaaacaggctaaggaattcataatgatagctcttggccgccacctaaaggtttatttcttgttttattttacatgagacctactatgcattccttttataataaaattgttgtcttgtc

SEQ ID NO: 91733 - DNA, 480 bp, Homo Sapiens
ctgggaggtcctccaacctcccctgacatttctcttgaacttctcaaagttacctgcttggaccccaggggtatgagttccaagggcccgatcagctatgagattataggctgaactcaggcatcagaattgttagagctttatctcagttctgagaaatggttaaaaccacccttgggcagtcacacgtggaatcacttacttcattactatggacattttcttgtaggaataatacatagtgaaaatccactgggataaccaacataaaactgattttgttttcagtttgatatagcaattacattttatttgtttgttgtaagtattggtaaactttcttatttttaaaaacagacatctgtaaaattatatacttttttcctataatattctttaaagctgcttgaaaaatgtttattatgacaatgtataaaactggcatacatggccaataataaattttttctctaggttaaa

SEQ ID NO: 91734 - DNA, 255 bp, Homo Sapiens
ctatggagaatgatgggaggtgatctacacagactcctccctcactgggttgatagctctgttgggaagatgttaacatccatcaggggaaaaaaccacgagagacagctcaagctagggaggcagagggttagcagcaaatgctaccccttctgagaactcagacattccagactcagagaccccatgagaagtttctgactcaggactgtgtaggcagtgctgcatgcatatgcctgccagggctcaatcagt

SEQ ID NO: 91735 - DNA, 434 bp, Homo Sapiens
tatatactcatcctttcctctctctctcctttttttggtgccatttggccacatgaacatatatactccccttgcttactttttcactacattttacctaaggtttcatgaagactgattggaatctgatcagatgtattttgttttcagattcttgccagctctcattactgcagttctgaccaatcatcttgcctgggttccaacagtcatgccaaatggacaaccacctataaaaatatttttagaaaagcattcctctcagagtgtggacatgttggcaaagactcatccatataacccactttgggcacaactgggtatgtaatctgacaactgttacactatgtattagacttttttgtagctatctgtaattattttatagcaaaaccaaaaataaataaaatgcttttacctcctgcattctaaaa

SEQ ID NO: 91736 - DNA, 355 bp, Homo Sapiens
ttttaaatagttattttttacatttctattttgcttttatcacacttgctaattgattaatctgtttctcattttctgaactcagcagagcaatctgattagcctagtgtaattttttgagctgtgaatggaccaacttggatcaagaggccatggagtttaatcatccatttacatactgggaatgttcgtgagttccaagattatgtgggtctggcaggcaattatggcttatttctcagatcatcaaccagtatccatgctcagagtgttgattcaaatagcagctgataagcataggagcatttataaaattggaaaaattttaaataaagatagttctgataaaccaaaa

SEQ ID NO: 91737 - DNA, 324 bp, Homo Sapiens
gtagtcgtgcaagattttttgtgaaaagaaaaactgtatcaagttcatcacctttatcaatttgacctgtgccgtgaacttctttagattcatttgattcaaatggatctaagtattttaaacatttagaatactaatttaagcaaggcttgaaaattaaatggagtaaaagcaataaaaaatcaatattagcctgggcattggtggctcatgccagtaatgccagtactttgggatgccaaagcaggaagatctcttgagcttaggagattgagatcaggttgggcaaaaacatgaaaagactaaatcacatctctagcagga

SEQ ID NO: 91738 - DNA, 736 bp, Homo Sapiens
tcacctcgtgtggatgactttgtgtacatctgtgatgataataatcagcgatctagggtactcagcatggaaatcaacatcctgaacgtcttcaaatgtgacattaacattcccatcgcctaccattttctgcgcagatatgctaggtgtatccacaccaacatgaagacactgaccttgtcccgctacatctgcgagatgaccctgcaggaataccactatgtccaggagaaggcttccaagctagctgctgcctccttactcctggccctctacatgaagaagctcggatactgggttcccttcctggagcattacagtggctacagtatctctgagcttcaccccttggtcagacagctgaacaaactgctgactttcagttcttacgatagtctcaaggctgtgtattacaagtattctcacccggtcttctttgaagtcgccaaaatccctgccttggatatgttgaagctggaggagattttgaactgtgattgtgaggctcagggcctggtactctagcagcagccacagggctaagcatgcatgttaacagggtatatttattctatgttcgaatttgtcttttgatcgcttttattcatttttcctttctttgtcttttcccaaactgataatgttataaatatttatgttgcttgtttttatgaaagaaaaaatattgtcatatttgactacaaatttaataaaaaattaatggtttataaaaaaa

SEQ ID NO: 91739 - DNA, 510 bp, Homo Sapiens
cgctcctgctaccagaagaagattcttgaatgttgaattcatagtcaaggaaagttaggtaattctgaggaaaaaagtttaccatcattttggatgaactgcatgagttctgggttaagtactacaatgtaatctgtttcccagggaaataagctattggtagttgtaggaaatcttagtatattttaaaagctgacatcccacctaattttaatctttggtctctaaaaagtaaatttcaaatttatgagtttaatcacttcaaatatgaatagcaaaaaatgagagcttgcttacttctaaaaattgaggttaagatatagctagtgtctgaacgacactccttaaagtaagttccaaatgtaaaacactccttaagttccaaatgttttccgctaatagtctgtcctaaagcctttgccattcctaatactcgttttgtaataattgctgtatttctgtgtaataaaatataaacaataaaatattcagtggtattcaacatcaaaa

SEQ ID NO: 91740 - DNA, 442 bp, Homo Sapiens
gcaacctgtgaagagaaatatttaagctaatgtgttccatcgtgctggtgagcactttcaaaggagtgcatgaaagatatcacagcctcacaaatgcagagaaaagcctcccttggccactgctgatcaggaagtgagactttgtcctccccacagtgctatacctagccggctggattatcgtcctcatggccaaaaggagactagacatggaaggcaaattgcagttagatgaatttaaccagctttctctacaccgcatgaagccagcgactgtgagggctctgctacgcggctgagcgggctgtgcaggcattgccaaggtctcctcccttgttgacgttccctgctcgtcttcacgtgatcccatctcagggctctgccgtccacgccctcaccaagctggatcctggaagtcatgcaattccttctttcttacttc

SEQ ID NO: 91741 - DNA, 524 bp, Homo Sapiens
taggttgaacctaactaaatttgtcatcttggcaaatttatgcctaaccttatttcccatgttagcattattgcttctgtttagagatgcccctcattcataggactgttatgaacattaaatcaacaaaagtatgtgcagtgtttgcatggtgagctccgaatatcatatgctcaatgaaaggcaagcattactacccttaaagttatttttatgattgttattgacctaattcaattgaattcaataatttttactgaatcccttccatggatggtgctggaatagattacaagggtaacagggcagaattatctacccattacactgcaaacaattccaggggttctctaatatgaatgtcatgagtacttagcacagtccctgacacaataaacattcagcacactttggttgaattgaattaaacttaaggcacccatagtctaacatgggatatagtaacagttaacaatgaaaaatgtgagaaatatcttaagagcttcgcaaagtgccatgagaat

SEQ ID NO: 91742 - DNA, 760 bp, Homo Sapiens
tttgtatttctgattcggtgctttaatgatgagggtcacaggaatctccatcccactttggtccatggtgcccccaaagtcagacagagtccagaggagcggcagttaagcccaaaagagccgagatggtcaccgccggcgcgactgggatgaggacagaagtgagttcttagtattccgtgtccaagtcagttacaagtgcactggaggatacgaagcccattgccggtaccaaggatggactgaggtggtggcgactgcgacggtggggtctgggtgcccggccgtggaggcagctctccccgccaggtccgggctccgccgggctccggactgtggaggccgtcgtgaggagaaaggaagctgagagaaggccgcggggcccgccaccgccgccctccgcgcccaggcagggccgccagccacaccgtccggccaggcgttttccgtggcagccgctcccttcctgctgcgcggcgacgggcacggcccagccccgggtctcgcgaggaggcgcgggtgaaagggagagaagctgaccgaagggcgcggcccggctctccgcctgacccctcagtctggacagcgcagggtggcgcaaggcagggctgggccgggggcggcccaggcgactacaggtagcaggagggcggggacgagagccgttgcgccaccgctggcgcgacgcgtggtcgacatatcccgggattccggaccggtaccagcctgcttttttgacaagctgttcataggtcactaa

SEQ ID NO: 91743 - DNA, 467 bp, Homo Sapiens
tgcctctttgtttattaagaattgtttacagaactctcaagcagcaaaggcaaagtacagaagataaataagagcaagctggccggtgcgtgcgactggatggacaacatctttacccacatgtctgcatcagctctgcgttgttcaccgacaaatcccgtgtctggaagagtcctggcaggctgcacgggctggagagagagcgagctgacaccaacaccaggcagagtccaccatgaaggcaagtggcagtgtcccaaggagagcccgctggccaggagggcaccgcaagcttggacacagcaggggcactggagatgggtccacgaaccgctgtgcgcagcccaggaggctggcacaactggtgtctgcatgaagactaggaacagctggcttcttatctcacaccatacacaaacatcaatttaggatacattaaaggtataaatgcaaagggcaaaagtaaa

SEQ ID NO: 91744 - DNA, 647 bp, Homo Sapiens
aagctgcagcaggagaacggggaggcccggcgaaggatcgacctcagagagctccccgcagcaccccacgccccccgccaggccccgccacatgctggggctcccgtcaaccctgttcacaccccgcagcatggagagcattgagattgaccagaagctgcaggagatcatgaagcagacgggctacctgaccatcgggggccagcgctaccaggcagaaatcaacgacctggagaacttgggcgagatgggcagcggcacctgcggccaggtgtggaagatgcgcttccggaagaccggccacgtcattgccgttaagcaaatgcggcgctccgggaacaaggaggagaacaagcgcatcctcatggacctggatgtggtgctgaagagccacgactgcccctacatcgtgcagtgctttgggacgttcatcaccaacacggacgtcttcatcgccatggagctcatgggcacctgcgctgagaagctcaagaagcggatgcagggccccatccccgagcgcattctgggcaagatgacagtggcgattgtgaaggcgctgtactacctgaaggagaagcacggtgtcatccaccgcgacgtcaagccctccaacatcctgctggacgagcggggccagatcaagc

SEQ ID NO: 91745 - DNA, 450 bp, Homo Sapiens
tgaaaacagttaggaaattctattctccgaagggttcgttcctttcttgatgtgtcacttatcattatttttaattccttctagttgtttgttgggactatggccctcctgagtggagtgttaacactaaagcttccagaaacccttgggaaacggctagcaactacttgggaggaggctgcaaaactggagtcagagaatgaaagcaagtcaagcaaattacttctcacaactaataatagtgggctggaaaaaacggaagcgattacccccagggattctggtcttggtgaataaatgtgccatgcctgctgtctagcacctgaaatattatttaccctaatgcctttgtattagaggaatcttattctcatctcccatatgttgtttgtatgtctttttaataaattttgtaagaaaattttaaagccaatatgttataaaagaaat

SEQ ID NO: 91746 - DNA, 449 bp, Homo Sapiens
atcggccgagacccagaagggtgagagggggaagccgcaccctcttcgtgggtgcgatgctgtgaacgtcttccttcaaggaaagagctgcttctggattttccttgaactccaggaggtgctaagaaagcttcgtgactgtggcagatgcggctcagcggcccctcccaacccgcccgcgccagttgggaaagtgactcccccgctccccgccagttgggaaagtgactccttcctgtgggcagaaggcagcggacctggagggagccctcgggctctgagagtcacgcggggggcggcctgctctcccgcgccccctagcggagcatcggctcacacgcacctgagaggtcggaagaggcgggcgcttatctgcctcccccacccaggccccttgcagtttgtatgccctcaccctggataaaagattttggttcaactagaaaaaa

SEQ ID NO: 91747 - DNA, 402 bp, Homo Sapiens
  misc_feature (83)..(134): n is a, c, g, or t
tttttatgcctttctttctatacatatattttaaaggacaagttgggagaggaggtgacttcacagcaaaaaatgtctttggnnnnnnnnnnnnnnnnnnnnnnnnnnnnnnnnnnnnnnnnnnnnnnnnnnnnttcgatctggccaattgtattttgcaaagattgtatcataggtgtccaccgccccatcagttatgaacatgatggcctgactgcagatacttccttgtcccgtgtggttgaaatcactcagaatgttgaaggcctcattcagagctatatccaacattccaattcctttggcgaaaagtttgtccaaatgctccctgaagtgcttcaatattcatggtttagcttcagttacagtttaggaagaaaatcagttgaactctggtgaaaa

SEQ ID NO: 91748 - DNA, 533 bp, Homo Sapiens
  misc_feature (455)..(467): n is a, c, g, or t
tctgcaggacgctgctgccgtcctgggatacatccatccaactcacctctgcctatctctcagagcgaccgtgagaagtcagaaggccttcccgtggccccgttcatggaccgaaacagtgaccaagctcttccccagggtagaggagatcatgcagcagccactatgggaatccccaaatagctacgaggagatgaagcggatagatgacgccatgaaagagttacagaagaagactgacagcttgacgtctggggccaccgagaagtccagagagagaagcagagatgtgaaaaacagtgaaggagactgtgcctgaggaaagcggggggcgtggctgcagttctggacgggctggccgtagctgcgcgggatccttgtgcagggaagagctgccctgggcacctggcaccacaagaccatgttttctaagaaccattttgttcactgatacnnnnnnnnnnnnnggaattcatgatgctgtacagaattttatttttaaactgtcttttaaataatatattcttatacgg

SEQ ID NO: 91749 - DNA, 435 bp, Homo Sapiens
caagcgcccagagctgcagacgccagtatttggaatgtggccagttcctgctgaatccaagacatgagggccaggagcacgggcttggcagcagctgcttcaagttggatcattgacactgcagagccacgtttcacaaccaaggaactaaactcagggcagacttggattccaaaacaagacgtgcaaaaagggcaatttcaggaggaagatgagcccaaaagggagatctttcaggcctcatggcatttgtgcctctcttcacaaaaataatttttttcctgctctatgtaaaccttgtactaagtgctgcagatacagtgctgaccaagacagaatctgccctgccctcctggagttccagtggggatgcctgccttaaaccatcacgaaagcaaataagcaattccaaataataatgaatgataagtaaaa

SEQ ID NO: 91750 - DNA, 491 bp, Homo Sapiens
aggttggaagacattcagcaaaacaatttccctgcactacactctaaaaaaagtcaagctagggaattggtccagacagataacacaactgggttggtccattaagtgacccctgatgcagcactgcattgaaggcaaaaaagctgtgagagagatttgagggacaactggggaactttgtagttatatatggactatatattagacagtattattgtatcatcattagatttttcagtgtgacagtggctatttacaagaatgccctagttcttaggatgttagtgctgaatcattagacaagagacctgatggctacaactgacatataaatgcctcagagactgatgtattttatatggaggtaaagcaaatgtaacaaactgttaatagttggtggatctaagtgatgagtctaggtgtgttattgtgcagttttttcaacttttctggaaaacgaacttttcaaaataaaaaattggaaaaataaa

SEQ ID NO: 91751 - DNA, 506 bp, Homo Sapiens
agccccagcctttacaagccctctgggctcgacgggaggcaaagtgttcggagagggcactgcagctgccagcgcaggaggattcgggtttgggagcagcagcaacaccacatccttcggcacgctcgcgagtcagaatgcccccactttcggatcactgtcccaacagacttctggttttgggacccagagtagcggattctctggttttggatcaggcacaggagggttcagctttgggtcaaataactcgtctgtccagggttttggtggctggcgaagctgagggcgtgtcagcaggcctttcgatccctgggaccaaccgcatcctcagcttcttccccgagaaatgctggagcaggctgttcagaccgacgttgccatcaaaacacatacacccagaaagaaacaacagaaaccaaaactcacaaggcgcatgattacttgttttatatttcatgttgggttttccctcccactattaaacagtctgtttccgtacaaaa

SEQ ID NO: 91752 - DNA, 371 bp, Homo Sapiens
tcatcaactaacacctgaaatgcctcagcaccatctgtctccaacattaaacaaaacccacgagattccaggagaaagaaaataggaaatttaatgatgaacttaacctgagtaacttgataaatgttacctttgtggctagccattcaccagcaagtccctaaaatgacctgaaacctgaagagtgtttcacccatgaaagggtttgctctctctgggcatggctacccagcacatatgttagtcaactttctttcccttgcagggccccttggaaaactagtttgaatcattcattaactcagctccactccttccctttcccatggaccatagtttctatgagcaattaaaacttataagacaccaaa

SEQ ID NO: 91753 - DNA, 446 bp, Homo Sapiens
gcggccgcctacgatgatgcgttgctcatccactcactgcgtggctaccaccgcagctttggtctggacgacgactcgctggccaagctggccgagcaggtgggcaaacaggcaggtgacctgcgctcggtcatccgctccccactggccaacgaggtctcgcctgagactgtcctgcggctctattcccagtcgtccgacggcgccatgcgggtggcccgcgcctttgagaggggcatccctgtgtttgggacgctggtggctggcggcatcagctttggcgctgtctacaccatgctccagggctgcctcaacgagatggctgaggacgcccagcgtgtccgcatcaaggccctggaggatgacgagccgcagccggaggtcagcttggaagtggccagtgacaatggcgtggaaaaggggggctccggggagggaggtgggga

SEQ ID NO: 91754 - DNA, 518 bp, Homo Sapiens
accttatgaggtaagcagctaattgatcatatggtaaagaagaaccaaataaaattagtgtctcaaaatatcaggagcactgcttctgtgaaatcagttaaagtacatgtccatattagtcatccattgatacacatgcttattttcctaagtgaattctccacaattctgaaaaccagtgaaaagattatctcatgttagttctacacaaaaccaagcatcgcatgtgactctccatgtttcaaggcatacacatccctttccaccgaggatcaaagtgccctacaccaaggatcaaagtgccctatgggaagcaacttcttgccttttaaaccagattcagtaaacaaaaactgttttgcatagctgacaaaagatcacactgattgcacaaaacaaggtcagcctgtggaaggaagcttacaaggtcaaatggggcacgttaaggaggcgtaacccatcacattgacttttctgctgttagaatttttttctggtaaaaaatacaggtatcagga

SEQ ID NO: 91755 - DNA, 528 bp, Homo Sapiens
attcattcaccagccatgtgaggacctatacgaaacaccagagatctggtgatgaataagagaagaaatggtttctgcctttgcattacctatagcatccaaagtctaatctgaatcacttaagaatttcagaataccctaaaagtacaaaatttcaatttagaatacaatgaaactcaaaatatactccatgaccttactacaaataaaaaagcacctgtttaatattttctcaaaagtgacataaacatctcccaataaatcatggttttgtgagtttcagttttatgggcttgccagtggttcctcctctgagttagtagttcagcttataacagtacatttgatgttctcttgctttagtctaagtcactgtgaattgaagtcattcaaatgttgaatgggagagatgattcaccttccagtagttttcaaaggttatctgttgctgtttctttcagtaaatgaccaaattatgatcaattacctaacataatagtttcattaaaaataaaaaccataaagcgt

SEQ ID NO: 91756 - DNA, 1006 bp, Homo Sapiens
gggtccggaattcccgggatcgtccttgcaggctctgccgtcggaaagccgctcattctcgcttccccttccctttcccggctcaagtccttcctctctctttcctttctttccgcctatcttttttctgctgccgctccgggtccgggccattttccgggccgggcgcactaaggtgcgcggccccggggcccagtatatgacccgccgtcctgctatccttcgcttcccccgccccatgtggctgcggggccgcggcggcgctgcccactatggcccggaaagtagttagcaggaagcggaaagcgcccgcctcgccgggagctgggagcgacgctcagggcccgcagtttggctgggatcactcgcttcacaaaaggaaaagacttcctcctgtgaagagatccttagtatactacttgaagaaccgggaagtcaggctacagaatgaaaccagctactctcgagtgttgcatggttatgcagcacagcaacttcccagtctcctgaaggagagagagtttcaccttgggacccttaataaagtgtttgcatctcagtggttgaatcataggcaagtggtgtgtggcacaaaatgcaacacgctatttgtcgtagatgtccagacaagccagatcaccaagatccccattctgaaagaccaggagcctggaggtgtgacccagcagggctgtggtatccatgccatcgagctgaatccttctagaacactgctagccactggaggagacaaccccaacagtcttgccatctatcgactacctacgctggatcctgtgtgtgtaggagatgatggacacaaggactggatcttttccatcgcatggatcagcgacactatggcagtgtctggctcacgtgatggttctatggggactctgggaaggtgacaagatgatgtttttgaccaaaagtgatgcgagacacaatgggtccgggtcctgtgtttgccctacatccatgccttaaaggaatcccaaaaacc

SEQ ID NO: 91757 - DNA, 512 bp, Homo Sapiens
atatgtaagaggcagctttatgctaaacttgacaaaagaaagcctcagagtgggaaagtcaacctaagagagaaaccgtttattttgtgggtaatgctgagtgcccatttgagtggagacctaaaaaccagactctgagcagtagcatgaaccaaatgttgtcctagacctgaagtttggccatatcccattgtaagcattgacatcaccacctacctctcagagacagttaacaggcctgaggtatgatgagaaaagagagcaaccagacacaacaactaaccagcattccttcctgataatagaccactgaccttggagtggctctggccagtctacaaaggatgcacactgagtaccttagtgtcctctgcttcaccttttgacatcagagggcagaaaactccacccatgcctccaggcttccatgaagaggcatgaagctcagtttccgctttcataaatatttatgactcctcctgtagctattaaataatgtatatttaaaaaaa

SEQ ID NO: 91758 - DNA, 1078 bp, Homo Sapiens
  misc_feature (483)..(517): n is a, c, g, or t
  misc_feature (521)..(522): n is a, c, g, or t
  misc_feature (524)..(524): n is a, c, g, or t
  misc_feature (526)..(527): n is a, c, g, or t
  misc_feature (533)..(535): n is a, c, g, or t
  misc_feature (538)..(538): n is a, c, g, or t
  misc_feature (558)..(558): n is a, c, g, or t
  misc_feature (564)..(564): n is a, c, g, or t
  misc_feature (925)..(925): n is a, c, g, or t
gagcgaggcctgggtggcgaattcggcacagggcggacggcgagatcgccatccccgtgggcgatggcgagggcatcatcgtggtgggcgcgccgggcgagggggccgcggccgcggcagccatggcgggcgcgggggcaaaggccgcggggccccggtcgcggcgcgccccggcccccaagccgtacgtgtgtctggagtgcgggaagggcttcgggcacggggccgggctcctggcgcaccagcgggcccagcacggggacgggctcggggcggcggggggcgaggagccggcccacatctgcgtggagtgcggggagggcttcgtgcagggcgccgcgctccggagacacaagaagatccacgcggtgggcgcgccctcggtctgcagcagctgcggacagagctactaccgcgcgggcggggaggaggaggacgacgacgacgaggccgcgggcgggcggtgccccgagtgccgcgctnnnnnnnnnnnnnnnnnnnnnnnnnnnnnnnnnnncggnnangnnccctcnnnctnggcgggagcgacgacccgcngcaccnagagacccaggggagaaccggacgggggtgcgaaggaactctgggggatccccccgttcccctgcccttcatcttgtacttgcgacatacttgtggctggggatacctggcgtgttatttaccttccctctcaattgaaaggggcggattaacatactgccccccttagcgattggaggggggcgttgctttattctagtggagcctgtggtatgccgctcaattactatggaaggataaattgcttcaccggcgaactatcacccttccccagcattaccccacggtagcgggaaaactctgcaatcaacgtctccattgggaatatcccgctttcagaaaaccatatgctcgtcattgnttctgaaggggtgctcttccttgcacaaaacgcctcatatgagctatgtggacaataatatccatataacaattttttcttctgcctacgcggtcctaatatactcctgtgatgtccctcaacccaccgcgtcgtgtaacgtcatattgatgg

SEQ ID NO: 91759 - DNA, 895 bp, Homo Sapiens
gaaattatgtcagctttggcgtcttcaagttgtatggggacaaccattttgacaatgtactccaggcttttgtcaaaatgctgctgtcagtgtcccacagtgacttgctacaataccggaaactgagccagtcttattatccactcctggaatgtctcactcaggaccatatgagcttcatcatcaacttagagcctcctgtactcatgtatgttctcacatctatcgcagagggactcactactcttgatacagtggtctcctccagatgctgtaacagtttagactacatcgtcacctacctcttcaagcacatagcaaaagagggcaagaagccacttcgatgcagagaggctacccaggctggtcagagactattacattttatgcagcaaaacccagatgtcctgcagcagagctgtcaggagctataaaaatcatacttcagtagggacttaagctgaaagaacattcacccttttcctcaatcagtcagtcagtcaatgaaaattgcttttgtatagtgctcttcatgacatgcatcccaaagtgaattacagcaaaagggaaatcatctgctcttttttcatttctgtgtttagactgaaatgatattgctcaacattttgacatactaaccaagacatctttcatacttaagattccattccataatactgagtaggagaaaatgcagtcgcatatttaactgatgttgagattttggcctacaggaaccttagcaagactattacagtcaaaaacacttaagcagatgaaatacagtcatatctcttgtcctcttaaaaagaatagtcagattttctaatgttaataaagacatttccagtgatcctcaaataaaaaatatgctctttatgtaacccattaaaaa

SEQ ID NO: 91760 - DNA, 1030 bp, Homo Sapiens
gaaaggactgccagaaaaaggacgggccctgtgtgatcaacggctccccctgccagcacggaggcacctgcgtggatgatgagggccgggcctcccatgcctcctgcctgtgcccccctggcttctcaggcaatttctgcgagatcgtggccaacagctgcacccccaacccatgcgagaacgacggcgtctgcactgacattgggggcgacttccgctgccggtgcccagccggcttcatcgacaagacctgcagccgcccggtgaccaactgcgccagcagcccgtgccagaacgggggcacctgcctgcagcacacccaggtgagctacgagtgtctgtgcaagcccgagttcacaggtctcacctgtgtcaagaagcgcgcgctgagcccccagcaggtcacccgtctgcccagcggctatgggctggcctaccgcctgacccctggggtgcacgagctgccggtgcagcagccggagcaccgcatcctgaaggtgtccatgaaagagctcaacaagaaaacccctctcctcaccgagggccaggccatctgcttcaccatcctgggcgtgctcaccagcctggtggtgctgggcactgtgggtatcgtcttcctcaacaagtgcgagacctgggtgtccaacctgcgctacaaccacatgctgcggaagaagaagaacctgctgcttcagtacaacagcggggaggacctggccgtcaacatcatcttccccgagaagatcgacatgaccaccttcagcaaggaggccggcgacgaggagatctaagcagcgttcccacagccccctctagattcttggagttccgcagagcttactatacgcggtctgtcctaatctttgtggtgttcgctatctcttgtgtcaaatctggtgaacgctacgcttacatatattgtctttgtgctgctgtgtgacaaacgcaatgcaaaaacaatcctctttctctctcttaatgcatgatacagaataataataagaatttcatctttaaatgagaaaaaaaa

SEQ ID NO: 91761 - DNA, 635 bp, Homo Sapiens
aacaagcttgaggactacaactggagttttcagaaggtggagcagaatgggttctgtggcaaccaaggacattcttcaggaatatgcaccagggtctaaagcatatgggagcacagctgatcggcttcagtgagagtgtggttaatggtgtcaaagtaggctttctggcttctcctaggccactcattcagtgataggggctgtgtctcaaagcccagggaactcacttcattgatttggaacaaatttagcagtgcagaagacatctctaacctggtgtcacaaagaatcatgcagttttagagctagaagggaccttagagattatgccaaagctgaatctgagagaagtgtcctcccaggaaaacgccaagattctccaagacactttcatatcctaagccctgttctgtttgttcttgtgtagtaaattggcaaatttggcagtacagaagacatctctaacctgatgtcacaaagaatcatgtctggcccatacaaagtattctaactaaccatgtaagccactagaatgttaaactaatgctctggcactgaggtgggtatcttgagcatttgtgactttacagtttattatccgtattggttaaaatatatatgaacaaaagctaaaa

SEQ ID NO: 91762 - DNA, 939 bp, Homo Sapiens
ggggcagaggagcggagttgaggcagaagccagtcaggatggtggtgccttcgctgaagcttcaggacctcatcgaagagattcgcggggccaagactcaggcccaggagcgggaggtgatccaaaaagagtgtgcccacatccgggcctccttccgcaacagggacccaatgcacaagcaccggcagctggccaaactgctctacgtccacatgatgagctaacccgcccactttggacagtgacctgagccaggggattcagccagtacaaggcctggccttgtgcactttgagcaccatgggctctgctgagatgtgccgagacctggccccagaggtggagaaactgctcctgcagcccagtccctacgtgcgcaagaaggctattctgactgcagtgcacatgatccggaaggtccctgaactctccagtgtcttcctcccaccctgtgcccaactgcttcatgagcgtcaccatggcatcctgctgggcaccatcacgctgatcacggagctctgcgaacgaagccctgcagccctcaggcacttccgaaaggtggtaccccaactggtacacatcctccggactctggtgacaatgggatactccacagaacacagcatatctggagtcagcgaacccttcctgcaggtccagatacttcgtctgtcttcggatcctgggccggaaccaccaggagagcagtgagaccatgaatgacttgctggcccaggtggccacgaatcacggacaccagccgataatgccgtgaaatgcggtcctgctctgagacagtactcaccatcatggatgtccgctctgcagctcgcctacgggttcttgctttcgacattcttggtcgcttcctactccaccgtgactcgaacatttggtatctagcccttacatcactgcttccacaggcgccctccgtga

SEQ ID NO: 91763 - DNA, 985 bp, Homo Sapiens
gctccccagaatatgctggtgtttctgtggagtatcccccatgttcacccagagtccggagggatgtgtacccagctgggggtcccactttcgggaagtgcctgagggctgcagggctcgtttcgcagagctccgtgatcagcgtgatggtgcccagcaggatgcctggggtcagcgtcggggaagtgaatggtgggggccaggggcaagagagtctattgcgtgtgtgcctgtgtgtgtgcactacccttctcctgtgagctggggttcccatccgattttcaattcttctgtccatagacctgaagcaaaggatggggggccccacagccttaccatggtgacgctcatgaagcagttgggcacagggtgggaggaagacactggagagttcagggaccttccggatcatgtgcactgcagtcagaatagccttcttgcgcacgtagggactgggctgcaggagcagtttctccacctctggggccaggtctcggcacatctcagcagagcccatggtgctcaaagtgcacaaggccaggccttgtactggctgaatcccctggctcaggtcattcttgatgctgttggtaatgagcaggtgggcatcgtgcctctcatccaatagaagcatggcccccaggtagcccaccctcttgtctgtgaatctggaggaggcgatcagtttcaggcactccatctgtccaaagtgggcggggtagcccaacatgtggacgtagagcagtttggccagctgccggtgcctgtgcactgggtccccgtcgcggaaggaggcccggatgtgggcacactccttttggatcacctcccgctcctgggcctgagtcttggccccgcgaatctcttcgatgaggtcctgaagcttcagcgaaggcaccaccatcctgactttcccgaagtgggtctccaaattccgcgcccaccccaccgcccgagatccctaaaatcccagaccagtacagcc

SEQ ID NO: 91764 - DNA, 339 bp, Homo Sapiens
gatctgtcatggctaggatggtttattcctagacgggtaggtccccagttattaggaaagttcatttttagcaggttgtgaagtctcatgtcctatgaagagaaaatgggggaggaagggataaaaacaacaacaaacaaaagaacaatcctggaaaatcgatataggccacattactctgaagtttatatatcagtaggcagggatgaaagtgccttatgtatgtaagcaggttgctgttattttcttctaaagtttaagttgtctggcttcagtttgcagggtttacaaaagacacagcttagttttcagtgactccaaattagaaaaaatggggga

SEQ ID NO: 91765 - DNA, 390 bp, Homo Sapiens
tttttatttcttaaatcataagttttcaatatttacatagaaaaacagttctgaaatttcaaacaaaatgtgagggcagtaaaacaatgacctcccaagcttatccatggaggaaagacacacgaacggggtttgatctcctctgctgctttgacgaacaggaaatgaaaatagcaaaccgcgaaggaacagacacggctacctcaaaccgcaagcgcatgttcacgtccctgcagttcctgagcccaacctgcctcagcactgaaggaagaatcctgggaaggcagaaaacaacgtccacgtttaataaggcttcacagatgagcacaacgagctgttcttgaagatggacgcgaccaccacacgaagaaacatgcagagtgatcagcg

SEQ ID NO: 91766 - DNA, 1039 bp, Homo Sapiens
tcccgggatgagccgcggacggtttgctgagcccgttagtgcgcccggccgagacacgccgccgccatgtcccgctacctgcgtccccccaacacgtctctgttcgtcaggaacgtggccgacgacaccaggtctgaagacttgcggcgtgaatttggtcgttatggtcctatagttgatgtgtatgttccacttgatttctacactcgccgtccaagaggatttgcttatgttcaatttgaggatgttcgtgatgctgaagacgctttacataatttggacagaaagtggatttgtggacggcagattgaaatacagtttgcccagggggatcgaaagacaccaaatcagatgaaagccaaggaagggaggaatgtgtacagttcttcacgctatgatgattatgacagatacagacgttctagaagccgaagttatgaaaggaggagatcaagaagtcggtcttttgattacaactatagaagatcgtatagtcctagaaacagtagaccgactggaagaccacggcgtagcagaagccattccgacaatgatagaccaaactgcagctggaatacccagtacagttctgcttactacacttcaagaaagatctgaaagcggaaaaagaaccaaagaagggcagttcaagcgaccaaagggtgggtggaaggtgctgcagtatgaatactgtacgaatattttgactctggtctgaaaagataaaagaatgttatcgaaaactacatggaataattgaagtcccttccagtttgaaagtaagcattttaggacaaataaagggaattccactttgtacttgtggaaactaatcccctaatatgaataggtttatattgatttctggggaacaggtccataataaattatgggaaactaggatgtctgaatatcaaggaagacagccctagtctcttacgtgccctctgttggtctgtctcaactgaaatggggggggaaaaggaatggcccataaaaaaggtccatttttgccattattgggcaatctttgcctttg

SEQ ID NO: 91767 - DNA, 206 bp, Homo Sapiens
gcggccgcctactactactatacggctgcgagaagacgacagaagggtgggtggaaggtgctgcagtatgaatactgtacgaatattttgactctggtctgaaaagataaaagaatgttatcgaaaactacatggaataattgaagtcccttcaagtttgaaagtaagcattttaggacaaataaaaggaaattcaactttgtaag

SEQ ID NO: 91768 - DNA, 478 bp, Homo Sapiens
cgcaccctggtctatggaggaatcttcctgtaccagccaaccagaagagccctaagggcaagctccggctcctgtatgaatgcaatcccgtggcctacatcattgagcaggcaggaggcttggcgaccacggggacccagcctgtactggacgtgaagcccgaggcaattcaccagcgagtccccctcattctggggtcaccagaggatgtgcaggaatatctcacctgtgtgcagaaaaatcaggcaggcagctagcgagtttgaccccacatgccctcttctgtttgtcttgcaccttgtctaaggaccctaaatgaacgataaacagagatggtagctatgagtatgcaaaaggtaaatccacttaatcacatacagaagagcaacaacaaactgcttacgacaggtttggaagccacaggcgattctatggtcaatgtgaaggactagaaataaaaacccacatgtggaaaaaa

SEQ ID NO: 91769 - DNA, 320 bp, Homo Sapiens
tcttcatctataacagtgacaaagaccctgtggagcgtggaatcattaacctgtccacagcacaggtggagtacagtgaggaccagcaggccatggtgaagacaccaaacacctttgctgtctgcacaaagcaccgtggggtccttttgcaggccctcaatgacaaagacatgaacgactggttgtatgccttcaacccacttctagctggcacaatacggtcaaagctttcccgcagaggcccgagccagtcgaaatactaagtgactctgccgagtgccctcactcgccttcgagagataaagaaagcgttacctctc

SEQ ID NO: 91770 - DNA, 414 bp, Homo Sapiens
  misc_feature (47)..(47): n is a, c, g, or t
atacataaatatgtacctggcccacagttaaaacgcttaaaacactnccagctctgtcgtcttctcttagattctagaaatgccacaactttctcttatttctagatgctctgtaggttcagggccgtagaggctgtccacgggcctcacaggaacgcaccaaaaccaggacatcgcaagcacaggcgcacagacccagaccccggccccggcccggcccggctgcagggccgggctccccacatcgacaaggacaccggagctgccccgagacgccgagagggctgcgaagagctgcctttgtactcagagccagacgcggcctacgggacgggaccgccacgtctggggcttgcgggctgcagggcggcgcggcacgcgtgggtacaccctgagggggcgggctgcggccgc

SEQ ID NO: 91771 - DNA, 338 bp, Homo Sapiens
aatgataaaatgttcaatgtttacttaaaaaatatatcaagggtatgtttgggattgtttggttttattttctttgatgttgagtactttgtcatcaatcctggcctttttgttcttgttacagccttctgtactccacttgagctaccagtacttctggagctttctttgggttgattaactgggttaaatttatcctttcttaattcttggataaaacttttatttaagcaaacatccacatgcacattgaacagggttagatctgaagtcttttgttctacgttacaaacaggacaaactagagcttggcctgttttcacttcacataagtaagg

SEQ ID NO: 91772 - DNA, 651 bp, Homo Sapiens
tgaattgcccttgtaggacccagaacagctaccagcagaatcagattttcatggaccaactggtattcaaagagacaatctggaatgatgcgttctggcagaacccctgggaccaggggggcctggcagtgattatattattcatcaccgctgtcctgcttttcattttatttgccatcgtgtttggtttactcacttccacagaaaacactcagtgtgaagcgggtgaagaggagtgacctgacttgctggggactgagatggcagcaggggaggcgagctgacctgcccccattccagtggtgggccccttcgcggttccctctggctcaggggccaagccctggtgtcttcctttcccaccaggaaaaagtctagtaaaatactgtatctggcttagggttggtcagactagtaagatggggaggctggtctgagaccaattctggctccttgaccctattgtttttagggttccccgaccagaaccctaaaagcacatggagaggatggctccactgcctcaggtggaaggagctatggctaacaaggttctctaacaggctcacaggcccagccagcaatttcacaaatccttgacagagaaagacacaaccaaatgaaataaaaattccttttcaaatctgcaaa

SEQ ID NO: 91773 - DNA, 661 bp, Homo Sapiens
aacttctttctttgaataatgtaaagagatgtttgaattctgcccattaattcagtaaatgatagtcatgattaacttatctaataacaagagtgaggactcaacagtagcaaaccaatgatagtgcaaggactcggaggccctggatccttctttggtggatagtggaagcatacctgacagcctcagcatatggagaagttggtcagttgtatagaagctttggacaagcaacttcatgtctaacatcactttcatacaccctgcatgaggttttttgatattggttcttagtgtctggactagttttacccattctaggtcagagtttaagctagccaaagggccccagtctagcttatcagaggttatttccagaaagcctcctccctccagggacttctgacatgagaaaactggagaaggtgcagagctggaatggattacccaagtggcttaagcaagataaaggaagaatgcaccctcgactggggactcaaatggactgatctgagttgttgactattgattggctttggtctcttttgtggtggttgagattatagtatctctgcaatctgattactgtacgaatttctgcattctaccaaatgtagcatatatgtgtggttggcttcaataaatctttcatttaacaatg

SEQ ID NO: 91774 - DNA, 533 bp, Homo Sapiens
tcgccgcccgcggcgcatccaggaccttcttcccccaacagaggtcccaaagcgaaaaacagacctatttggaagagatgcatttagaagatactaccagattctgtcccaaagaagaaagagaaagtgaacaaacatctttcagcgatcaaaatcccaggcaagaccagaaggggggctttcgcagctccttccgcaagctctttaaaaagaaaaatgggaacgcaactggtgaagatttctgtggtccttggggctggtggtgacatcaaagctttcctattttcagggacttctgacatgagaaaactggagaaggtgcagagctggaatggattacccaagtggcttaagcaagataaaggaagaatgcaccctcgactggggactcaaatggactgatctgagttgttgactattgattggctttggtctctattgtggtggttgagattatagtatctctgcaatctgattactgtacgaatttctgcattctaccaaatgtagcatatatgtgtggttggcttcaa

SEQ ID NO: 91775 - DNA, 309 bp, Homo Sapiens
  misc_feature (184)..(192): n is a, c, g, or t
ttgttatttccaaaggttttattttatatattgtttgaagctttctcaggctttgcactaaatgcatgtcaggtgcatattcaatctctttcaaaggaaacatggcagttgagtatccagaacacaagtgagtaccgtatactttaaaagaatgcttacagagctctcctcttcggccatgagnnnnnnnnncaagtacctgcagaagtgagcgatacccaatgctctcccagacacacgcctggggtgcttactgtcaatgacactcctccacaccaacatgtggtccaaaatagaatccctctcatc

SEQ ID NO: 91776 - DNA, 571 bp, Homo Sapiens
ggagaatacggaggagagagctggaggtggaggaactaaggaccttctttgccaggtggggacttaaagtttcagttacccattgttggggctcagaaaccaataccccgaaatatagtggtgtgacattctgaactgaagaagccttaaggtctctccgaccagactcccacaggccccccaaccctttgtctcttccaaagcatacagtgaagttgttctctgaagttcctcatctgccttaagtctggacccaccaaagaagaaaacaatgaccactggtcccttcccggagttttctctgactgaactgctgtcacaggaagaaagactgaagcctgctcacatacctggacagattttgcaaaccgttgtctgctctgtgagcccaacagactttgtcccaggccactgtatgttcttcaagcccactgaattcccctgaaaatcatttactagccccctgaaattacccacacttccccattgctcatctgtaccccatttcgtggtggggcagtcactctgatttccccttgcatgctaatgaatgtgtattccatttctaaaa

SEQ ID NO: 91777 - DNA, 1021 bp, Homo Sapiens
  misc_feature (925)..(925): n is a, c, g, or t
  misc_feature (957)..(957): n is a, c, g, or t
  misc_feature (976)..(976): n is a, c, g, or t
  misc_feature (988)..(988): n is a, c, g, or t
cgtcactagcagtttctggagctacttgccaaggctgagtgtgagctgagcctgccccaccaccaagatgatcctgagcttgctgttcagccttgggggccccctgggctgggggctgctgggggcatgggcccaggcttccagtactagcctctctgatctgcagagctccaggacacctggggtctggaaggcagaggctgaggacaccagcaaggaccccgttggacgtaactggtgcccctacccaatgtccaagctggtcaccttactagctctttgcaaaacagagaaattcctcatccactcgcagcagccgtgtccgcagggagctccagactgccagaaagtcaaagtcatgtaccgcatggcccacaagccagtgtaccaggtcaagcagaaggtgctgacctctttggcctggaggtgctgccctggctacacgggccccaactgcgagcaccacgattccatggcaatccctgagcctgcagatcctggtgacagccaccaggaacctcaggatggaccagtcagcttcaaacctggccaccttgctgcagtgatcaatgaggttgaggtgcaacaggaacagcaggaacatctgctgggagatctccagaatgatgtgcaccgggtggcagacagcctgccaggcctgtggaaagccctgcctggtaacctcacagctgcagtgatggaagcaaatcaaacagggcacgagttccctgatagatccttggagcaggtgctgctaccccacgtggacaccttcctacaagtgcatttcagccccatctggaggagctttaaccaaaagcctgcacagccttacccaggccataagaaacctgtctcttgacgtggaggccaaccggccaggccatctccagagtcaaggacagtggccgtggccaggggctgnacttcccaggaagcttggttgccaaattttgnaggccaaggttccaggganaaccacctccanaagaagtggggtcagcctggccaacaaggaacc

SEQ ID NO: 91778 - DNA, 548 bp, Homo Sapiens
ggatcgcttggatgggtgctacccaatacagccattatgcataaagttctcgttgatgggtaaaagtgggtctggtaagaccagcatgaggtctattatctttgcaaattatattgccagagacacacgtcgccttggcgcaacaattgatgtagaacattctcatgttcgatttctgggaaacctggtattgaacctgtgggattgtggtgggcaagacaccttcatggaaaattatttcactagccaacgggacaacatcttccgaaatgtggaggttctgatttatgtctttgatgtggagagccgcgaactggaaaaggacatgcactattaccaatcatgcctggaggccattctgcagaattctccagatgccaaaatattttgcttggtacacaaaatggatctggtacaggaggatcaacgggacctggtaagaaacagaagaagtgctgcaccaaatgctcgacatgctttgcaaacttattttgtagaggtataggtaaatttgtaccattttttcaggaataaaaagtcagcagaaa

SEQ ID NO: 91779 - DNA, 845 bp, Homo Sapiens
  misc_feature (80)..(114): n is a, c, g, or t
  misc_feature (718)..(718): n is a, c, g, or t
aaaagattatagatatatagggcgctacctcgttatatgcgaacgacgagcgcagcgagtattgagcgaggaagcggcgnnnnnnnnnnnnnnnnnnnnnnnnnnnnnnnnnnncagtcgacggtaccggacatatgcccgggaattcggccattacggccggggagatgcccacgtgatcctggcctgcagttgggtggctgcggtgggtgctaccaaatacagccatgaagaaaaaggtgctgttgatgggtaaaagtgggtctggtaagaccagcatgaggtctattatctttgcaaattatattgccagagacacacgtcgccttggcgcaacaattgatgtagaacattctcatgttcgatttctgggaaacctggtattgaacctgtgggattgtggtgggcaagacaccttcatggaaaattatttcactagccaacgggacaacatcttccgaaatgtggaggttctgatttatgtctttgatgtggagagccgcgaactggaaaaggacatgcactattaccaatcatgcctggaggccatttctgcagaattctccagatgccaaaatattttgcttggtacacaaaatggatctggtacaggaggatcaacgggacctgatttttaaagagcgagcaagaagatttgagggcgtttgtctcgcccattggaatgttcttgttttccgaacatctatctgggatgaanacctctataaggttggtccaggcataggtttatcaggtgattcccaatgttcagcaagctggaaatgaactaagggaatttgctgaaattatcgaagtgggatgaaggtaacttctttttgagaaga

SEQ ID NO: 91780 - DNA, 691 bp, Homo Sapiens
gcggccgccgccccagtcacaggccagcagtcagtgcggcgggaagatgtccgcgcactgctgcaggatgagctccaccacctggttctggaacaccatggtcatgggcatgctggtctcttccacctcgggccgcagcagcgtgggcccgaacacaatggccacgctctgcaccgacatgcggttctgctcgccgtgctcgatcacccggcagaggtgctggaagagcatccgcagagtgtcgtggttgggagcgggcagcgagcgcaccaagtcacgcacacagcggctgcgccgggcctggtcctgcaacttgattggccgcaatgaactggcggaagtgcgagaaggggaagaggggctcgggcagctcccgaaagaagagcttcagggctccggtgataacgtggacgtcctcccagcgcccgtcatccaggtcaaggcgctcatcgtggtccaccttatagcgtagcttctggatggtggccaggtttccactgatgcggtacagcccgtcgatgtccagcccgcgggcctcgacggcgcggatgcactgctgcacgaagcgtggcacccggctcctctcgcgctcacacagcgcggccagcgcgcagccgaacacctggtctgtgatgtagcccttctcccgcagcgactgcagtgtgggccggctctgggagaacttgcggag

SEQ ID NO: 91781 - DNA, 413 bp, Homo Sapiens
gcggccgccgccccagtcacaggctatcagtcagtgcggcgggaagatgtccgcgcactgctgcaggatgagctccaccacctggttctggaacaccatggtcatgggcatgctggtctcttccacctcgggccgcagcagcgtgggcccgaacacaatggccacgctctgcaccgacatgcggttctgctcgccgtgctcgatcacccggcagaggtgctggaagagcatccgcagagtgtcgtggttgggagcgggcagcgagcgcaccaagtcacgcacacagcggctgcgccgggcctggtcctgcaacttgatggccgcaatgaactggccgaagtgcgagaaggggaagaggggctcgggcagctcccgaaagaagagcttcaggggctcggtgattacgttgacgt

SEQ ID NO: 91782 - DNA, 413 bp, Homo Sapiens
tcttcgcccaggtctatggaaaggcaaatgaccgaacactcgctcaggatccagggacccctccaacactgctccaggtcagcttctccacaaacaagcagagggacacaggccgctcctcttccagcccctcctagggcgcagcaaagggctgagctccgggtaattctacagctgttcagcgagcacaagtcaggcactgcagggatggtgcagacgacaccacgccgtcgtccactggacaagatgaccccaaagcgcaaagctagagagcctcacgggacacagcggaagggcgcggggaaagccaggcaatgtcggacccaggcggcaccgggtctgggaggtgggcaggcaggagtggtcaccacttcagggtcatccaggaaatacagaacattttccagaaaaaa

SEQ ID NO: 91783 - DNA, 466 bp, Homo Sapiens
gatataaactagcaacccctacaagttagttaagttttattgcgaaggaaagctgcctggctttatctaaaggtgttagatcaatcataatcaaccccaaaatgccttaaaccagcatctctcttagggagagcgaggagggacgtttctaaaaggggtctcttctagggagcatttccagctgtacaggccatattaaagggcttggatgaccaagtattatattattgtttggccaaaaaatatgttctctctgctttggtaagtggcttcttaataatgcacagccgaaaatagaaatcaaatgcaaatgcaggagtgaggcagaagccagttgaagaggtgacccaggtagatatgtttaaatctgagggcagatgcatgtgtgctatttttaagtcacggaattctcttcacttagctaacagagctattatttgtttttcagacttgtgaacaaatctga

SEQ ID NO: 91784 - DNA, 468 bp, Homo Sapiens
  misc_feature (381)..(395): n is a, c, g, or t
tcctgctcatgccaattatgagatacccaacagaaggtgcagctggaaataccatcttatgtcaatgaataacaaacactaacctctttgtgattattactaaaaggttaacctccttatgcaaatagtactcaaatgtatgattacagatttttatgtcaataaatattgtgaagggtaaaaataaggctattacaaaagcctctttggttattggatatcttactaacaacgtgacttctgtagcacttccactagcaggtaactgtgaaacctgtaagaaatcaggatatggacatatgctccttggtttttgaggcattactaagctaggaaaggtgacctgaaagatagctgcattgaacagtcttctccaggttnnnnnnnnnnnnnnnttccaaaggactaagattgcattcttttcatcaagaaaacaaatatattgcatttaagggcaagattgaaaaa

SEQ ID NO: 91785 - DNA, 344 bp, Homo Sapiens
tcgctgccgccaccgccggggctcatgcgggacccgcgcttccttatccggaaaacgaggccgggaaagggagcgccggggccgccgaaatcccggcgttcgtcgccagccgccgctgcctgtccacaccggggggctgaggggccctcctgccaggggctacaggccgcgagctattccgaggaggagccgaaggaggcgccgccgcccgcagccgagcgcgccgggtcggcagaggtgaagcgtaagtaggcggcggatggcgggcgcccgcgctggcggatggctacgcggcggaggggtgcgcgagcgagcgaagcctggtgtgtcgggtcctggcgaag

SEQ ID NO: 91786 - DNA, 456 bp, Homo Sapiens
aagaattgacataggggtggggccaccacaaaaagcctccactaaggctgtgcttggcagagtcataggagcaggcctaccctctgaccatagaccagtagagccactagagggcatttccagcctggcatgtggctctaatatgtaagtgctgtcatgtgggctgggactgggacacccagagccttgggggcccaacgcctgcccaagtgtgcctggaagattggaagatggggcatcaaaaggagattattctggagccttaagatttatcgtttactttgttgttgttgttgtagtattccttcctacttctcccttttggaatgggaatgtcgattctatgtctgtcccaccattgcattttggaagctctttacctatttgattcacagaatcacagatggagagcaatttctctcagaataaacataccttgagtctcacctaaaaaaa

SEQ ID NO: 91787 - DNA, 900 bp, Homo Sapiens
ttggttgacatatgaacagtgcgtaaaaaagcaggctggtaccggtccggtatcccgggatatcgtcgacccacgcgtcgggactcctctgatgatggcctgcacaaggaagaacctgggggtgatccaggagctggtggaacatggcgccaatccactcctgaagaacaaagatggctggaacagtttccacattgccagtcgagaaggcgaccctctgatcctccagtacctgctcactgtttgcccaggtgcctggaagacagagagcaaaattagaaggactcctctgcatactgcagcaatgcatggccatttggaggcagtcaaggtgcttcttaagaggtgccaatatgaaccagactacagagacaactgtggcgtcaccgccttgatggacgcaatccagtgtggtcacatcgacgtcgctaggctgctcctcgatgaacatggggcttgcctttcagcagaagacagcctgggtgcccaggctctgcacagggcagctgtcacagggcaggacgaagccatccgattcttggtctctgaacttggcgtcgatgtagatgtgagagccacatcaacccacctcacagcacttcattatgcagctaaggaaggacatacaagtacaattcagactctcttatccttgggagctgacatcaattctaaagatgaaaaaaatcgatcagccctgcatctggcctgtgcaggtcagcacttggcctgtgccaagtttctcctgcagtcgggactgaaggattctgaagacatcacgggcaccctggctcagcagctcccaaggagagcagatgtccttcggggctctggccatagcgcaatgacataaggatgtttccaagaggaggcaataaagtgcatggtaattcaaaaaaa

SEQ ID NO: 91788 - DNA, 517 bp, Homo Sapiens
gcgcccgcggggtggcgctgcaggtggtgcgggaagccagccaggagagcaagttgctgtgggtcatccgtgagaccagggcggcgagtggaagcacgggcggatcatcctgcccagctacgacatggagtaccagattgtgttcgagggagtgatagggaaaggacgttccggagagattgccattgatgacattcggataagcactgatgtcccactggagaactgcatggaacccatctcggcttttgcagtggacatcccagaaatacatgagagagaaggatatgaagatgaaattgatgatgaatacgaggtggactggagcaattcttcttctgcaacctcagggtctggcgccccctcgaccgacaaagaaaagagctggctgtacaccctggatcccatcctcatcaccatcatcgccatgagctcactgggcgtcctcctgggggccacctgtgcaggcctcctgctctactgcacctgttcctactcgggcctgagctcccgaagc

SEQ ID NO: 91789 - DNA, 561 bp, Homo Sapiens
tgcggccgcggggtggcgctgcaggtggtgcgggaagccagccaggagagcaagttgctgtgggtcatccgtgaggaccagggcggcgagtggaagcacgggcggatcatcctgcccagctacgacatggagtaccagattgtgttcgagggagtgatagggaaaggacgttccggagagattgccattgatgacattcggataagcactgatgtcccactggagaactgcatggaacccatctcggcttttgcagggggcaccctcctgccagggaccgagcccacagtggacacggtgcccatgcagcccatcccagcctactggtattacgtaatggccgccgggggcgccgtgctggtgctggtctccgtcgcgctggccctggtgctccactaccaccggttccgctatgcggccaagaagaccgatcactccatcacctacaaaacctcccactacaccaacggggcccctctggcggtggagcccaccctaaccattaagctagagcaagaccgtggctcgcactgctgagggccgaagcaagaacagcaccca

SEQ ID NO: 91790 - DNA, 289 bp, Homo Sapiens
tggggcaatcgccgctgttggtttcatctcccagcactgcccattggccgcagcacctcctgcccccacggtgcactcccttctgcggtcatttccttcccagggacattttgctgaaacagcttgtaaaggatggcgcctggctggtgcctctgcctgctatggggtgcgggaggcaatgtgggaagctccgtactctctgatcgatgtatcggtaaaatgaaaactgctctaaaaagtagtcttttaaaaggactccagaggaagcaactgacaaaacgtgtctccc

SEQ ID NO: 91791 - DNA, 524 bp, Homo Sapiens
tttaacgctgttcctgttgccttctacctttaaatgcttgaacatgctatgccttagtttctgaaagaaatcactgaccttttcaagggctgtgatctgaatggttggcattcccgcgtaaagttcctttgttgtgtgcacagcttttataaatatatctagactcttcggatcctcatttaaaagggaaactgaaaattcattatactttcccagagtgagatgcagaaccatggcctcatctttcagcacagctgtgggctccttctggatcttttctagcagttgttcagccataggcaatagctgagaaagcaccatctaaagatccaaagacttagtagtaaatagttatgtatactgatatgtttttgctcactctacagagacactcaaagcctgctggaagatgggagtttagcctggaggaaaaaacccaatgatggtaacttcttagacatggagacagctattaattcacactaaggcactcaggtcctttctgacagttcatgtgtaatgct

SEQ ID NO: 91792 - DNA, 420 bp, Homo Sapiens
  misc_feature (226)..(332): n is a, c, g, or t
tttttttcaggaaaactaagttttatgtaaaagctaacaaggacagtagagaaaagtgaaataacagagccatctctacataaacataaatacagaaattctaaacaaatctgtgagacagattataaatgttcaaaaaccatcatgagcaagcgtggtttatttcataaatgcaagggtagcttaacattgaaaacttaatctaatttataattatgtaaatgannnnnnnnnnnnnnnnnnnnnnnnnnnnnnnnnnnnnnnnnnnnnnnnnnnnnnnnnnnnnnnnnnnnnnnnnnnnnnnnnnnnnnnnnnnnnnnnnnnnnnnnnnnaatagaagaaaccttcaacagtctgactttaaaaagagaaagccccagaaagcctatggcaaacattttacttaatggtaagataaag

SEQ ID NO: 91793 - DNA, 1001 bp, Homo Sapiens
gggctaggtaggaggctgggttggaattcggcacgaggcctgcgcagaccgtctgttatggcggcgcctaagtcccacagagacgggagtcgggtgggatcccaggctgggccccgcggcggctggattctcttccctggccaagtctctgagatcttctcccagggcgatgcaaagctactcgctaccagcttggacctgtctgcagtatctcctctgggacctgccatgctgaggacccattctcacctctgagggactcctgtcctaggactaaggtggagcctgggccatggtacagctggctcctgcggcagccatggacgaggtcacctttaggagcgacactgtgctgtcagatgtccacctctataccccgaaccatagacatctcatggtacggctgaacagcgtggggcagccagttttcctgtcccaattcaagcttctatggagccaagactcttcgacagattcaggagccaagggtggcagtcacagagatgttcacacaaaggagcctccttctgctgagacaggcagcacagggtcccctccaggaagtggccatggtaatgagggtttctccctccaggccgggactgacaccactggccaggaagtggctgaagctcagctggatgaggatggggatttggacgtggtgagaagaccacgagccggctctgattcaaacccagcaggggcctctgagagacaaggtacatcccatgattctagcacaggaagaagacgacgtctgggagaggaagcacaaggcagccgcacgatatcatcgaatagagcacaccatggccccgccctggaggatgttggcagcaggtgtggcgggcgcctgtcctgggactactcctgtccgacagactctcgaggtgtcagcgctggactcggggccgcggtcgtgctatcgcgcccagggcggccgttgtccagtcgggcgttctggccgtgccggaattgcccacccggtgcgggggttt

SEQ ID NO: 91794 - DNA, 433 bp, Homo Sapiens
caattaggaaacaccagcaagtgccagaagcttctcattagcaggtcagctttcaataactggtttatccaggtgtgtgagacccgataagcagaagggaaagctcttagcgacctatccagctgctctgcactgggctcctgacatcccagaaatcagtacatctgtcttctggggtccaagaggtatttcagtttctctggctttgtttcccgtcatttgtacctggccctgcagaccaccccagtatttccatcataatacccctgtgggcaggtgcatacctcatgacaatatttaatattaatagatttctgtgttgtctccagaatggaaaggggctgtctattccttgagctagttggcttgctaaagactattgacttcattcttcttttcctatctacctaataaaccagtgttcatacaaccc

SEQ ID NO: 91795 - DNA, 1844 bp, Homo Sapiens
tggcacgaggatggcccagccggacagcacagccccagagggcgccacaggccaggctccaccctctagtaaaggggaagaggctgctggttatgcccaggagtctcaaagggaggaggccagctgagtaggcagcctggtgagggggggcagggatgggcaggagggtgggagagtggatgaggggcttctcactgtacatagagtcactggcatgatgccctcgctcccccatgcccccacatcccagtggggcataactaggggtcacgggagagcagtctcgtctcctgtgtgtatgtgtgtgagtggtgggcaggccagtggcagggccggccccagcccctgcatggattccttgtggcttttctgtcttttgctagcttcaccagtttctgttccttgtgggatgctgctctagggatactcagggggctcctgctctccttccccttcccttcttgcctcaccattcccctaggcaggccctgcaggtcccacactctcccaggccctaaacttgggcggccttgccctgagagctggtcctccagcgaggccctgtcagcggtcttaggctcctgcacatgaaggtgtgtgcctgtggtgtgtgggctgctctaggagcagatacaggctggtatagaggatgcagaaaggtagggcagtatgtttaagtccagacttggcacatggctagggatactgctcactagctgtggaggtcctcaggagtggagagaatgagtaggagggcagaagcttccatttttgtccttcctaagaccctgttatttgtgttatttcctgcctttccgagtcctgcagtgggctgccctgtaacctgaacctcatgagcctctaagggaaaggaggaacaattaggacgtggcaatgagacctggcagggcagagtacaagcccagcacccagtgtcccagccttactgggtccttaacctgggccaaacagggagggctgatacctccttgctcttcctagatgcccacctcctacaatctcagcccacaagtcctctccaccctagggggcttgctgcatggcaataactcataatctgatttggaggtttgccctttacaggggcagattttctgctcagttcaacaatgaaatgaagaggaactccctctttctacagctcacttctatcagaggcccaggtgcctcagagccacattgagttgctttttctgggatgaggaagtagggttaaactccccagtttcctgagggaggctcctgacaggtgccctttgtcagaccctaccacagcctggataggcagccacattggtcctcgcccttgctcggcactccgtggtggtcctgcccttctccctgcatgcctgtgggtctgctctggtgtgtgaaggtcggtgggttaactgtgtgcctactgaacctggcaaataaacatcaccctgcaaagcctctggccaccctctcgcctttgcttcctctgtcctactggggaggagcccctggaaggcagtggggacagggagaggctgggagcaggttcacaagtagtggctgggagtagtagtgaacagtgccctgtggatttcttgggctgagggtgaagatcatcctcaccacagtgtattcctcaatggtggtggtggtggggcgtcctctgaactctagaaatccatgtgagtagtgggtcttgggctgcatttggaccaagggaatactccctgggctgagagctcacgtaaggctgctgtttttgactcctgttgacgaaggagccttactcttgatttaggctagagcgggatctacctgggcagccacgaagggaagaccctgtcata

SEQ ID NO: 91796 - DNA, 1057 bp, Homo Sapiens
tcagagtgtgggatgtaaatacaggtgaaatgctaaacacgttgattcaccattgtgaagcagttctgcacttgcgtttcaataatggcatgatggtgacctgctccaaagatcgttccattgctgtatgggatatggcctccccaactgacattaccctccggagggtgctggtcggacaccgagctgctgtcaatgttgtagactttgatgacaagtacattgtttctgcatctggggatagaactataaaggtatggaacacaagtacttgtgaatttgtaaggaccttaaatggacacaaacgaggcattgcctgtttgcagtacagggacaggctggtagtgagtggctcatctgacaacactatcagattatgggacatagaatgtggggcatgtttacgagtgttaaaagcccatgaggaattggtgcgttgtattcgatttgataacaagaggatagccagtggggcctatgaatgaaaaattaaaagtgtgggatcttgtggctgcttgggccccccgtgctcctcaacggacactctgtctacggaccctggtggagcattccggaagagtttttcgactacagtttgatgaattccagattgtcagtagttcacatgatgacacaatcctcatctgggacttcctaaatgatccagctgcccaagctgaacccccccgttccccttctcgaacatacacctacatctccagataaataaccatacactgacctcatacttgcccaggtatcgaaatcgattatgtacataacactgtgggtaggagacgggatattagctgtaaggtgttgctagttcatggaactttctcctgccgtttgggtcaccaactcctgtaaagccgaggaagcagacaatgtgagacagggctgaagctgccacagtgtggacagtgcctttcaccaaggtagccagcctcagttctagatgattctagggtcctacttgtgtggtaagcctagtcattcctgccctagttatctagtagtactgttatgaaaataaaatgagatttgaatcagtttg

SEQ ID NO: 91797 - DNA, 463 bp, Homo Sapiens
gggcctccttcttcaaacaggaatttctgttagcaatatgttagcaagagagggcactcccaggcccctgcccccatgccctccccaggcgatggacaattatgatagcttatgtagctgaatgtgatacatgccgaatgccacacgtaaacacttgactataaaaactgcccccctcctttccaaataagtgcatttattgcctctatgtgcaactgacagatgaccgcaataatgaatgagcagttagaaatacattatgcttgagatgtcttaacctattcccaaatgccttctgttttccaaaggagtggtcaagcccttgcccagagctctctattctggaagagcggtccaggtggggccgggcactggccactgaattatgccagggcgcactttccactggagttcactttcaattgcttctgtgcaataaaaccaagtgcttataaaatgaaaa

SEQ ID NO: 91798 - DNA, 528 bp, Homo Sapiens
tttgtggttgaatgaaatgcaaatttaatgggagaaaaaaatctagatgatttcatcctgtattcagggacaatccacttctgaggatctttctctttctcctccctagcccccctatattctaaatcttagtccagtcttgagtaagctgtttcactatatctgactgggagcaagggatttctagtctttccatgtggtttcaattacatcacactcagatacaccctgggtcccttcattgagtgtgactactctggaaaagtgtcttgtaacttcattttagcagaaagtaggatttgctatggttttcctgacaggaggctgagtgatggactgaatctagcatgagggaggaataggagaaagagaaattaatgttaaccctctggacataatttgccaaacagagaccaaagccactgcccattagagggcactttagagaaggagctgagttggtggtggatggaggaatgatggtggtcaatgaggggttattatggcaaatgttaataggaagatgaa

SEQ ID NO: 91799 - DNA, 575 bp, Homo Sapiens
cctgaataaggtcactataatcttaggttaaagttacagtaagcagttcaagcaaaatgcatattgcttaggttttaagcaagcaattttgatactgtttaattaaaatgtaaatataaatgtgaaactattatagaaatatttataaacacttaggaatactcatgtatcagcaagtaatgaaataacttatttaaaaataataaaagggtgagagtaaatgtaatgtttggtaacaaatccaaaaatatctataagagatgtaaaagaacatgaaaaggctttattattcaaattttgaaaacctagcagcaaaacaatttgcatataatatagtgcaatgagcatttgttcataaaagactcccaaagtcttgaaacgattatacataaaccagaatggaatccattaggataaataatttaaagatgtccagagtagcttaccaagaactgctagacactctcacctgcattactgaatcataaacaagcttatgcaaaactgtgttctggataactgactcttatggctccccaataacaaggctcgataaggcagatcaattctaggag

SEQ ID NO: 91800 - DNA, 379 bp, Homo Sapiens
tttgaggagaaaggactacaatgtacaataatgcctactccacactcacctaacgaaagttcagaccaagccccacagagatctgcaggggagactgagattgagggttgagtcttaccaaggtagcaggacttgggaaacactttgggctttcgacatcgacactgacaaagcatgagaacaagtccacagggcccagcagtgaaccaacctgctctggggccaggccagggctgaggtcatcctgtgacactgggggccagagagcggccttggcattgctccccaccctgcctccaagcccctgtctgcctctgggctgccagcctccacctgcctgcgacggtggccccggggtgatggcctggctgtgacccat

SEQ ID NO: 91801 - DNA, 709 bp, Homo Sapiens
gaactacagtgacagagtccctacagcataaaggcaatcaagaggaaaacaacgtagacctagaatcagccgttaaaccagaatctgaccaggttaaggacttgagttcggtgtcactatcctgggatccaagtcatggcagagtagctggcttcgaagtacagtctttgcaggatgcaggaaatcagcttggtatggaggatacatctctgagctctggaatgctcacccagaacacaaatgtaccaattctagaaggtgttgatgtggccatctctcagggaatcaccctaccttccttggagtcttttcacccccttaatatacacattggtaaaggaaaactccacgctactggctcaaagagagggaaaaaaatgacactcaggcctgggccagttacccaagaagacagatgtgatcatcttaccctaaaggagcctttttcaggagagcctagtgaagaagtcaaggaagaaggagggaaacctcaaatgaattctgaaggggagataccttccctgccatcaggcagccaatctgcaaaaccagtaagccagcccaggaaatcaacccagccagatgtttgtgcctctcctcaagaaaagccactcaggactctgtttcaccaacctgaggaagagatagaagatggtggactcttcattccaatggaagaacaagacaatgaagaaagtgagaaaaggag

SEQ ID NO: 91802 - DNA, 424 bp, Homo Sapiens
ggtgtcaccactgctttgggggaaatggctgggatgaggctaatacattcatgcaatatttatattttcagggggctgcgttatcagcatgctctccctgccttgggcttttctttccgtcatgttttccttttcgtgttccttctctgatttctcttgtctctgctgctcacaggcctgcccatcagtcagtacagatactcagtgtctggtttctggccagctccgtggagggggctttaagcagaattctgactctttggggtgggggattaggaactgggggaaacttaatgatccagagattcccccaagaggagtgtctggaaggatctgtgcctggacagtggcagaacctttccagtgttcttttggttctgatttcatcagtctcaataaagttccgatctctctttaaaaaaaa

SEQ ID NO: 91803 - DNA, 412 bp, Homo Sapiens
ttttgaagaagaaatggctgtataaagatgagtaacttcacctatcagactggcaaaatttaagagattggtaatataccatgttagtgagtgtcttagtcagtttgttctgttctaacaaattctcatagactgggaaacttaaaacatttctttctcacatttctggaggctgagaagtccaagatcaaggtgccaggacaggcagtgtctggtgagggcccatttgctggtttgcagactggaaatcttaaacatttctttctcatagttctagaggccaggaagtccaagatcaaggtgccaggagaagcagcatctgctgaaagtcagcttgctggtttgcagatggctgtcttcctgttgctccctcacatggcagagagcaaagagagagaaagcaagctgtctc

SEQ ID NO: 91804 - DNA, 600 bp, Homo Sapiens
gggggcggggggctccgcgggcagcctggttgcgctgcacccggacggggccgaggggacctgaaagctgcggcagagcctgaccgcgccgttctccagaagagccccggccgcggctgagtcgcgctccgggtgtggacggagccggagcctccccggggctcggtgaggacacagggcccaagccccgggccttcaagtcttgaccgagcgcatccccggcccttctgcgcccacacctgagtttttgtctgtaggagtttccgcagtttgctaagaatcgacatctagaggagtactcaccacttaattgatgatcaatacacgttccttgaaagaaccgatagcatgcgatcgatacagagcatctgcactgggattgtccgccccgcctggcagggaggcctcgggggctaatggagctgagggtatagtcggccttggaccctcgcttttttcctttcctgtactatgaagataactgccttatctccccctcaggactgttttggggattaaataggacgtttaaattaccaacgctctttgaaataaacatttcaaaattattatgaagaaaggaaagaaaaaggaaaaagg

SEQ ID NO: 91805 - DNA, 324 bp, Homo Sapiens
tcctttctcctgtgacaggcgctggacacatccaccctctccccttattctgtctttaggttccattgtaggtaaatctgttcactacatgtgattcttgatcctcaacttgtgacaagctaaaagcttagattacttgcagctccacatttcagaaaactgcactttgcctccatcaggtattcccttcatttcccatggatggtcactgtggccagcagcattttaatgtcttgatgcctaggagatacaggggctagtgtgtggtctggcctctgtgtgactagggagtaactgaaatctacaagtttgcatataaacaaa

SEQ ID NO: 91806 - DNA, 171 bp, Homo Sapiens
tttttaactgaagcaatgctttattgcaaccacaaagcaccaattcaacaaggcgttgacacacagagattgaacaaatgtctctttgaacagagatgtagcaagcccactttttccaagctcttaaaaacaagtacttaacccaggaaccgaacaaagcataggacaatt

SEQ ID NO: 91807 - DNA, 383 bp, Homo Sapiens
acaagtaaaataaagttatcaatttaaatcttggtacactttataaaaacaagaggtaatgttgtaataaaacagcagtagcctcagctggcaacatactgtttgttaaccctgtgcaataaaatactttgttcatactacacttattcaaacatgactaacagttactacagacatttcaggaatcttcacgggactcctatagacttactgttaaaaatgagagacatttacaatcataatgtgccatgaaaacttgaaaacgttacttctagtaggagataatgttcatattatttgaatttgttttaggtactgaacagctgagttacaaggactaaaagtgaaaagcattctaaaagcccatgaacactgttgttcac

SEQ ID NO: 91808 - DNA, 868 bp, Homo Sapiens
ggtcaagccgctgaagcctggggccagctgggactggaagggagcacgagtccaggatggactcagtgcagagcaggacaggatgccatcgaaattggaaggtttcctggtgctgcctcacagtcctgagatccagaccacgagaagtgaccttcagggtcatcaggctgtcccagagaggtccgcgttctccccaccccgacggaatttctctcccattgttgacacggactccctggcagctcaagggcatgtcttgaacgaagatcagcaaagaaaacaccaggcaccctctgccacttagacataatcgcattccactcattattgcagcaaacagcttactgacaaatcgggtcctgagttgaaaagcaccatttgtcaaagaggcctttgaagagacccctaagaaacacagagagtgtttagttaaggacaaccagaagtacacatttacaatagatagatgtgcaaaagacctttttgtagccaaacaagttggaacaaaactctcggtgaatgaaccactgtcattttctgttgagtctattcttaagaggccttcatctgccatcactcgtgtctctcagtgaaaggctgcttaaacagaaagctggattttctgcagtcttagagcattatagccatttgctactttttttaaaagttaagatgtttgtgtaaagaaatttctaatgtaaagatgatgattttgaaaaattttatatattcctaatatgcatgtactttttcttatcacatatatttaaacttacagatggaaattgcccaatgtgcaaattgttaagtaccacactttacacagcatttcaaaaagcaataaaattgacactgtcttatcaaagaa

SEQ ID NO: 91809 - DNA, 509 bp, Homo Sapiens
ttttgagcaaacaaaaaattttattagattatatacctgagcaatagaaaacttcgagataacattttaaaaatattgacacgttaaggagtattttactttcaaaataccataaaattgattttaaattccctttggaagaaaacatcccctagtctccttcactaaattacaaataattacccaaatataaaaaggacttgcaatgtttgttaaatatggacggcatgaagacaattaagaaactacaggacttatttccaacaagaatacaatatgcatgaagttttgaaaatgtgactttttaccacagtttctgagagtgtaatagtactaaatgttctaaatgtaatctttcagatccacgagcggtgaaagtaatgctggtttggaaaatgaggttgatacttcctctcttaagcttctcagtgaatggctgcttctgtttctaagctgcaggaacaaagcacctctatcatataagcacataaacacacaactcaactatc

SEQ ID NO: 91810 - DNA, 470 bp, Homo Sapiens
ttttataaccaattccagtagcctgaatagaaattttcaaatttttcttttggtaaaactgcattcttgaattaaagttatgattggaatattaatatgtctatagggaaagctttctagtctatttcaaaatcatgtaaaaagcagttttgatatgtcattgtttcttaaaataatttccatatttgcataaaatgtactgctattctaagtacattcctttgttaatatcaaccctagaccttagagagtgcctggatatatatcccaagcagaatctattcctatcaaaagaccataatcatcaaacatttgaagtattacatttctagcctgccttacggaaatgtttaagaaagcaagaaacccttcttcacatgtcagtaagtgaacagggaaatgaccattttcagcataaaagcagctcatggggcttgtaatgaaaaaaatacatacaagatagcattctg

SEQ ID NO: 91811 - DNA, 485 bp, Homo Sapiens
  misc_feature (386)..(399): n is a, c, g, or t
tttaaatcacactcttgtattcataaccacagggttcaccagaaatctaaagcaaggagacactcactcatatagaaatggagttactcttccacagatcgttctgatcaaaggttttggaacagaaatgaattaatgatttttttgtataatatccaacatgtccactatcaaatacatttagtatgaaaaaacagatgaagaaaaggaacatacattaggacaaagtatctggttaaaatgctgttcatttaaataaagcccactctccttactttagagctccttggtgaaatggaggtgagtttgatggagtgcagttgatgaccactgaaaaacacgagccctttcaacaatgttgcaacactgttagtttttggtttaannnnnnnnnnnnnntcacaaatgctaagtgtacactaccaaattctgcggtcagcttttccaagaactactggggaaagtttcaatgctgcaaatcctcg

SEQ ID NO: 91812 - DNA, 393 bp, Homo Sapiens
gtcactcccctgccgggtcagggaagaagaaatttgatgcctagagattgatctgctttttgtttttaagttctagttctggttcgatttcagaaccagtctgcaggcaactctgcattgtctccttagagaactggacaattccactgatctggatcctttggcagcaagctgacattttattgaggctggtcagcactcctggccagagtcttgaaattgtgggtgtgtttttgctgcccattgttgagttattcatgaacagatatgaaaaccatatatatccgaattttgttaccactagatgtgatgagtttttctttttgattatttggggattcttagttctctgtcaaactcttcagattaaaacccttcttatagctaaaaaaa

SEQ ID NO: 91813 - DNA, 473 bp, Homo Sapiens
  misc_feature (73)..(73): n is a, c, g, or t
  misc_feature (83)..(83): n is a, c, g, or t
  misc_feature (91)..(91): n is a, c, g, or t
aaagtggctggctgcacttggacccactaatgaagactggtgtgggaagaattccttttggatgcacttcagncagggacccnttgatccntgggtcacaggcctgtactgagccacacaacaggaggtgagtaagggtgggtgagcgaagcttcatctgtatttacagccgctccccacattaccacctgatctctgccttctgtcagatcagtggcaacattagattctcatgtgagcacgaaccctattgtgaactgtgcatgcaagggatctatcttgctctgtccttaggagaatctaatgcctgatgaactgtcattgtctcccatcacccccagatgggaccatctagttgcaggaaaagaaggtcaagactcccactcattctacattatggtgagttatgtaattattttgttatatgctacaatgtaataataatagaaataaagtgcccaataaatgtaaaa

SEQ ID NO: 91814 - DNA, 456 bp, Homo Sapiens
ttctctctctcttcctagaataccaggtaaaatagacatttactttgagggactaatatccaatagtgttaattatttaagcagatatatctagctcaaaaggaaccagacatgtcactgtaccaaaaacacacaaaagtgaaaatttgcttctgttctgtgacctagaatgtgtccagacattaaagatcatgaatactcatatacatgtaaaaatagtaacactgctctggcatgattttgacgtcagtgtttatgtaataacttcagtgttatatttaaaatagataaatttgtgaaataacaatttcttggagacagtcaactttttatgatttaatctaaagattgtcatgtacatgtcaacggatatctgaatcctcagtgaaactgttaagttttcattaaatgactctgctgcaatactagttttcttctcagaaaatggaattcaaa

SEQ ID NO: 91815 - DNA, 379 bp, Homo Sapiens
  misc_feature (272)..(272): n is a, c, g, or t
  misc_feature (340)..(340): n is a, c, g, or t
acttaaagacgagtgtgatagtactgaaccctcattttaaaggaataggtggaaactatgaagtgctacctgtattaggattcatcttgaagaattttccatcagacaaaaggaaatataatagctgtccattctttccagagtccatgtcaatagctgtaattttgcctattaccccttggggaacagggctctcttcgactttcaaaaacaacacatcatgcaagaaggtgggggaattgtcattctcatcccagacacgaacaatgacntgtagtgctcacattttgcaagaatccgtcctcggcgatccaagcaaacactctaaaattatatgttntggggtggatttcatagtcaaactgtcgccgcaataaat

SEQ ID NO: 91816 - DNA, 762 bp, Homo Sapiens
  misc_feature (600)..(600): n is a, c, g, or t
  misc_feature (691)..(691): n is a, c, g, or t
gcggccgcctccccctgcctggggcctgtggccgctgccgggagcgggctccgccggggagccgaaggcatcttggcgccgcagccgccgccgccgcagcaacaccaggagaggccgggggcagccgccatcggcagcgccaggggacagagcacaggaaagggacccccacagtcacctgtgtttgaaggcgtctacaacaattccagaatgctgcatttccttacagctgttgtgggctccacttgtgatgtaaaggtgaaaaatggtaccacttatgagggtatcttcaagacgctaagctcaaagtttgaactagccgtggatgctgtgcaccggaaagcatctgagccagcaggtggccctcgtcgggaggacattgtggacaccatggtgtttaagccaagtgatgtcatgcttgttcacttccgaaatgttgacttcaactatgctactaaagacaagttcaccgattcagccattgccatgaaactcgaaagtgaatggggaacacaaagagaaggtgcttcagcgctgggaggggggtgacagcaacagcgacgactatgacctcgagtctgacatgtccaatggatgggnacccaatgaaatgttcaagttcaatgaggagaactacggtgtgaagactacctatgatagcagtctttcttctttatcggtgcccttaganaagggacactcagaagagttcgtcagcgagaagctgcgtgccggccagttggctcgagagattgatcaagc

SEQ ID NO: 91817 - DNA, 828 bp, Homo Sapiens
gggagacagagcagctgctgttccagcaacagcagcaactgccgcacccttgaaaggaggcccctgccgtgtggacccgtaaaataaaatggatgcaacttctccaggagtgcttatgttacccaaagagaaacagatgcacaaagagaaggaatgagatgctcggggatattttatcaaggaaaccagcaaaccgtctttttcctgaagaccttttaagattaggacaagcagctgtttataaaagcagaacagtgttaagatttgaactgtaaagtaggatcatgctttgaagtatattctagctaaaagcaggggataaactagataaaacttggagactctaagacctgaccctgattaagtgggcctacaagtgagaatctgaagaacagctctctggctgaacatatcccttggatgttgttattaccagctgcctctagatttgagaacagtgctgagcatgcttttagaatgatctttgaggtactttaagcctagctacacctgaaagcataccctagccctcatttctgtttgcttgaaccaagagcctggaaaaagaagtctaaaagaactttctagtgatatccttcagtcctgttctaaaaagaacctgtgttcttcaccgagttaaggaaatttcacaacctcccaggggctaatgtgggagttcattttcacttactgctgaatcaactgaagttcctttcacaagtcttttcccttagagaggaaaaagtatcctgagctcctcaaccctactaatttcattagtgctggaaaaaaccaaaaatccaggttaaaagtcctataaatgtaaaa

SEQ ID NO: 91818 - DNA, 674 bp, Homo Sapiens
ttttatatactggaaaatttaatatatcatatttcaaaacggaagcatcttcaaaataattatgtaatagtaattcatgttagttacaagaaacttgaaaacactaaaaaagcatgaagtatatcaacaaacagccttgtaattctctgacccaacaataaccactgtcgaatttttgctgcgttgtgtccagtttgcaaagtctcttctgctttgtacagtgtaagtaagaaagatcctttacattcccttaacggggggggacccaaaacagctttatgtgtcatttgttctgctatataccttcttagacaccttcaccaccacaccgtttttagttgccaggacattgttgaaatagcatgctatatgtgacacctccctaaattacacaggttctttattcatctgctattgccccctgaaaaacatgatctctgtgctatttcataatagtacatggcatttcatgatggaagccatggagttgaaggcaacagtggcctcatgctccacaattattatagtatacatactgaaatagtttcgtgaggactcagaaatgttcttctcttctgaatgcacagagatgcttccctgtaaggagctctgtcttagaacttcttcaaagcctaataaagttgaaggaaaaacacagaaaggtgatatacttg

SEQ ID NO: 91819 - DNA, 471 bp, Homo Sapiens
tttgtcattctataaataaaacacttcctcttccttttaatggagacagatggatcgaggccctgctgagtgaccattaagggaagcactgtctgtgaggtctctaactagctgtattgaaaatgataaatgatcctagaggctagtattatctcgttgacatttttctcaaagcactacttttttctgtatgtttaaaaatttgtgaaaagccatctattactcctagatttaattctaattaaattggaattcatttggtttttgttttagaattagcataacttaaagcaagttaaattttttcacacttaaagcttttctaataatgcatagctaaatgtgactttgcaaattgctctactttcacatccttcagcatccttcagtgctactttctagtgccagggtggctcagatcataaaactagaaaagacctcacccaccatctggtccagaggtctggaatt

SEQ ID NO: 91820 - DNA, 1103 bp, Homo Sapiens
aattcccgggatctgatgtctgccagactataaaatggggggtcggactctagtcacccatagcacctgcccgcctgcctgtcctccagcaggaagtagcaagtccccagacttttgcaggcgggaaccatgtctcaggctgcaaaggcctcggcctcggccacagtggcggtgaacccagggcctgacaccaaggggaagggggccccacctgcaggaacatcccctagtcccggcactaccctggccccaacaaccgtgcctattaccagcgccaaggcggcggaactgcctcctgggaactacaggctggtggtcttcgaactggaaaacttccagggccgtcgagcagaattctcgggggagtgctcaaatctggcagaccgtggcttcgaccgtgtgcgcagcatcattgtctccgcgggaccctgggtcgcctttgagcagtccaacttccgcggggagatgttcatcctggagaagggcgagtaccctcgctggaacacatggtcgagcagctaccgcagtgatcggctcatgtccttccggcccatcaaaatgaatgcccaagagcacaaaaatctccctgtttgaaggggccaacttcaaaggcaacacaattaaagatccagggggacgacgcacccagtctctgggtctacggcttcagtgaccgcgtgggcagcgtgaaggtctccagtggaacatgggttggctatcagtatcctggctaccgcgggtaccagtacctcctagagcctggtgacttccggcactggaatgagtggggagccttccagccacagatgcagtccctgcgtcgcctgcgtgacaagcagtggcacctcgaggggtccttccctgtcctggccacagagccccccaagtgagtccacacctcactctgctaccttgccccaacccttcttcatgttcaattatttcccccatttttcccaggcaaataaaattccctaaagccaaaatttctcctggatctgtaaacagatgtgtgccttgaggtcccccatagttactgggatgtgacttcctcgctcttaataattacaacgataataaaagcagcaaacactgaaaagtta

SEQ ID NO: 91821 - DNA, 662 bp, Homo Sapiens
gcggccgcagggcgaggcgttctggtagagccgccaacagaggctgggagcatgggatcaagtgcgttactggctgacagcttggcaggtagcagcggggtttgggctgggcctcccaccgccatatgctggtgagggtttgtggggctagtcctttggggcttggtgggcgtggcgggtgccacagtccccctgggtcccctgcctgctggcagtgaccccagggctggtgtggcagtggtcaagttctccaggcctagcagggcgaggtcggactggaaggtaaaaggtctgccagagtcttgggagaagagaggtcccagtggggactggtacgtgtcagcctgtccacactgcttcctcaggtgggtacagtaattgtgagcgacctgcgtcacagggtagatactgaactggcagagagcaccttcaaactggactgcatgcgggttcatcttcccaaagaggaaggagcccccagggtcgagtgcagggtccctgtggaaaggcagcaggacaggcacccggcgctgcccgcaggcagtcaccagagtgactgtgcggcctcggagctcgagggccaggtggtgccagcgcccgtcgtgcatgtcgaggtcgaaggccactgagcgccgggacccgaggtggacgaccgtcttgcc

SEQ ID NO: 91822 - DNA, 921 bp, Homo Sapiens
tccccacgagtcgtccccctttaggaagtttttgggggtcagatctcacccccccttgcccacacaggttgggaagaagactttgggccgacgcccctcacttctcccccagacccaattgcagggactttagtcctctggagtgctgcgtgtgagttaccttgtgtgtctgtgtgcgtgcctagaggtcaagtgtaactggtgttcgtgagcacctcgtggttgcgggtctctaactctcgtgggtctctaagcgcacccgcggggctggagcggaggttcgtgtctctgggagggtcagtggtgtgactgaagctgggagttagctcgtgtctgtgggtgcctcggtgtgtgtctctggggctctgagtccctgtgcgtgcgtgtgtgtctgtgaacccgacaggaagctccccgagggcaggaatatgttttgctctctactcgatcccagcgactggcaacgagcgtttaataaataaatgttgaatgaataaatgtctgcgtgtgagagcgtctaccctccagagtggcctcggaggaaagggcccgagggcggccatccaaaaagacccccagacacggggtggggcgggggcgaacggcccgcgtcgctcccattcctcctagcgccccttcccccggtctccactccaaagtttccctggggctgaagaatccacccagagacgaagacttggcggagggggctggagactcggggacccggggcccgagacgggagtgcgggcagagggagggctcgggagcgacgacccagagccgtgaaacgaaaaagaaagcaggcaagcagcacggagcgaaagagcgaaaagctccctaccaagccaggctttgttccctgaacctaagacttacccggcgctgcggcggcggccggagcgagcgacggagcgcgcg

SEQ ID NO: 91823 - DNA, 445 bp, Homo Sapiens
gcggccgcctgagctgccggctccagcttcggggtcgccgctgggtgagtcccactcccccgcgttgcaggtgacctcactccccggtgcctggcccctgggggccggcagctgcgatcactccagccggtgtggtcacagccccactgggctcctccacccgggaccttttgacctcgggctctccagtggaagaggcggaggcagaggcggtggtggcagtggctggggtggtggtggccgtggccgcgacggctgctgctggctccttgggccccacctcgcacacccgggtgaccaccaccggcgcggatgaactcgcttgggtcgcaaggagctgcaaagggctggtgagggcgtaagcgttgccggctaaactgttcgtgggaaccgcatgctttccgttctgggtcacggcccggactggaaggtggtgctgcccgag

SEQ ID NO: 91824 - DNA, 665 bp, Homo Sapiens
acactcacatacacatgctaccacactgcctgctgtgccatcagcctgcctgaagttcacatcattttagaattggacgggccttcataatttaaattttattatgaaaaagtgatagtctaaggaactcatttgatttttttgtctaaatgtcaaatatagagtagaacgcacaagtgtctgttatagaaatacttgagagtcctatatgcactgttatccacaaccatttaagcacttatccactaatccctaataagtacccctaataagtacatttctaaaccagttattcaagctacatcctcccaagattggactttgtttctactttggtagggacataaataaacggaaacaactgacctaactttttactaaagagataataaagggaataaaattaagattacatttggattttaacttgtgttcttattcctactgccagcaaaaatatgtgaagtgtttttatcattataaatgaatatactattcattgtgcagattttgacatgttcataaataagttagtacccaatgtttgcttgataaagaatgtgataaaatgttaacatttgggaaatctgggtgaagaatgtataggaattatttgtatgtaatatttgtcaatctgaaattatttaaaagaaaaagttgactgt

SEQ ID NO: 91825 - DNA, 953 bp, Homo Sapiens
cagtcgacggtaccggacatatgcccgggaattcggccattacggccgggctacagcgggagcaggagctggaggtagctgcaatcaacccaaatcaccctcttgctcagatgcctttgcctccgtcgatgaaaaactgcatccagctggcagcctgcgaggccaccgagctgctgcccatgatccccgacctcccggctgacctattcacctcctgcctcaccacccccatcaagatcgccctgcgctggttttgcatgcagaaatgtgtcagtctggtgcctggcgtcacactggatttgatagaaaagatccctggccgctgaacgacaggaggacgcccctgggtgaactgaactggatcttcacagccatcacagacaccatcgcgtggaacgtgctcccccgggatctcttcaaaaagctcttcagacaggactcgctggtggctagtctgtttcgaaattttttattggcggaaaggattatgaggtcgtataactgcactcccgtcagcagccagcgtctgccgcccacgtacatgcacgccatgtggtgagtgtttcaggatcctccaggtgccgtgctcccccgacctccgtggcactgtgatgtcatggaattgcacggagctgggcagggaggccacacacctaacttggggaccccgtgtagcattaacaagtgaagctaaatgcagggctcccagagatctccacacagaggagatgggggtctccttcagagggcagaagccttggaaggccttttaggactgcacgggagcagcggccggctgaagcctcacagctctgcaactcgggagggtagcactttgcaagagagtttctaaccttttagaaaccagtagtgagaaaataacttgctgacttgaatttatgaagcacatgcaagatcgctctggagaattaaactgttgaggctcatgaaaa

SEQ ID NO: 91826 - DNA, 1312 bp, Homo Sapiens
tcccgggatccggtacgtgggcctccgggctgtcccctctgggggcggcgatcctccctccggagccccccttcaaccctcccggaagtgagtatttgcaggaccagggatgctgtgctgctctcccatgagccagtcaccgagtcggtctgctgcagccctttctgaacctctggccgtctggatgctccactgtgcttgccaagatgaagtgcgtcttgatggccactgagggcgcagaggtcctcttctactggacagatcaggagtttgaagagagtctccggctgaagttcgggcagtcagagaatgaggaagaagagctccctgccctggaggaccagctcagcaccctcctagccccggtcatcatctcctccatgacgatgctggagaagctctcggacacctacacctgcttctccacggaaaatggcaacttcctgtatgtccttcacctggctgcggcccccagacctggcgcagcgtgtccagctgtgggagcacttccagagcctgctgtggacctacagccgcctgcgggagcaggagcagtgcttcgccgtggaggccctggagcgactgattcacccccagctctgtgagctgtgcatagaggcgctggagcggcacgtcatccaggccgtcaacaccagccccgagcgggaaggcgagaagcccctgcatgccttcctgctcgtgcactccaagctgctggcattctactctagcccacagtgccagctccctgcgcccggccgacctgcttgccctcatcctcctgggtcaggacctctaccccagcgagagcaccagcaaaggacgacattcagcctttccccgcggagggccccggagcacccagaacatccccgtgcagcaggcctggagccctcactccacgggcccaactggggggagctctgcagagacggagacagacagcttctccctccctgaggagtacttcacaccagctccttcccctggcgatcagagctcaggtgaggaccggaggaaagcaggaggaaacaatagctagctgcgagcgacaggcagcccaggacatctgtcttaggctccagtggacccccgtgcctcctaaggcttgagtgcaggtacccgtgttcctagagcacaggacgctgtctgcggctccccatcttccctgccagctccagcctgaactcaaggactgttaagaccactccactgatccctaaagctgttgatgacaagttgattcatttaaaacttctgtacatgcattctcagactcatcttttttgtaattaaaattaaaaattaagtt

SEQ ID NO: 91827 - DNA, 1368 bp, Homo Sapiens
cgcgcccgggctcctgcaggcggggcgctgtgcgcgccgcgatcctggtacgtgggcctccgggctgtcccctctgggggcggcgatcctccctccggagccccccttcaaccctcccggaagtgagcatttgcaggaccaggaatgctgtgctgctctcccatgagccagtcaccgagtcggtctgctgcagccctttctgaacctctggccgtctggatgctccactgtgcttgccaagatgaagtgcgtcttggtggccactgagggcgcagaggtcctcttctactggacagatcaggagtttgaagagagtctccggctgaagttcgggcagtcagagaatgaggaagaagagctccctgccctggaggaccagctcagcaccctcctagccccggtcatcatctcctccatgacgatgctggagaagctctcggacacctacacctgcttctccacggaaaatggcaacttcctgtatgtccttcacctgtttggagaatgcctgttcattgccatcaatggtgaccacaccgagagcgagggggacctgcggcggaagctgtatgtgctcaagtacctgtttgaagtgcactttgggctggtgactgtggacggtcatcttatccgaaaggagctgcgagccccagacctggcgcagcgtgtccagctgtgggagcacttccagagcctgctgtggacctacagccgcctgcgggagcaggagcagtgcttcgccgtggaggccctggagcgactgattcacccccagctctgtgagctgtgcatagaggcgctggagcggcacgtcatccaggctgtcaacaccagccccgagcggggaggcgaggaggccctgcatgccttcctgctcgtgcactccaagctgctggcattctactctagccacagtgccagctccctgcgcccggccgacctgcttgccctcatcctcctggttcaggacctctaccccagcgagagcacagcagaggacgacattcagccttcccccgcggagggcccggagcagccagaacatccccgtgcagcaggcctggagccctcactccacgggccccaactggggggagctctgcagagacggagacagacagcttctccctccctgaggagtacttcacaccagctccttcccctggcgatcagagctcaggtagcaccatctggctggaggggggcaccccccccatggatgcccttcagatagcagaggacaccctccaaacactggttccccactgccctgtgccttccggccccagaaggatcttcctggatgccaacgtgaaggaaagctactgccccctattgccccacaccatgtactgcctgcccctgtgg

SEQ ID NO: 91828 - DNA, 728 bp, Homo Sapiens
ccccacatcagcagaacatctcatgcaccaggctggagccctcactcacctgccctatctgggcggagctctgcagagacggtgtgtcctgtgcacttcgtggagtcacgggcaggagggcatcggcctctgcaggcgaccaggtcctttcacatccatcctgggagagcagagacagggttgagccagctggaagagcatctcaacatgagccaccttctccattccaggagacagacagcttctccctccctgaggagtacttcacaccagctccttcccctggcgatcagagctcaggtgaggaccggaggaaagcaggaggaaacaatagctagctgcgagcgacaggcagcccagcacatctgtcttaggctccagtggacccccgtgcctcctaaggcttgagtgcaggtacccgtgttcctagagcacaggacgctgtctgcggctccccatcttccctgccagctccagcctgaactcaaggactgttaagaccactccactgatccctaaagctgttgatgacaagttgattcatttaaaacttctgtacatgcattctcagactcatcttttttgtaattaaaattaaaaattaagttaaatttagtaataatcatctaatttctatacattctaaaatatattcagcatctgtagtttatactttgtttctccaaagtatgtgggtaaacaataaaaaacaaactataaatattaaa

SEQ ID NO: 91829 - DNA, 1629 bp, Homo Sapiens
ggctggtaaagtaggagtttgcatgacttcacactttttttgcgtagtttcttctgttgtatgatggcgtgagtgtgtgtcttgggtaccgctgtgtactactgtgtgcctagattccatgcactctcgttgtgtttgaagtaaatattggagaccggagggtaacaggttggcctgttgattacagctagtaatcgctgtgtcttgttccgccccctccctgacaccccagcttcccaggatgtggaaagcctggatctcagctccttgccccatatcccttctgtaatttgtacctaaagagtgtgattatcctaattcaagagtcactaaaactcatcacattatcattgcatatcagcaaagggtaaagtcctagcaccaattgcttcacataccagcatgttccatttccaatttagaattagccacataataaaatcttagaatcttccttgagaaagagctgcctgagatgtagtatagttatatggttccccaccgaccattgtatgtcgcttttattcttgtatcggtctcgttttagactgcactgtgagttttgtagtgtcctcttcttgccaaaacaaacgcgagatgaactggacttatgtagacaaatcgtgatgccagtgtattccttcctttcttcagttccagcaataatgaatggtcaacttttttaaaatctagatctctctcattcatttcaatgtatttttactttaagatgaaccaaaattattagacttatttaagatgtacaggcatcagaaaaaagaagcacataatgcttttggtgcgatggcactcactgtgaacatgtgtaaccacatattaatatgcaatattgtttccaatactttctaatacagttttttataatgttgtgtgtggtgattgttcaggtcgaatctgttgtatccagtacagctttaggtcttcagctgcccttctggcgagtacatgcacaggattgtaaatgagaaatgcagtcatatttccagtctgcctctatgatgatgttaaattattgctgtttagctgtgaacaagggatgtaccactggaggaatagagtatccttttgtacacattttgaaatgcttcttctgtagtgatagaacaaataaatgcaacgaatactctgtctgccctatcccgtgaagtccacactggcgtaagagaaggcccagcagagcaggaatctgcctagactttctcccaatgagatcccaatatgagagggagaagagatgggcctcaggacagctgcaataccacttgggaacacatgtggtgtcttgatgtggccagcgcagcagttcagcacaacgtacctcccatctacaacagtgctggacgtgggaattctaagtcccagtcttgagggtgggtggagatggagggcaacaagagatacatttccagttctccactgcagcatgcttcagtcattctgtgagtggccgggcccagggccctcacaatttcactaccttgtctttacatagtcataagaattatcctcaacatagccttttgacgcttgtaaatcttgagtattcaatttaacccttttctgaatctccctggaaacaggtgcctgcctggattgccttcttcttcc

SEQ ID NO: 91830 - DNA, 1172 bp, Homo Sapiens
ggcctgggtggcgaattcggcacgagggtttgaagctgcagtcaaatccatcaaggcagcctcctccacggagaagttccctgatggtttctggctaggagagcagctggtgtgctggcaagcaggcaccaccccttggaacattttcccagtcatctcactctacctaatgggtgaggttaccaaccagtccttccgcatcaccatccttccgcagcaatacctgcggccagtggaagatgtggccacgtcccaagacgactgttacaagtttgccatctcacagtcatccacgggcactgttatgggagctgttatcatggagggcttctacgttgtctttgatcgggcccgaaaacgaattggctttgctgtcagcgcttgccatgtgcacgatgagttcaggacggcagcggtggaaggcccttttgtcaccttggacatggaagactgtggctacaacattccacagacagatgagtcaaccctcatgaccatagcctatgtcatggctgccatctgcgccctcttcatgctgccactctgcctcatggtgtgtcagtggcgctgcctccgctgcctgcgccagcagcatgatgactttgctgatgacatctccctgctgaagtgaggaggcccatgggcagaagatagagattcccctggaccacacctccgtggttcactttggtcacaagtaggagacacagatggcacctgtggccagagcacctcaggaccctccccacccaccaaatgcctctgccttgatggagaaggaaaaggctggcaaggtgggttccagggactgtacctgtaggaaacagaaaagagaagaaagaagcactctgctggcgggaatactcttggtcacctcaaatttaagtcgggaaattctgctgcttgaaacttcagccctgaacctttgtccaccattcctttaaattctccaacccaaagtattcttcttttcttagtttcagaagtactggcatcacacgcaggttaccttggcgtgtgtccctgtggtaccctggcagagaagagaccaagcttgtttccctgctggccaaagtcagtaggagaggatgcacagtttgctatttgctttagagacagggactgtataaacaagcctaacattggtgcaaagattgcctcttgaattaaaa

SEQ ID NO: 91831 - DNA, 472 bp, Homo Sapiens
gacctgaggaactgtctcagtagggggaacctcctttttgctttccttgttttgatcaacctcaatgtcaatgggattgtttccatttgcctcttccagttcatcctcgctggaagacaagaacaagttactgaatgattattttgtactaattttccgaatacaaacgataaattgatttaactgaaaattttgtactaattttaccaaatataaataataaactgatttaatataaaattagttatgttttcaggctgctgagataaaaacatcttttgtaattcaaacagaataccaactccatagttctttcagtctaagtgatgagaaactactaaaatagattcctaacttcccaatccagatctaaaacactattgctctatatctgtaaactgaaaatatcaaaatgaaaatgcatttacatgttattttctcataattatctattgaggactaggatatgatt

SEQ ID NO: 91832 - DNA, 376 bp, Homo Sapiens
  misc_feature (17)..(17): n is a, c, g, or t
aggacatctccccaagnaattatctaagtgactgatgaatcagagggatacctaaatacaaaaactgagtgaaaacaccaaaggatgagccaagtttgccaatgatagagatgatatcctactcatatttgctctgaagcaactaatacaatgcttcatacatggttccctcttgtgatgttcatcttaagctgactttttccagatacgaatgttgtgggtggcagcagaaaaacccagcacctgggctcacatagtgcttatgcccagtctcaatcttgatgcacatgcaccccgtgtgtacttcccctgtctgtctaatatcactgagtttccttataacttcagttcttaaaagcttcatcaccataacatc

SEQ ID NO: 91833 - DNA, 502 bp, Homo Sapiens
tgggaataatgctagtggtgtctctggaaagggagctgcctggggtgtgttgttggtaggagggcctggcagtggcaagacggccctatgtactgaactcttatggccaagttcacctgcaagtttgcagagaggtttacatcgccaagctttggcctttcatttgtgcaaagcccaggactctgatactttgtgtgttggagggtttattagaggtctagtagcccagatctgccgcagtggactactccaaggatatgaggacaagctaagggatccagcagtccaaagcctcttacagcctggggagtgcgagagaaacccagccgaagcatttaaaagttattagctaattgaagaggaagaagaagcaattagagctgtgtgtaaaaaccataccagccctgcttttctgattgacagaaggagccaatcactttgcattcccagtttacactttaataaaagagaaggctttagtctttctacttggaccataaaa

SEQ ID NO: 91834 - DNA, 451 bp, Homo Sapiens
acgctccacgagaatcgtgggggcgagggaaagggtcaagattaccagccattgaccacctcccgggaagggccttagcctgggaagcacagcttctccgtcaagtttttcccgagctcccctcgcaatacaccaggaagctccgccccgtcggagactcaatcttcgcatctgcaaaatgggcgcaggggtgcaaatgggtggccgtggttgccggggctggggagatggcccacttgttccagccacggtcacctctcttctcagagtgaagttcccagaccctacgccccgctgtcaggcagcccgccgatcagatggaggagaacgaggtggagagcagcagcgacgcggcccctgggcctggccggcccgaggagccctctgagagcggcctgggtgtgggcacctcagaagccgtgtccgccgacagcagcgacgccgcggccgc

SEQ ID NO: 91835 - DNA, 489 bp, Homo Sapiens
tgtggagagaaatccactaccatcaaagacaacgggtcaaaaagaatgccgtcctaagctgagaagccatcttcctaacgacagccatgtaatatgaaagggaaaaacacactgttattgaagaacttatcagctatgtcacatcttccacacaaatactcaggaaagttaaaagaaaattttacctcggacacagttgaggtacctcagtcttgtacaaaacttagaactcactaagtctgaaataagactttaaactctctctgaggtgaagttgtaatacagtgagaatgataatatatagtatattaggatttacttactcctgtgttgttctggactatagactgccacacatatcagatgcacatgactgacatgtatatcttcattttgctattatttgtggtgaactaatacaggatttactgtaaaagtataataatgcagtagcaatatactaataaatcaatgcagttaatatacaaa

SEQ ID NO: 91836 - DNA, 999 bp, Homo Sapiens
  misc_feature (637)..(674): n is a, c, g, or t
  misc_feature (720)..(773): n is a, c, g, or t
ttttttttactagtgcaggcatttttattctaagctgctttttactaaaacgtgctcttgtcgctctgaacctttaggactacaatacccagaagtctctgggagtcgccgagccctgtagtttagggttgttttgcggccagcgagacgccggaagtctgggaataaggcgggaccagggaaaaagcaggattccgattggtgaagaggccacatggccttctttaaaggacgggatagagttgcacacgcgcattgaggcgtgtcttccctggttctgcgtccgtgaagcctaaagattcccgagcctgggtcacccgggcggtgtcgcatgtcgtctgcggggaggttggggctgctcgcgcgaggcgctctgggtctcatttccgaggccgaaaatgctggctccaaagtggtgccctgggagatgagggcgactcgcagattccaccctattctctgaatgggcttcgagtctccatggtaacggcccctcccagttcccctgtgacttcatagctgcccacgggaggggagaaagctgatgtgaaggggctgtgggttctgagccaagctctgtctttgaggccacctaccctataccactcgtcccggaaagggtgagccggtgaccttnnnnnnnnnnnnnnnnnnnnnnnnnnnnnnnnnnnnnnaatgtctggtacccctgctgtgctcccttactatttcagggccccnnnnnnnnnnnnnnnnnnnnnnnnnnnnnnnnnnnnnnnnnnnnnnnnnnnnnngtcagaatttgatgttaaacatttaggtggtggttgtgacgaattaagggaacctcagagcaatggccagcacacaatgacccttcaaatgtcagcggctttgatgatcaccattcttaccttttctttgccagattcggacaagttaccgcccaccttcctccagggtcttcgtgtattgatctgccaggttggcactgtaatcggcatgttacgaacactaaac

SEQ ID NO: 91837 - DNA, 470 bp, Homo Sapiens
  misc_feature (119)..(120): n is a, c, g, or t
agtatagtttgccattaatttattgaatctggttttggacaatgcttctgtagtgtagctgcacgtcctggtactgtatcctctgactttattttccatgtattacaaaaggaaaaaannattgagattacactggcataaactctagtttgcacagttcacagctactacttgtgcagtaattgctttatgcggctgtaatccataacctgtgaagacagcacatcatctaaatcccattccaaataatatttgtgtagtgttagctgtgaatttaccctgtacagctgtatctctataaatataattccatgtattaatagtcacagaaagactgtaagtgagcaactatttttatgaaacgtaccactatggataaattaacttttacagaaatcttgtttactgtatgatattctaaaacactgtcaaataaaatatatatccaaaaatcttttctttttccaact

SEQ ID NO: 91838 - DNA, 713 bp, Homo Sapiens
tctttatgatattgtgatagggaaaaaaatcattgacgtcatagaatattcttcttcctctcaggagaagacggaagctggagttggacatggttcataaaagccagaaacacaaacccgtgtggactccgggagggtgactcaggtcctccttccatgtcttgagcactggctcacccagggggtgaaaaattcccgcccctgtttgcacgctttcttgcctccgtgtgtaagctccttgtacaacccagacccatcttgtattttgtggcccagaaaactgaacgattattttgttcctccgtagtccaaagggcagagttgcggaaggccgtcggggcttggtgagcaggggctgtaatacagtctgtgggctccttaccctgcagaggctgtttcagctcacacagagtcatccacacaaacccacggctcccagttgacagtcagtggaatgctcgtctccttagcgtccagggtggggattctgctggaataaagagcttcctcagtgactcatctttaggtcccacgctggtttctgtgccttcagaatggtcacaagcccggattggaaaggatctgcttacaaacctgtcccctgtcctccaacccaaaacgcctttttttctgtcttaatatccagaaaatctaaatgcatcctaaaatcaatgtgaacctttaacaagatagttttacttattatcaaaaaa

SEQ ID NO: 91839 - DNA, 280 bp, Homo Sapiens
gaaggactgaagggatccccccttcgggtccccggccgccctgttcaccctcgttcatcctcctttccgaagctcgctctcgaaggcaggagcgaccggcgcctttggctgaggaggaggagaaggaggaatcgcgccaggcggagcgtcaggtcccgttttcctctccggcgtctccaatacaaagattacggtgcagaaggaaattgcactcgtctcctccgcgcccccggtacccaacacaatgcaccagccgcctgagtccaccgccgcggccgca

SEQ ID NO: 91840 - DNA, 972 bp, Homo Sapiens
  misc_feature (199)..(235): n is a, c, g, or t
  misc_feature (552)..(552): n is a, c, g, or t
tttgtgtagagagtatgaagtcgaggcgcgcgaattcggcacgaggagcagctacagagcccagccctggggcttggtcagtaccaggccaccctcatcaacgagtactcctcagtggtccagccggtgcagctggccttccagcagcagatccagaccctcaagacgcagcacgaggagtttgtcaccagcctggccnnnnnnnnnnnnnnnnnnnnnnnnnnnnnnnnnnnnntccagatgccgcagatggaggctgaagtcaaggccacgcctccaccgcctgctccacccccggccccagcacctgcccctgccatcccgcccaccacccagcctgatgacagcaagcctcccatccagatgcctggctcttcagagtacgaagctccaggaggggtccaggatcctgcagctgccggcccccggggccccgggccacacgaccagatcccaccaaacaagcccccttggtttgaccagcctcaccccgtggctccttggggcaagcagcagccgcaagagcagccaccctacccgcaccaccagggncggcccaccccactgccccccctggaacaacagccatgagggcatgtggggcgagcagcgcggtgaccccggctggaacggccagcgcgacgcgccctggaacaaccagcccgacgccgcctggaacagccagttcgagggcccctggaacagccagcacgagcagccgccctggggcgggggccagcgcgagccacccttccgcatgcagcggcccccacacttccgggggcccttcccgccccaccagcagcacccgcagttcaaccagcctccgcacccccacaacttcaaccgcttcccgccccgcttcatgcaggacgacttcccgacacggcaccccttcgagcggccgccctatgcccaccgcttcgactagccccagggggacttccctgccgaaaatggggccacctcgac

SEQ ID NO: 91841 - DNA, 988 bp, Homo Sapiens
gggattccgggtgggagcccacacggcccaagcgggccttagacatcttgacaaggacataaaggtcccaacctgaacttaaattggtctgagcagtcagtgttgtactggggctaactactccactttggaaccatcctatcttattagcaaggctacatttctaggttaacagttctaccaaatatgaatatgaaagtttatttttaatgagacaatgtgcaaaattatggtcaaccaacatcttttcaccaaatacttcaagcataaaaaatgagaatctttacaaaaatatacagagacaccacaaattggtagctgcccataacattaaacaaactggactcttaagagtggcttctcaacagcatatcattttaattataaccattgcctggtacagggaaaactaacaagtgttttttaagcatcattgcaacattgtattcctgataatttaagtaaaccaaactatgagtaaatgaatgatacatgcctaaaaatgaccatggtttatactatcagtggccactggacttaggactagtccaagaccttgatctagattttgacctagacctagactgtgatcttgactgagatttggatctaggtggttcttttttccttgattccttttcatatcttgagccagacttataatgtgctttggaatctgtttttagagatgcctctagttttggtatgagatgcagacctacaacgtgatttagccttcatttctttcttgggctgggacttggaccgtgatcttgatttggatttagatcttgaaaaagatccactttggtgtttgaatctctcattgccggaatggcttctgctacgccgtggtcttccagttggtcttattctaggactatacaatctcttctcacagggccgttcctccagctagcctgggtctccactctctgccgcatgcgtaacagatgatgaaataggcagtctgatactcttgggtctt

SEQ ID NO: 91842 - DNA, 547 bp, Homo Sapiens
atgagccactgcgcccggccatggacctggctgtctttatcatccccacaaacattttgaaactggaatatttgtcttcagaaaatggaaacaagactataaatgataagccctgtccctagcaccacctctcctgtgtgtggaatagaggcccctcgtgctaccaacacttaccctgtgtttaaaaagatcttgtaccaagccaacggcgttcctggctctcctgcccacaggatgaacattttcggcttccttaggagttttgccctaccgtattccaaagcgtgtgctggtttctcatattgtctgtaggctcactcagcccgcagtttatgtgtgtgcttttttctatgaaaaatgatgtattttgctacttcctgtgtacaaagttttattgtaaatgttttttgtgctttgcatgaacaggggccacgttgttgcaattgtttcagtagaactggtttgatttctaaaatgttcctgtaacatatcttttatgaacaaatctgaacaatttgtgaaataaaacattgaaaaccaaaaaaaa

SEQ ID NO: 91843 - DNA, 434 bp, Homo Sapiens
ctcgatcctgagagagtccctggaagccaaagtggaagcatttggcgatttcagtcccgaggtggcagagacataccggctcctgggaggagcagacctggcgcaggggaaccacagtggggcccgcaagaaactgaagaagcttgaaagacctcaaagacctcagggaaagactgacgggcctggcttgaatccagggcccacccctggctcagtcagccaaggccaggagagtggtgaaaggctgcagaaagaattcctgaaggcggcttcatggatcaggaacatctcaggagtatactgagcccaagaacactgaagtcggatttgggtccagtcatcatctggcctccgtattaggtactatcttcagcagggttcagtccactgcctcactactttagctgtgggcattaaacatttccacacacaaa

SEQ ID NO: 91844 - DNA, 463 bp, Homo Sapiens
ctgctcaggcgctccttggggtcgcgcatggtctcggacagggtttgcaaggacttcgaagctaaccagtttggagccataaccctttcgtacttgccaaaaaactctgggcaagactcttgaattttgagccgcagtattctcgttcataaggtgagaataaaaacatcacctagggttgatgtgaagagagatgaaatcattgtgaaataggagagttattgctttcaaccaatgacattttctggaaacgtgctggagatatggctgcagcagtgacgcctgcaaacgacgttcctgtcatcatgatgctgacattttaattgggaagcagattgaaacgataactaaggaatttgacaggagcatttagtaggacctgtaaagaaattaaagcaggtccgaggtggagttttgtaaactatatgcctgaatagaactttctgtttccaagggaaaaaaa

SEQ ID NO: 91845 - DNA, 797 bp, Homo Sapiens
  misc_feature (136)..(183): n is a, c, g, or t
cccagtttttcatacttttaaataatttcccatgattcaatcagcagaaaaagggaacaaagtcagaattggatatagaattcagattctttttctttcaaggacgcattttatacaattttcaacatttatactnnnnnnnnnnnnnnnnnnnnnnnnnnnnnnnnnnnnnnnnnnnnnnnncagaagtaatacaattttaatttcaatattttaaaatacagaaattggaaagaatactaaatacaactttaaacaagtcacttgtcctcccctataataatcaatgtaagctacttaaagacttacaaatttaaagtaaaacagaaacaaaataaatactgtacactttccctgcctgcaggcaaaagatgggaaatactgttatgaatcagcaaagaaatgctcttcaagcttcagcaccccacctcccagccacaccccacgccattgtcacacagtgggcttccggactgaaaggacacacatgtcacacacattgactgcctatacaaacaagacgagacgctattccgcagacacccccaacaagaagaacagtcccctcggaccgtgggcataaaaaccagtaagaaaagtcagtcaggctagcaaaacgttactacaaaactagtaaataccagagccaacaactgtcccctctccaaagttcacagatttgaaacctctaaaaccaatactacccctccccatcaccccccaaaaaaacttgctgaagcactggcaaagttagacatttcacagtaaatgtgaaagttcatattatataatctctt

SEQ ID NO: 91846 - DNA, 504 bp, Homo Sapiens
tttaaggcaagaaagaaacaaaatagattgtccaggaagatggttacttccactttgtatttctctggtgaactcattaggaactctaaaaagttccaggagtagaatcacggggtcaaagtaccctggctataacttccgattcagagaatcctaacaacttacattgtcaccagcaaggtctttgactacatgagcaactctcaccttaaagcatttctcatctgacattagctgcttggctttctgtggatacgttgactccaggaggcttcttgagttctgtgtgttcggctggcctccggtggccccattattattttctgccaggtaaaggtcagtcacctgtacacagatctcatcactcatgatatgctgcagcttataagagtgcttgggggtaggtgctccacacagtagcaacgtagcaacctccactcatagtgacaacgagactcagtgtagtcaagcaacttctcaaagttcacacagctggagggtggc

SEQ ID NO: 91847 - DNA, 383 bp, Homo Sapiens
tttcattttccaactcaagaatatatcctttattacctgaaagtattatacatgagatctaggccgaattcctatagaattctattaaatacacacattcaacagtaagttgaaagcatacaaacaatacatacatgccaggctctttcagataacaataaacaaggcagaaatagtactaaccaaaattatagtctattcactaacaagtaattacaaagcagtgtaataaatattaaaacagggaacaaatgggtgctacagaacacagacaaaacgaacactctcagaatttgagagttaaaaaggggatactaaaggatggggtctctgataacaataagtagttggcagaataaggcagagaagtaaaagatggattt

SEQ ID NO: 91848 - DNA, 336 bp, Homo Sapiens
tgctgcagcaaaatggctcaaagtccaaccaaagtctggccttttcctgagcctaggctgtgggcgactcgctagcactgccctgggcctccaagctgcctgctcgctgagctcagcgctgacactcacaggagctgcgttcgccggatcctctgagaggctctgcaacgatcccgatccaattcagcagcgttttaaaaggaaactcgtgcagggccactgaaaagtcaggggaggctcagatgttatttcccacggattcctgtttttccagaaacgttgtcaccaaataagtatgagactgttaatttggagaaacaattagcccctacaaaa

SEQ ID NO: 91849 - DNA, 392 bp, Homo Sapiens
taaaaaaattctgattcatggaatctcatcagcctgttgtctgggttgcacaattatcagccttggctgataaaatgaaatcagacattctcatggaaatggattttgcctctttgggaatgatatggcagtggtggttctatgtataattcagatacagatgaggatgaagaaactgagccttcttcttctgggcaacagataattgaaaattcaataactatgaataagatgaagctgctgaaggctaagatgaagaacatgaatctcagcaaaaaggtgaagctgttggcatttgaccaggcttatctctagcttacccctgcagagcactcagcaatgaggtctgttggtcattgtgaaaaaattataaagtattattcattaaaaaa

SEQ ID NO: 91850 - DNA, 503 bp, Homo Sapiens
aggattgcaggagactctggcctctgatatcactgatgtccagaaacaagattctgagtggggacacagcctgccagggcgaattgtcccacccctgcagcacaactcacctccacctaaggagcgagcagccaccggcttctttgggtttctaagctctctcttcccgtttcgatatttcttcaggaagagcagccactcttgagccttccaaatgcagcgctggaaagaggatcatctcttgtagtgactcctcccgagccattcttcctccaactctatccttttcttatgacacttcagtcgtggggaatgaggtccccatgctgagtcctctgtggttttatcgtgtcctttgcccctttataatagattttttcccccaatttaaaacattaagaatggaactttctaaaatgttcatgtcctgagggccggtttaggccttttgtcttcggcacttaggatcctaatgacaataaattatttatgaagagataaaa

SEQ ID NO: 91851 - DNA, 787 bp, Homo Sapiens
gttgatctgatctccaacatcctccacgtcaattcccactccacccacatcccttatcctatacgtaagctttccagccacggtgctggcttgggtgggggtgcgtgcggtgctgacaccaaaatggaggtcccgtgtttctgagagtctctttcagagcaatgcaaacctgaaactactcctgccaagaaacgattgcagctcttcccggaaaagttaaagcctttgagaaacaaagctgaggttgaaagtattagtccattttatagatgaagaaatggaggcccagagagatcacgtgacttagccaagtccaccaactaatattgggaagctcagcagggtcctgggggcccacaggaatgtgaataaacacgcttggaaagtctgcagaatttccagtcctagcctcctgctggtgtgaacctgggctcctgtgcctgggaccctgggagggcctaggggatgccaaattccagggtccagaaagagcttgggataaaatgaacatccaaggggacggctttgacctgggctgagtctgcctgtgccgagtctgcctgtgccatccaactggagtctcaagtcctgaggcaggacgtccagatgccccagtgcagggtcctcctgatcaacacctgctcccctgtactcattagcaacctcacccaccctactctcaaagcacacttggctctcatatccaggagctctgcatctgtagattcagcaacagcagatggaaaatattcagaaaataaattggacagttatgtttctaaaaaaa

SEQ ID NO: 91852 - DNA, 403 bp, Homo Sapiens
gagagagtaagacttgagagctatctttttagctcagggtgcaggactggactaagaactcagttaagtgaagcaagcaagaatttcccaagtgatgccaactcaaaatgaattatatcaagaaaggaaaagcagctttttcatctggaaagaactggagaccttgaacctaggcagcatgtgccttgaacctaggatcagtaaacaacaaggatggaaaagacagtaagaatttggtcagatcaccatatctttccgttgtgcctttagaacaaaaggaaagaaaatatctctttggctcacagagaaaatatgttgagaaatgaagtacaacccctcactgtgctgggcacagagcaggtgctcggtaaataaatagtgtacgtgttcgctgagtaaaaaa

SEQ ID NO: 91853 - DNA, 363 bp, Homo Sapiens
cacttaacgaaagggagctgcccctcagccctcgtgagtccgatgtaaaggagtgaaggagacgaagaactgaatcagtagttgaccgcctgtgagctggcgagctgtgccctggtagggccttaaatcccagccccagaagtcggaggcagggcaggcaccccaaagcgtggaagagatgcacctgcggagtgaaaatgctgctattgcttctagggtcagccttggttcctggaacaaaggagccgcatgactcgggtctggcgatgatgttgggctctgcagtgtcctcatccttccccctctctgggtaatgatatcttcccagggtttaaagtgtgtcctctctgccagtaaaaaaaa

SEQ ID NO: 91854 - DNA, 600 bp, Homo Sapiens
  misc_feature (435)..(435): n is a, c, g, or t
gggttccaagccatagatagaagatgaagtcaccacccccgatctcagagctcatcagagtagagcttgggctggactatgcccttctctgcagtgagcagttttctctgtggagctctgcaacctggagccagccctgcctagggtaagaggaaaaaggactccttccccccagccccacagcctgtacgcaaacacaccaggagacatgacctgctcagaggagacctggaaccaagggaataaaatgagagtgggttgggggcttggctgtttgttatttttttgcttgtaagtggacaatttgtggtgtggtgtgtgaatttggggtcttaaatccagatagctgtctgctgtggacagccactgtttctgaattacagggcatttcaagtgaaaaaacccccacccgaaagcgggggagggaaaaaaacnaaaaacttggtcggcgccctcggccctccaaaaagctttcttaaaccatttcggtttggcggggcgggcccccctagggaaagggggaaccggggtcctaggctggtttccctaagggaaaccctggggtcatgaaataaggggctggggaattccccaccaaat

SEQ ID NO: 91855 - DNA, 533 bp, Homo Sapiens
aacctgtgtggctttggggacctgtttcagtgctccttctcttccctgtcccaatggtacaactcgatgctatcaaggaaaacttgagatcactggaggtggcattgagtcgtctgtggaggtcaaaggctgtacagccatgattggctgcaggctgatgtctggaatcttagcagtaggacccatgtttgtgagggaagcgtgcccacatcagctgctcactcaacctcgaaagactgaaaatggggccacctgtcttcccattcctgtttgggggttacagctactgctgccattgctgctgccatcatttattcacttttcctaagaaggcacttctgggcctgggtctgaggacatcttttttgactgggagccttcttactgttgaggttcaacaagctgaggagtagatgggaatttgagggagaatacagagatactatgaacgtatttgacatttttaatacaatttctgctataatttttgtatgcagtaggcgttactaataaacatttctgctgtgaaaaaa

SEQ ID NO: 91856 - DNA, 886 bp, Homo Sapiens
  misc_feature (267)..(340): n is a, c, g, or t
cgcggcgagcgggaaggaggcgtgtgcctgcggcgcggcccgaggcgtgtgcgcggccatgtgcgcttagcgcagcgcgctcttacctcagtaccccggccgcgaccctccgagcccctggagcccgggtaaagtgaacagagttatctgtgacattccatcaggcacctatgtaacgaaatcataccgtaataactcaccatggcgtatggagtgccaagaaagaacacagtgaaaaccattttgcggggcagttgttataatgtnnnnnnnnnnnnnnnnnnnnnnnnnnnnnnnnnnnnnnnnnnnnnnnnnnnnnnnnnnnnnnnnnnnnnnnnnnacacaccactgtgcccgacaggaaccttgggatattgcattgcttgcaaagacctggtacacaaacctagccaatatcaagttgcctttcttggaagaaatttcatttggtggttctgtgcagctcacaaaatgtaccaccattaaagatggactgctcccttctgcagaatctatcaaactcgaaagggagtatgaactgaagcgtctttgtaaactgaagtgtcaagaaaatacatctaaggaaattcagcttctcctgagggaaaggccagccggtttgagaagacctcttccatctaaatgacagtcagttcatgattgaatctgtactctgtgtcttgcatccaaagggcatgaaggtctctggacctttcactatgtatagttcagggcagatatttgaatgtgcccactggtggatgggccactgcccacagctgtgggttagtacccagttctgacagatcttctgagtccctgacatactcttgttccttgtgtcacaaacgacagcactgtaagtagatgaaaatgcatttggaaa

SEQ ID NO: 91857 - DNA, 404 bp, Homo Sapiens
ccagcacagattgctccagcacattgtccagccacgagacagaatttccctcttacagatccattgaatagccctggcctgtgggtttgctgtaaagatgcaaaagccctgaagcattatctgccaaacctcagccctgaccatggttaggctgacatcaggggaggcagcaggagagggagagaaaagggtatctcattgtggaactgggccagtggtgggcaggggctgatgcaggaggggtgccatggcccaactgctcttcacccacggtccttacacagacctgatcctgctaattctgactcagctttcagactcgagcctgcggacactcaatttttagtaataagcagtctcctcataatttactatatagcaaaataaatttttaaaagataaaa

SEQ ID NO: 91858 - DNA, 435 bp, Homo Sapiens
atgaactatttaatttaccaagacaaacatgcaagtacaaaatcaaggatgttaaaaatacactttccttgtgtatttgtggctttatactgacataagccgtaaaccagttgcaatactagctatttgttgaatattttccacttatctaaaccctacaaaaactatgtattaaatttggaaaacttttagaaacaatatatttttcttatttcaagattttgcagaatatgaattgtttcggtaattcccccaatgtaataagtattagatgcaggtttgttattgtttaaaaattataataaattttaataagtgatatacaaattatggaattaaattagaacttctcctaatgtattttgtcttttggtttctcataatggcaacttctgttctgctcctattttggtgaataaaagaaataaccttcaa

SEQ ID NO: 91859 - DNA, 891 bp, Homo Sapiens
gtatggccgctccatggcccggggaggcgtgagtgccaggttctactgcaggctgccagtggcacctgtgtggaacagacctgggggcacttccgggtcgggggagggggtggcgctggggacaaccagaaagtttcaagcgacaggctcgcgcccggctggagaggaggacgcgggcggcccggagcggcccggggacgtggtgaacgtggtgttcgtagaccgctcaggccagcggatcccagtgagtggcagagtcggggacaatgttcttcacctggcccagcgccacggggtggacctggaaggggcctgtgaagcctccctggcctgctccacctgccatgtgtatgtgagtgaagaccacctggatctcctgcctcctcccgaggagagggaagacgacatgctagacatggcccccctcctccaggagaactcgcggctgggctgccagattgtgctgacaccggagctggaaggagcggaattcaccctgcccaagatcaccaggaacttctacgtggatggccatgtccccaagccccactgacatgaacacctggaccattccacattgccatggccccagggcccagattgagggaatagccaggtgccagccctgcccagagtgcggacaggcccgggagagacgtggaagcccctgtgaaggacaacacccctgcttgggagagagtcccatgtccaggctctggtggggacagggcccctagtggggtggccttccccaggcccctgagaatcagggtttgagtaggagtggactcatattggagctgcaataaatcgataacacagaaaaacaagtcactcaaatacaagtaaagaaagagaggacggaaagacacagacacatagaaaaggggg

SEQ ID NO: 91860 - DNA, 1091 bp, Homo Sapiens
ggaagcaaaccgggcaaagaccgaccacacgcggagaaagagggcacccccacacacggaagcacaagaccgacacacagagcgctcgccaggccagaacaggctcatgagccaccacgacatcctcccaaccagaggcgagccacagacccaccgaccacagcatcccgcacactgagctttgaggcaaccgccgtcaagtcacaaacagaaagtacgacaatccggagcccatccgggtgcccacagagtaccactgcgctgctcaggctctcgtgctcaggcacactggaaaccccaacagactgggtggcccggagtttacttcctacactcccagataagactgtgagactcctcaatagcacgccttctcagccggtgactccggacctcctagtagagccgcaagcacactgctgttgaggaagaagtagcgatcgtggaagccacctgagggcaggcccaggcccaggagactgcggtcctcacggaacttcgatcatgccaatgcttggtgatcacccgacacggcctggaccaggtacagcagcaatggcctccataggcctggtgctttctgtcaccaccaggctggctgatccgtgcccagcccgtcgcaggatgggcagcaccttctccgcaaagtgcagggggcgctctgcctcctccctctcgttgacctcaaagcaggtccaatagtccttctccctgatgcccacgttccggcgatccaggatctccagggtgagctcctcagcagtcatggatgctgggaccttgatatgctgctcagtctctgccttcttctcttccagatacactgtgcagatgaagtcaccggcatgctgggtcccactggcagtgccagccacgcgcatcttcacaatggcagtgatctcctcccgctgcttcctgagctcttcctcatccacactaaacaccaccacatagtggttaatgaggtcttccaccacacggccagccttgtagtcctgcccatctgtctggaagagcgtgggcccaaacacaatgccaggttgtgccctcgtgccgaattcaacaccaggcctcgtacctagcctaagttt

SEQ ID NO: 91861 - DNA, 407 bp, Homo Sapiens
agcccccctatatgctcactccagtctttgagacccccagcaggccaggcaggcctcagcaatctggccccttgaaccctagccatgagggagcgcctcaaatcgtgtttaaccgccatccactgcttccacgaggctcgtctggacgatgagtgtgcctttaacaccagccgagcccctccatcaggccccacccgggtatgcaccaaccctgtggctacattactcgaatggcagaatgccctgtgtttcattccagttggttctgctgccccccagggctctccatgatgagacaaccactcctgccctgccgtacttcttccttttagcccttatttattgtcggtctgcccatgggactgggagccgcccacttttgtcctcaataaagtttctaaaaaaaa

SEQ ID NO: 91862 - DNA, 359 bp, Homo Sapiens
ggcacgaggaactaatccagagccatatctcccctgtctggcctttatatatcaggaggcaatggtcctctgctttgatcgtcccagggtcaggtactaggcaaccagggacctacctctcctgtgtcttagagcctgccaaaattattcaaactagccaattctagactattcaccctgccctgtcttgcctttcctatggaaactccaataataagctctggcctaaaccttcccctcattcccatcttctgccttctgaccatcctagtgtcttttctgtgtggctctgcatggcctgctgtacctcttgtctctaggacctgcaagtataataaactttatttttttcctgaaaa

SEQ ID NO: 91863 - DNA, 423 bp, Homo Sapiens
acacccctcagcgctccctgtcgctgcggactccatggcccttcctggactggcccttgcccaactcccagccaccaccactgtccctaccaatgagcccttgcacaggccacttgctcagacgagacaccctaactcttgctcactccctaaagccctcttcaggggtcacctcctccaagaagccctccttgccaccccccgccggcaggggcccctcctctgtgctccctcggtcacctgtgctacctctaacaccacactgaccacactgtatcgtgagtgtccgttgacgtgaccaattgccctgccaggctgtcagcgcctcaagggtagggtctgcgtgtgatttgtctctgagccccctgtgcccacccagggcccggcacagagtcgatgctcaataaatgtgtgttgactgca

SEQ ID NO: 91864 - DNA, 499 bp, Homo Sapiens
gatggccacttcacatgtcatccagttggtcggaatgctacgaggcattgcatcaggcatgaagtatctctctgatatgggttatgttcatcgagacctagcggctcggaatatactggtcaatagcaacttagtatgcaaagtttctgattttggtctctccagagtgctggaagatgatccagaagctgcttatacaacaactgacctcttccaaactctaacacttaacctctgctattctgcataaattctgagaaaagccaaattttctgtcggtctaagaagacatagcctacacccaactggagataattataaaaaataatgaagcagcatgaggggaaggtatttaatgtgtattttaaagttgggagagattctccttcacctaatttaggtgtttgtgaattggcttgactttttgaagttaatttttaagccttgaacatgtccaactttaagaactttaagaataaatattttaacacaaaaaaaa

SEQ ID NO: 91865 - DNA, 413 bp, Homo Sapiens
gggtaagggtgagggtggggtccctccagtgtttcagaaataaaagagctgttccaaggggtaagcgatgcttgattggaagtacaaagcctttattgtcttcataagcctgttgatgtctctggtcctgatcctgaaatcacagatgcagacagactaacagacacaggcttacaacttgcagggcaggctcacagagcaggtaccacagagggcctggggtcactgtgcacttggaagggccagagcttctgtcccctacatctgatatctctcctctgcctggactctccatgcaacaactgggcctccaaactccaagcccctcttgccttgggacccctccagcccagggacaccagcctgagttgtacatattgtagtccctgcccctagaggtcaaaaaaagaaaa

SEQ ID NO: 91866 - DNA, 535 bp, Homo Sapiens
taaatgaggaacaaatgaaaatatatgtgaagggcttagtgcaatgtctggcatatagtaaactctcagtaagtgaaatatgatatgattattctatattatttcattgcccatcagacacaggggacagacttacagtggataaatcagagcgaaggataactgcacttagaaacagaaatggtatctcagcaatcgactgttggctcagtgatcactgtggggcacatcaataacatgattatgactaactaaattaaggtgaaaaacttagctattgcctaccggcttgcaagtaacttgccagttacttagctgtgattaatacaatatctgtaagatattgcaatatatttagaaagccaataataataaaaattaaaaaacaagtccttaagagaaacatttacacacactttaaagaatgtgaaacatccctttgggaaaaaaagaggatttacaatccttttgaagaagcgatgagaatataagtgcagaaatgagaactatagtcaaaaaggcccattttgaggaa

SEQ ID NO: 91867 - DNA, 808 bp, Homo Sapiens
  misc_feature (461)..(493): n is a, c, g, or t
gtggaaacgggatcttgcttgtcctgagttgtggctcaaaaataagagaaaaggtttgagagacataattcatcttcaacaatataaacttgaacaatttaatccttataagtctgtaaagtagaaatccaagattttggatttttaaatgcgttagttggtatgagtgtgatcaaatttaaactgcctatagagtcagataaacttaatatttatcatttatattcaaaaatatcaggaaaactaactttttaaaagagagaaaaacagtttgattttataacaataatataattgcagtcattaaaaaatgtcttactacagattcctaattatcattcaggacaataaaaattatgcattatgattaagtacgtgtcaaatttacttttgcaaattctatgtgcttctgatgcttagttctgaaatatcgtcaagatttaaatctgcccacacttgtnnnnnnnnnnnnnnnnnnnnnnnnnnnnnnnnntagagaaagcctaggttagtatgtcatgagtacctcattgttgtctaatgttacatgtctttgttttaccttcccaactagattgcaaacttcttaagatgttttacatttgtgatgaaataattctaggttgagaatggataccaagactatttagaattcctgatacagacgagaaaaaacatccttcaaaccagtgcttcttaagcctatcagacctaacacgctgtgtttagaacaaatgcttcaaagtaaccattttattatcctgaaatgcaactcattgttggcatgatgaagaagcatacaatttca

SEQ ID NO: 91868 - DNA, 263 bp, Homo Sapiens
gaagtttagtgacttgctgaaatgggctagggaatctaatttcaaatgggcaaaaagataaacaaactattttgctttaattttctagttcagtgttttaggggtaaatcaaaaccatccaaatgtcagatcagaaagaaagttaaaaatcatatagaaagacttctggatactgaagatgagctcagtgacattcagactgactcagtcccatctgaagtccgggactggttggcttctacctttacacggaaaatggggat

SEQ ID NO: 91869 - DNA, 462 bp, Homo Sapiens
gctgcccccgcccccttttcctcgcgccgcccgcgtgggccgcggtgggaggcgccggtggcaggttcccgcgggccccggtcggcgaacagctctgcaaggaccgccgcaggccacaagtgcacggggtgccaggagctccccgtccccggcccccagcccgggctgaaacagcaacggtttgcccgggccctcccccttccctcttccccagcaaatctacccagaccggaagcgcgacacgcgcttagacccgagccttctctcagcctcgggaccaggtgcttgttggctacgtcgaaaaggcaaaagtaaagaaagcgaaggcgaagggcagctcaatgggaacgattcagggggtcttcccggctcccagcacccccaagaagatggctgccgataaatctccccgaccgtaatggccgaattcccgggcatatgtgacggcaccgtcgactgatg

SEQ ID NO: 91870 - DNA, 444 bp, Homo Sapiens
gacctgggcgggcggaggagtgtgacgggccttagggccgctgtggatggtttctaaaatgatcattgaaaacttcgaggcactcaagtcctggctcagcaagactctcgagcccatctgtgatgcagatccatccgccctagcaaaatatgttctggctttggtaaagaaagacaaaagtgaaaaagagttaaaggcattatgtattgatcagctggatgtatttcttcagaaagagacacagatatttgtggaaaaactttttgatgctgtgaatacaaagagttacctacctcctccagagcagccatcatcaggaagcctgaaggtagaattttttccacaccaagaaaaagatataaagaaggaagagatcactaaggaggaagagcgagagaagaagttttctagaaggctaaatcacagtcctcccaccgtcgtgcc

SEQ ID NO: 91871 - DNA, 431 bp, Homo Sapiens
gacagtctcagcatctggaaggttccagctcccacagctggtgtggaaatctcctcctcaccccacctgggtcccctgcccatttcagccgtcacctagctggataagcctggaccactgagtgctgccctagagggaaagtcggagcccaggaggtcccagtaggcctcgggtagcccctcatgtcgcacgctggcccctgccaggctgcatgcccttggcactgcctcgtcccacatacattccatatggggacctagagccgcaggaaaacacagacccacacaggcccggcttcactgtgaaaaaacaggcatcatagaaaagggtcagaaaacgggttactgcatctttcacatttcatgatactttatcggtttactatcatagtaaacgtaagcttgaaataaaaaggtttcttgtcacaaaaa

SEQ ID NO: 91872 - DNA, 779 bp, Homo Sapiens
tgcggcagcggcgttgctggctgcgcgtcaataggagaactctgtgcactgggaggcccaggagttcttgacggtgctcggcttggtctgatgggaagggaaggtacaggaccctctgatattgtaggtgactggcagggactagttcggggtgaagagctgggggaagtaccaaggccggaacttgaagatggctggagatgctgaggaagaagttcctccacttcagcactatagtcatcaacatcaccttccatatcaaaatctgctgcaacctctgcatcttcaccaagcagggtagagcttgttgatgatggcaatgcaatgctaattttctctaaactcatttcttcttccaaatttttgatccagtctggactttttaaagcaatagttatagtccgattcaataactctttaccatttaggctcagaacattcaaggcagagcttccctccaaaaatgtaacccacattttatcttctacaaatcctataagtataacttcaccagaacttgcaaacttgctgcagaagctcatcaatcaaggcatcatcaaaaaaattattttctggtaaagaaacttttgattgagaccaatactgtaccatctggtggaccctgaactgcaattacttctttataaatgttttgcctctcttcagcttcaacttcaaatatatctatatcaatcagggcaacgacaggcctgtggtcagaagtcttcagctcagctcttccatagtgcagcaaagtgcctggagtccacgtgtacaga

SEQ ID NO: 91873 - DNA, 500 bp, Homo Sapiens
  misc_feature (443)..(443): n is a, c, g, or t
gcggccgctccaacatgtggtaccagcggccatgtgccctcaaggggagggaggaagagcacaggagggtgggaggaggacaaacagccccttttatagggtcatgggggggctccactcagagtctggcaggaatctgccaggaaaacctcgttctagatagggagaagcagaactgtgtgtggggcaggccgccgtggtcctgagagacagggcccgggccttccactgctcgtttgcacacctcttcggcctatcccaaggaccttcctagcatataaaaacaggggctctcctgatttgtaaacagaacaacaaataaaaataaaaacaaaaccaaaaattcctccatggcagcccacccaatgaataccccagatttttagggccattgcgggtctgtagctgggtgtagagagagttaagctttcatctcccatgtntacaacactttgtgataaaatagttgagtggagcaatcacatacccactgcgtgcgc

SEQ ID NO: 91874 - DNA, 879 bp, Homo Sapiens
  misc_feature (106)..(141): n is a, c, g, or t
ggcaggggctggtacggtcggattcccgggatatcgtcgacccacgcgtcgccacgcgtccgcggacgcgtggggctatttaaatcgttacttgctagtttttgcnnnnnnnnnnnnnnnnnnnnnnnnnnnnnnnnnnnngtgagaagtgaagaaaatgtatggtactaagattatgccttattgataaatagataaaccaatttgaatcctcttagcatgtttaagtatgttgattgctttctaattaatgaacttctcacagaaatttcacttagtgaaaccaatgattgtagcaaactcatactggatcatttcagttaccttgaactaatagcacataatggttttttgttgttgtgtttttaatgtagcccttacctggatatacatagtctgcaatcaccaaagtataatatcttgtaaggctatattttttaaagcatattttttcttgagcattaaattatcctaaatggtaatatattgtggataagtctgggcttattggacataatacatatttgggttggtactggttgaatccttcagttaactgctttgttgctttttgcaagattttttatcttaaacatgtcaggcatcttaagtcacctttatactgttttgttcctctgagtttctttcagtatgttatacaaatgccagacataacatgtagcagccatacttgcatggaaactgactacacatacataatactgcattttattgtaaggttttcacattaatacagcaattaccctgactaaattgagttttgtgatatatggaaaacttcattgtaagagaatcttgcatacaatgttgacatattaacatccaaaataaagcatctgtgtacaagctgaaaaaaaa

SEQ ID NO: 91875 - DNA, 484 bp, Homo Sapiens
gcaccgaagagaaactttgggaccaaaaagaaactttaccgacaaaatatagtgttgaatagaccattctctattcagaagctaaactgtttgtcgccttcccttattgctaaggataagtgctgctcacccattgaacaaaaataactcttttctttcatacatctcaatgtgaacacatctactctaagaagcccaactaagatatggttaattattccaagacacaggtactattaacagtcccccaaaatcaccaaacagttgcttgatgtgatatggagtagaacttgtgaaaagcactgctgagatgtctatatataaacccacaggcttctatactgacatatttcacaatctgttgcatgttgtgtttcaagtaaatggttcacttggtagactattctattcaaaaggctactcttttttcagtgattgttttccagtataattccatcaataaatggtataattgacttataaa

SEQ ID NO: 91876 - DNA, 466 bp, Homo Sapiens
  misc_feature (419)..(419): n is a, c, g, or t
gcactcggggcacttgaagggccgctcgcctgtgtgagtccgctggtggcgcaccaggtgcgaggggcggctgaagctcttgccgcacaggctgcagatgaaggagacctcatgcttgcccgcgtgcacgcgctgatggatcaccaagctgatgtgcaggcggaagctcttcttgcactcggggcacgtgtagggccgctcacccgtgtgcgtgatctggtgtttggtcaggctggacttgtggctgaagctgctgtcgcactcggggcacttgtagggcttagggccaccgccgccgctaccagagctgggtgacttgggacgcggcttgaacgcgtgcttggggttgaacgtgggcccgcgttcgggtgagacgcagcctccgcgcacgcatggatgcgctggtgcagcgtgacttntagcttgtgccggaagctgatctcgcattcggcgcactcgtagggca

SEQ ID NO: 91877 - DNA, 806 bp, Homo Sapiens
aataagctgcacagtagtacactcccttaatacaccaggccattcttggacggtggattagcagggggaattttgaaactggaggggatgccaactggaacagaactaatgaagtccagatctttcccagacaatggtagaacccacaggactcccttaagattgggccccaaatactagtttagaaaaaggtaaataaacctacgtttacttaagagtacagccagcttagttactggctagtggacatatttcagaccaaatctaagtggagagaaaaacagaccaggagagaaagcgaagttacaaggaaatggaactagagaaacctcacaaagggataaaggaggtaattaaaggttaaagccagatagcctcgagctcaaaggagaaatattggaggccagataggaaagtgccttcctactcagggggttatggatccagggtggctaaagaatagaagtagagttccacccagggccagagggaacaatctgggattcagacacagcagtggtgccaacgtgaatctacctcgtgctagagtctgagtagcctagtctatcacccaacacagataagactggacaggggctcccaggaaccaacatctaagaagggagtttggagaggggctaaaagaaagcaggttaagccccaaatgtaactgaatgatgaccagggataactatttactagtgcttttatgatttattgtaactctgtaactttcccagtatttgttaattttttaacttctgtttctcctgtacttacgagcagtaaaagttgttcaaaacata

SEQ ID NO: 91878 - DNA, 486 bp, Homo Sapiens
tttcatttatttcaaagcaaaggggatgagtgtggcatttggttcagcatggagcacagagaagggaactggcataggagatgtgaggttatggaatgaagatggagtgagttttcccacaagctgaaagcaggagccaggcctgaaccgacagtaatccctgagaagatacagatatctcagggaagacagagaacagagggtctgtgctgacatctgggttgtattagtacgaggttgttattgttattattctccactggggagccaaagagaacacatacagcacagctcccaaatacatcaaaggcatgggggaccccttatctctgggggatggatttgtgagaggtatcattgccagctctcaatatgcccctaagaatcactaacttttattcctactcaggacccagggtaagaagggtgggaaatgttgccgtttcccggggctgacatgctggtagctaggaacatctcatacca

SEQ ID NO: 91879 - DNA, 481 bp, Homo Sapiens
tttcagtagattattcaatatgatttggtttaatgatggttaaataaaacaatggaacagaaaaagagtccagaaacttatccacacctacacagtcgcttaaatagtgacaaaggctccagcacagtgcaatggagtaggatggtctttttcataaattatgctggatcaattgattattcatacagaaaaattgctaactttaacctagcattgttatataaggcattctaaatggcattgcttctgttcattatttctgttttctgcaagataaactttctttatgatcaggtatattgaccctgctttctaagttcaaaaggttttttacacacatctctttctattttgggctttttatagtgttatgtttaagagcctgagttctgggatcagaatgcctggattaaattaacatctccagacttactagctatctgaccttggtgcaagttatttaatctctctgtgcttcaag

SEQ ID NO: 91880 - DNA, 527 bp, Homo Sapiens
tctcctgctcggcggaacgaggataacccagtagagccggacccaggggcaagaaagtttcccagatcaaatggaaatgatcaagttgaaagtcaagaagaaaagaaagttcagagatgccaagggacatcaaaaggaaaaatgtctagaagtcaacaagcataggagcaacttagctgtcctaaggattgtcccatatcaagtagctcagctccagatgttcggaagaggcattggttgtactgttttctcaccggatcagatggctttcagataatctgctcctggccccaggagggaagagggctgtaatggagtcttgagaacacctcctttccctgccaaaggtagatcgttggccggagacaggatatgtgaagaaacttcagagaagggacaatacgttctattactacaacaaacagagggaatgtgatgacaaagaagtccacaaagtgaaaatttatgcttactagcctgtcttctttgtattacttgtcaattatattttaagtattcatcaaaaa

SEQ ID NO: 91881 - DNA, 549 bp, Homo Sapiens
aggagccgggagctcctgcagcttcatcgcgttactaagagacgcgagggtcgcgaagggcacaacacttggcctctcgctggccctgctcgcggatcccgagtagagaacgcaagcacccacgcccgcctgcaagctcccgggcgcccccggcctctcctgctcggcggaacgaggataacccagtagagccggacccaggggtagatcgttggccggagacaggatatgtgaagaaacttcagagaagggacaatacgttctattactacaacaaacagagggaatgtgatgacaaagaagtccacaaagtgaaaatttatgcttactagcctgtcttctttgtattacttgtcaattatattttaagtattcatcatttccttctacatcatgtgtttgtcatttgatgaaataattcaagatgcagtctgcagtttaatgttttgtgaaacacaaaagccatgagaattggtatctgctaatcaccttgtcctgttctaagaactggctgcagatgcattaaagttgtactttcttggtcaaaaa

SEQ ID NO: 91882 - DNA, 346 bp, Homo Sapiens
gtggactaattatacagttgtttagtgccttagtttttccctcctcagcatgtgtggatttatattggtgctaattgcatccaggtgttctaaacaccacagttaagcacaggcaaagagaaactagaaacacttcaaaatctgaaggtatattggggcagaattcattgaacattttctattgttgttggcttaaatggctctgtcttcagacttgagtgttttttaatgttaataactgaaaaatgttttctttttccaatgtaatcttgaaatttctaaaaattgggttattatcttgcagttcttgataaagaatagagtcagaaaaacataaactaaaaaa

SEQ ID NO: 91883 - DNA, 268 bp, Homo Sapiens
cattccccaggcctatttccatagatagctttttttgtttgtttccaacgaagctgctgttaaacgaaactgagaaaaactttgccccggaatagcactttaatagtcaaaaatgtgtttacctgtctgattgagtgagccttttggtgagctcagctgagatgtagagggagattgtaaaaggttaaatatacccacaccacccatgaaagtcactgtttaagttacatcatcctccaaataaagactgattctttaacaggaaaaa

SEQ ID NO: 91884 - DNA, 312 bp, Homo Sapiens
  misc_feature (75)..(160): n is a, c, g, or t
cagctacagttacatgaaatatacatacacggacatacatgtttttactcaataatttatgaccagcccgacttnnnnnnnnnnnnnnnnnnnnnnnnnnnnnnnnnnnnnnnnnnnnnnnnnnnnnnnnnnnnnnnnnnnnnnnnnnnnnnnnnnnnnnctatcagactcaaagtccacctcagccaccatcaccttgtcaacaacaacaaaggcctcgatgtgttgagcactttctgttgaccagacatcttctatgtaatatttcatttaccataacaagcccacaataaagatgtcattaacatcaaa

SEQ ID NO: 91885 - DNA, 403 bp, Homo Sapiens
ggcacgaggcctgagtgagtgaggggagggcgggtcccctcctggcttcaaattcaacccaatcagctctgccgatggtttgaaactgcacacgccgacccacccgccccgaagtctgaaagttatgccctggagacctgcgagctgcggagtgcagctggagagggagctgccccacgaggaggcctccagaataactcccggagtcggaacagcgctgggctgctgaagtttgcagcctccggatccgcgccccgccctgcagatccaccggatttcggggagggaatcggggggctgcccgtcctcccgtaaagctgacttgacaacaattacgaaagtttttaattagctccttgttataattcattttatttccagaactctccgaccataaattatt

SEQ ID NO: 91886 - DNA, 515 bp, Homo Sapiens
cagtatggagatgacactaacgtgatggggctcaagaatcagatggtagaagaccagctgggaggtgaagtctcagtaggctaggggcttaatgttcgatgcacaccagacttctgagactcaggaggtgggtgtggatctgtctgcccagtgcctctcatttacagcctggacaccctatttcttgaggtgaactactgaaggcttttgtacgacgtgtgtcaggcaagactctggccagaccctttgccatagtccatttgtaatgtatttccacatggcacaggtatctccacttttgcccatgctctcatgtggctcagaattattctccctactgccactcttctttgccaacacagaagatatttcaagatgtagccctaagcttctccatctaatcaataacatgagggctcatatgggaacattgtcacaggcttacaggaatatgttcttaaatatctgcttttttattactctgttcattaaattgacaaaaaaatcatcaaaaa

SEQ ID NO: 91887 - DNA, 1100 bp, Homo Sapiens
caggagagtctcacggctacctactctcgacagatctgacatgcctgcacgtgtcacagcctccagtgcaaaggtgagccccagccgtcttcccatagcagggagctctatactccaagtccacagtcacctctgccgctgatcctacggacatctgctgcaagactctctctatccacgcgcctccgctgcgcgcttcagtgcacgggcatccacttcaccctcttcctgggcctatcttcctgcaccacaccctccatcatcctgtccactatggacaagtttaatgtcaccaaaggtcccatccacaacatcagcgggactatccctggacagtgcttggcgcagagcgccacgggcagtgtggctgctgccccccaggaggcctgaggctgggtctcactgctctgaaaagacacaaccagaatggcctggggctcaggcccttggctgagtgggaatgcgttgggactgcccagctgagctatcaggtgcccatcttttctggtcccagcagtggtgaggagagcacaggcaggcctcgcccctcccttgctcacccagtttcccctccggcacaagcttccagctctgcagctggggtgacatccccagtggtttgtcgccaagaccatgtggtggacttttcgccccccaaactgatgagtccgggagaatatatggagagagagatgtaacaaggggaaggcctcctcccttctgagcacacacacaaccgataaccaaagagatgctgcagtccaggtctgaggtcccgctggcatccagctccctgctccatggccagtccctccccagcccagcagtccctccaggctacatccaggagtaagctatggggaacaggttgggaggtggccagtgctcctgccagctgtgcacacatctctgtatcccgctagagttctgtgtttttgtatcatgttgtcagggacgctagctgggtcagggttaccccatagcaggcagggacaaggaccactcataatatgcccattggaccacagttaagatccagccctctctcacctctttcagggctgaagtgccatgagtctgcaacctccagggcaggcctt

SEQ ID NO: 91888 - DNA, 484 bp, Homo Sapiens
cagtcgacggtaccggacatatgcccgggaattcggccattacggccgggggcccaggatggcggcgtcaagtggggcaatcgctggtggaggtggcggagagcaaggtggcagccgggagcccaccagaggaaaagtccgaggcgctggaaccctgcgtccaggcgtgacggtcatcccgaaaggccggccccagtttcatccttttatcctgtaatctgtcaccatgaccctgacaaaaggttccttcacctactccagtggggaggaatatcgtggcgagtggaaggagggtgagaaggacccctggggagtatccatgatgaacacttcatttgctggaggacaaatacatcaggatatatagccaactttatggatcttcattttcaactccaggatttaattccatatagtgcctgccattcctttattccattttaggattaaataaaggaatttgaacatgctatagataattcaa

SEQ ID NO: 91889 - DNA, 386 bp, Homo Sapiens
cagttttaaacatactgtttagtgaaaaataattcttttacaacaaaaacgattgttaccagcttcatataattaaaactgaaaaccaaattgtgtaacaggtagcataacatgtcagtttatattattttaaaaccaaatgttattccataatcatttatgcaacaaccccaaatttcaaacaatattgaacacaatacaaatttttcataaaacaaaacttttgggtctgagtaggcagtactggaatttaaactacaattaagagcctaaggggatgcttgctctattttaagtgattgtaacgcaggagtgtttaacagaaccacttgagcagctgtttcaaaacacatatacactccatctccagagatgttgatttagta

SEQ ID NO: 91890 - DNA, 238 bp, Homo Sapiens
atgtaatatacaatgtgaattaaaaatacctatagactagagtttacaacaaaatgtataaatatatgaatatatgtgaaaaaggcggtctatggaaacaagagaattgtgaatagaaaatacagataaaaaggaatatataataaaacacaggaattttgcagcctgaataaaaaactcctatgcaactgaggcccttaaaaatccattacttgggctgggtgtggtggttcacact

SEQ ID NO: 91891 - DNA, 972 bp, Homo Sapiens
  misc_feature (903)..(918): n is a, c, g, or t
cactgggggtacgaaatttccgtgcctcgttcaatgcggcaaagtttttgtatataagataagtacggtcttcatgtttatagtccaaatttgcaaaccctacaactctgggtgtcataggtctatttcaagggaagagagagaaaaacacccttactatcttggaaggcaatagtaacaaacagagcttttttcaaatagcaattgtacttttctacctgtacccttttacataaagtgtttaaagtttcagaaagatcttttattaagcatactttcacagaataacttgtttaaactatagttcatataaaaaagttaaacacgctttgttttcctgcctaaaacacgaaatacaactgccagtatgtatttttaatggaaccctattttataatggtacgttactgaatgtgtttcatatgcgtgaccgttaagatattatcatttaggtgaaggtttcaactcaaaaccacccaacccggtggttaacgatttaatacatataaccaaaccggcagcgtttagagttgggatatacatttaaacattttcctggttaaggttcccaagagagtgtaaaggttttagcagaaagcaaaatatcttgcatctttatggaagtttaaagcatgtttgcaaatattgcagcccattgaaagaatttgcatgtacaggaaagttgtggatggagacggtttgtggaattttaagtgctcattgtagtaaacttttgctttgtagatttgaaggtacagacttatacaggcaagttcacaaaatcatgattagttacaaacagtaaaatgaagttaaaataaattattattttctatttgatatgttttgatgtgattcctcattttgcagtggtgcctataaaataaaagccttttgcagtgnnnnnnnnnnnnnnnngggcgctcgcgacagacccggacgcgtgggtcgacgatatcccgggaattccgg

SEQ ID NO: 91892 - DNA, 277 bp, Homo Sapiens
ctatctccccttcctatgtgtgttagctctagaacaagagaagccttgttgagattcctggctgcccaccccccatcacctctctgactttgggcaagttgcctggcctctctcagcctttattttctttttgtgaaatggggataataatagtacttgcctcataggcaaaatgttgtgagaactaaacgagaaaatgcatgtaaagcacttggcacttagttctttttatgattataatgataatcagacacaataaattatgtctcacatcaaa

SEQ ID NO: 91893 - DNA, 250 bp, Homo Sapiens
tgaagtctgacggaaaaaaactatgtcagtttggttttcgcttactatgagggaagctgagcttcctcttccttgaatcttttgttcatatagtttggctattttcctttgggtgggatacctttcagaggtctccatttattcaaaacattgatcccatttaggtagcatcaaaaagtataaaataaatgtaaattttcaaagaaatgtatgcaacctttattaaaacctatgattttattttaggaca

SEQ ID NO: 91894 - DNA, 635 bp, Homo Sapiens
  misc_feature (53)..(63): n is a, c, g, or t
ttttgtgatataagaatttttattgcttaaaagaaaaacaggctaaatgtccnnnnnnnnnnnccttcaagtgtaaggaatctgagaaaaacagattttaaaaccaatagaaggaatggttatgatccagcagcaactgctgcatgtgggtgaagaaaagaacccagcattatttgtacaaatccataagggatgcagtgggaacagaaagaaacaaggaagtataggaaatagagaagaagggcactcagtgaagatgtaggcctcaaaaaatgttccatctaagcactgactgattccagtaccttaaggtgatctgctttaagctataaatcttctgagtggtttatgctctcaatgcttttttttcagaaggctcagatcttctgaatcagaattttagggtgaatgtgctcgatccatcccagcagaagcctgaggcaggggaggcatgatgtagtaaaggtactagaagaagtcctgtgtggctggagcagagaccggttgtctttaaactcttgattgtgatcctcataaataacaagagtttcatatcagctctcctgtctcttcctcctccacccttttcccctctttcacattgtgccaatcacacaggtggatgctcagtatca

SEQ ID NO: 91895 - DNA, 525 bp, Homo Sapiens
gcggccgcgcgctccaggccggtcgctcctccccccggctcccgggactgtggactccacgaccctgtcctcggccctgtccgcgccgaagcagcccgggactgcgcagcgccccgcgtgccgacatgggaaagtctctttctcatttgcctttgcattcaagcaaagaagatgcttatgatggagtcacatctgaaaacatgaggaatggactggttaatagtgaagtccataatgaagatggaagaaatggagatgtctctcagtttccatatgtggaatttacaggaagagatagtgtcacctgccctacttgtcagggaacaggaagaattcctagggggcaagaaaaccaactggtggcattgattccatatagtgatcagagattaaggccaagaagaacaaagctgtatgtgatggcttctgtgtgtgtctgtctactcctttctggattggctgtgtgtatccttttgcctcgctctatcgacgtgaaatacattggtgtaaaatcagcctatgtca

SEQ ID NO: 91896 - DNA, 642 bp, Homo Sapiens
tttgagattacttgaaagctataggtgacttcatcccacctccaaaatacatgcacatatgtctcaactttcacatacagtttcggggggttcacaggtttttaaaaaatccagtaaagaactcatgcacttgtgcttttccttgccactgtcttttcagtaaagagaacatccagccagccccctgcacaggcttcttcctccctcttcctgacagcagcctctgtgcttggccagactccactgagcccttcatttacagagtgggcagcccctcctcttcagttctggtgggcagagcaactttgcccctctctgtttctccttactggattagatggttatcatgtcttccaggagtttcccagccttccagagtgcaggcaaatccagtctccctccaggatgtcatcagaggcacccacattcttccacgatcatgtctttatggtgatctaggagcactctgccattatccacatacagcatgctcagcggcttggtcttcactggggcacaacaagtggaagggactcggtggggctggtaacgtttcagcagactctggatgtatgcatggttggtcggatgaaactcctccccaacaagattaggacactcgccctcacagcgataggcgtt

SEQ ID NO: 91897 - DNA, 1130 bp, Homo Sapiens
gggttaagtagcagtatgtattctagccaggggtcttctggatctagccagtccaaaaattcatcccagtctggggggaagccaggctcctctcccataaccaagcatggactgagcagtggctctagcagcaccaagatgaaacctcaaggaaagccatcatcacttatgaatccttctttaagtaaaccaaacatatccccttctcattcaaggccacctggaggctctgacaagcttgcctctccaatgaagcctgttcctggaactcctccatcctctaaagccaagtcccctatcagttcaggttctggtggttctcatatgtctggaactagttcaagctctggcatgaagtcatcttcagggttaggatcctcaggctcgttgtcccagaaaactcccccatcatctaattcctgtacggcatcttcctcctccttttcctcaagtggctcttccatgtcatccctctcagaaccagcatgggagttctaaaggaaaaatctcccagcagaaacaagaagccgtcccttgacagctgtcatagataaactgaagcatggggttgtcaccagtggccctgggggggaaaacccactggaccggccagatgggggtgagcacaaattcttccagccatcctatgtcctccaaacataacatgtcaggaggagagtttcagggcaagcgtgagaaaagtgataaagacaaatcaaaggtttccacctccgggagttcagtggattcttctaagaagacctcagagtcaaaaaatgtggggagcacaggtgtggcaaaaattatcatcagtaagcatgatggaggctcccctagcattaaagccaaagtgactttgcagaaacctggggaaagtagtggagaagggcttaggcctcaaatggcttcttctaaaaactatggctctccactcatcagtggttccactccaaagcatgagcgtggctctcccagccatagtaagtcaccagcatataccccccagaatctggacagtgaaagtgagtcaggctcctccatagcagagaaatcttatcagaatagtcccagctcagacgatggtatccgaccacttccagaatacagcacagagaaacataagaagcaca

SEQ ID NO: 91898 - DNA, 573 bp, Homo Sapiens
acttatctatagattcaataaaatcccaatgaaaatcccagctaaagttattttgtagatattaacaaactgattctaaagtttatatggagaggcaaaagacctagaataggtagctatcacagtattgaaggagaagaacaaagttggggaaggctgatatcaactatatgacattctgggaaagtaaaaaactatgtagacagtaataagatcactagttgcgagaaggctgggggaagaagtggcgaatagacagagcagagaggactttgaaggcagtggaactattctatgtgatactataatggtggatacagctcattacacatttgtccaaacccgtaaaatgtacaatacaaaactgaactctaatgtaaactatagactttgggtaataatgatgtcattgtgggctcattgattgtaacaaatgtactactttggtaggggtattgataatgggggaaagttatgcatgtgtggagaaaaggagtatctgggaaatcttggtacattcctctcaattttgctgtgaatctaaaactgactaaaaaataaagtcttaccaaa

SEQ ID NO: 91899 - DNA, 341 bp, Homo Sapiens
gctgatggagcccaggttcccccagcagtgcctggcactggtggggcaggataaatgtttgtgaaactaaatgggaacccaggtctcagcactgtgtcaggttctagaatcttctttgatgtctccatcctgcttgtttctcactcagcccttcgtctggcctgacatccacaagaatcccctacctcaatccctcctatttccagtgcccccatcccaccaggcctcgttgccctgggtcttgctctctgcagaccacaactgggcaggccctctttcacaccagctcctcaccaccctccaggtgaagccttcgttaaaaccgcattttctgtagaggc

SEQ ID NO: 91900 - DNA, 515 bp, Homo Sapiens
gtccagcagcgtatagacgagcccatgtctgcgatgtaactgcaccgcgctggggatccacctcccgccagggtgagggcgccgtcctccagcttatgctaggcaggcgcgccccgccctcctggtcacgtgaccacgcctacagccgaagaggatgggaaaatgcggccctgttcctgaacaggaagcggaagcaggaaggaactgagaacaccagcatctgctgccgccctgaatcagcgttagcatgtggaggcaacctcagcccccagtttttgaagaaggtgattcagattcagacacaggaattatggtgacggtagaaatggactggaaggttcgttccccttgcccaccaagactccagagcaggtgggttcttgatgtctactctgcatgaagccctgggctttccggccctccctacttttcctccgaattcacagcacagcggagccaaaatgtattcctgccaaaacgggcatttcccaaaagaaaatattgttttagaaaaa

SEQ ID NO: 91901 - DNA, 544 bp, Homo Sapiens
  misc_feature (182)..(182): n is a, c, g, or t
cgttttataacgaactttcttcttaggggtcaaccaagacaaatggaaatccagattgatccaaagcctccccttgagaattgtatgagttaagcatgaagtgttcatccacccaaattccagactacacctgagcctttccatgatgacatcccaacagaaagcattcactacagacagcnccattctgggccccaggacagctgtcttccacggattactgacagaggcctacaaaactctaaaagagagacaacgttcttccttgcccagaaaggaaccaataggcaagacaacgaggcagtgagcggtaggagctcatcacctcccagactcccagagagaaaataacctcgccaagccaatctttgacactggcaccttctcctcacaattttctctcttctcccaaaagatgatttaattttgccttcctaagattgctggtattctagctcttacctctatgttctttctcacgtctcctaaagacaaaattgtttaatttacatgattataaagatctgtttatgaaaatgaaaaa

SEQ ID NO: 91902 - DNA, 461 bp, Homo Sapiens
  misc_feature (35)..(35): n is a, c, g, or t
tgagccatgcatcctgcccacgacccccccagaanacacctacgcaccactctcctagccgccgcagacccgccagtctcgccgggaggaacccccagcgccgcggtacaaccacggcacttccgcccgccccccgcgcctcgggcgcaagcgtttggtgtgtctgcgtcgggggcggagcctcttgtccctctgcgcggcccgttccgcctctcttctcccaccgcctgtcggctgacgtgtctgcagttcctccgcgtctactgcgagtcaggccgtgatggcggacgcctgggaagagattaggcggttggcggccgacttccagcgggcgcagttcgccgaggccacgcagagatttgaagattggaagcaggcctgtaagagacaacagacttgaaatttgtgatgggatgatgtgtaccaattaaataaatgatttaagcatatgtaaacctaaa

SEQ ID NO: 91903 - DNA, 392 bp, Homo Sapiens
  misc_feature (234)..(313): n is a, c, g, or t
ttcagctatgcctagactttgggcaggtggacatctggggattgggatggcattcttaggtacaaggataacaggagaaaagtgaaaacactaaagcatgagaaaattagtaggacacgtatggggactttaaagcaagaaatatactttatcgacttcaaggttccatcaatttaattcaggatcattattttataaaccaaaagaaaaaatagtaattaaagttttactgannnnnnnnnnnnnnnnnnnnnnnnnnnnnnnnnnnnnnnnnnnnnnnnnnnnnnnnnnnnnnnnnnnnnnnnnnnnnnnnatgagaaacgactagtctttagtagataacaggtcagggattattgctaatcatctaaaacgcacaagagacctgccac

SEQ ID NO: 91904 - DNA, 359 bp, Homo Sapiens
aatccaacatgttcatttgggtttgcttacttgaccctgtggagatccccacagccattgggcatcctaggtgaatttggccttggttgggctctgccaaagactaatggactaaaatgtgaaacagcctcttgccctgtacctttccttcccattaggacatcctttaaattataagcaacctttttgaaaagagctatgaaggtgtatgagcccatccttttattcattgactctaagagtcaaattttctagtgcatatcctattgccagcataaggatgaggagggggaaagggtcttaattctatgtacagcagagacattaaacttgctgtgtccgggctgcatcatcttaaa

SEQ ID NO: 91905 - DNA, 575 bp, Homo Sapiens
aagaggaaagagcaagtaccagactggtgacttcatctttgaggagatgacccaaaagttgcacaaaagcactttcactcttatcatattatactgaaatcacatggccatacctagctgtaaaaaaggctgagaaataaagtctccagttgagtgtccaagtggctggctaactaaatatcaaggatgggagatatatggggttgattcctttactaaaaggtaaaagggatgactgaattcagggagaaaattactagattctgttatataatatgaacaaaatcctaggaagaaccaaataggcggtagtccattgggtcaggaaaagcttgaccaagtatctgagctatgttttgagagatgaataaaattccactgcaaaatgaagggcaataagtataacagtagttggaaaggtgcctggcagagcaggagccatagattcatctctatatgcctaatactttgcatagtaatgggcaaaataataagcattcaacaaacatttgctgaagtaatgaatgaaactggcttttgcttaagtgaataatcacattatttgtaaactaagg

SEQ ID NO: 91906 - DNA, 874 bp, Homo Sapiens
gcactgactagtaggagggcccgccggaggagagccgcgcggcccacagaagcggaacgcgcgtcgagagcgccctgtccgctcgccccagacagatgcccggttattcattaccgcgaggcctagaggaaagagtggctgccgtcttcctgcccacagcccgccggaccctccgtcgcggctgcccggtccccggagccgcagccgccgagcccggctgtgcgtgtcgtggctgctggggagaaacgaggcttccggacatgctctggagtcagaagacagcgaaaagagaagcagaagccccggtggcaagagtctgaagcaggaaggatgactgtagcctgtggattgtactgcagtaggaaactgtcctagcaaggctccactttgccccagcttcaagctggaaaggaggagaacatgaaacattgcttgcaagacaatggccgagacagcaggtcccaccctgcacagccaccagcatctctcccctcagccctgtctcctcttctgcagttgggatctgcacatttaagcctgaacattgtcctgtgaagtgaagtatgatcggacagcctcttttcagcttttatgacaatggagacagaggaattgtggctcttgccaaggtcacaggattggaatacagagccaagccaccccaggacatgcaagagcctcagaagggaaaacaagcccagcaggacagggagaacaagtagcctcttgtcctgaagttgtaacagccaggggccaggatggacgacgagaaccccataatctgcccatctgggacttggcaggggacctgggaaaatgtaccccaacccatcccttaagggcctttgtctttggcccattggcatagcaaaaa

SEQ ID NO: 91907 - DNA, 632 bp, Homo Sapiens
gaaccacgggccacttgcaaatcattagaagagaactaaaaagagaaagaatctgctttaaggttagcagaccaaaatacactgtcaagagccaaagtaatcaatgaactgaggcttcgattgcctgccactgcagaaagagaaaagctcatagctgagctaggcagaaaagagatggaaccaaaatctcaccacacattgaaaaattgctcatcaaaccattgcaaacatccaagcaaggttaaatcaaaaagaagaagtattaaagaagtatcaacgtcttctagaaaaagccagagaggagcaaagagaaattgtgaagaaacatgaggaagaccttcatattcttcatcacagattagaactacaggctgatagttcactaaataaattcaaacaaacggcttgggatttaatgaaacagtctcccactccagttcctaccaacaagcattttattcgtctggctgagatggaacagacagtagcagaacaagatgactctctttcctcactcttggtcaaactaaagaaagtatcacaagatttggagagacaaagagaaatcactgaattaaaagtaaaagaatttgaaaatatcaaattacagcttcaagaaaaccatgaagatg

SEQ ID NO: 91908 - DNA, 504 bp, Homo Sapiens
cagataaaggctcagatttccaattccatcaacatggaggactgagcacgtgcagaatcttctcccattacacatacataaatatggtgaattaaagatttgtaggtacctgaaacataaaaggtatttaaaatcacagcaatagactactgcttacgacacatagccaaaggaacttacacttgagcaaagtcctcaagggaaggggctgtcattttaatccctgggcagagatgagagacaattgccttgtgcccatgtgagaagtaaaatatttgcatcaagctggaattcttaaaggtttgcacaggctacaaaaggagactgaacaatcccaccagcctgcccagagaagttacaaggacgcttgctctccgcccaagctctgggatggaggggaaaaaaactctcatctaaaataaaggtctcaactctgtgccgaatttgagtgtggagtctgaatttactctgcccacaaagcaggaaacctgccaacaaataatt

SEQ ID NO: 91909 - DNA, 970 bp, Homo Sapiens
cctggggacagcaagacctccgctcaggcccctctttcgaatgctccacgccctcctgcgatctagaatgattcagggcaggatcctgctcctgaccatctgcgctgccggcattggtgggacttttcagtttggctataacctctctatcatcaatgccccgaccttgcacattcaggaattcaccaatgagacatggcaggcgcgtactggagagccactgcccgatcacctagtcctgcttatgtggtccctcatcgtgtctctgtatcccctgggaggcctctttggagcactgcttgcaggtcccttggccatcacgctgggaaggaagaagtccctcctggtgaataacatctttgtggtgtcagcagcaatcctgtttggattcagccgcaaagcaggctcctttgagatgatcatgctgggaagactgctcgtgggagtcaatgcaggtgtgagcatgaacatccagcccatgtacctgggggagagcgcccctaaggagctccgaggagctgtggccatgagctcagccatctttacggctctggggatcgtgatgggacaggtggtcggactcagcactacggcggctccggggctccggggacttggcaggggagctggaggagctggaggaggagcgcgctgcctgccagggctgccgtgcccggcgcccatgggagctgttccagcatcgggccctgaggagacaggtgacaagcctcgtggttctgggcagtgccatggagctctgcgggaatgactcggtgtacgcctacgcctcctccgtgttccggaaggcaggagtgccggaagcgaagatccagtacgcgatcatcgggactgggagctgcgagctgctcacggcggttgttagtgtgagtctggagggtgcccttcctccaccagccctgtggggagggacccccaggtcctatgcattaaaccagtttacactccaaaa

SEQ ID NO: 91910 - DNA, 550 bp, Homo Sapiens
gtaccctggtcccatgcacagttggaggaggagcgcgcttgcttgccatgctgcgtgcccggcgccattggagctgtccagcatctgggccctgatggagacatggtgacaagcctcgtggttctgggcagtgccatggagctctgcgggaatgactcggtgtacgcctacgcctcctccgtgttccggaaggcaggagtgctggaagcgaagatccagtacgcgatcatcgggactgggagctgcgagctgctcacggcggttgtaagttgtgtggtaatcgagagggtgggtcggcgcgtgctgctcatcggtgggtacagcctgatgacctgctgggggagcatcttcactgtggccctgtgcctgcagagctccttcccctggacactctacctggccatggcctgcatctttgccttcatcctcagctttggcattggccctgccgggagtgacggggatcctggccacagagctgtttgaccagatggcaggcctgcttgctgcatgtctgcgggcgccatgtggtcatgctcatcctggtcgg

SEQ ID NO: 91911 - DNA, 330 bp, Homo Sapiens
gttagaaccgcactttaactagaagcctcatgacagatgtgttgtatgtggtgctggcggagaagactggggagaaggaggggcagaaacacttgctgggatttccacagaacttctgaaaactactggggaagaaaagctagtgccccgtctccagtgtgggagaggcattgcagaaggtggcagctcatggccagcccacagcgttcttgccagttcctctagaacaggggtgtccaatcttttggcttccctggccacattggaagtagaaaaatttcttggtcacgcataaaatgcactaacactaatgatagcttataagcaaaa

SEQ ID NO: 91912 - DNA, 447 bp, Homo Sapiens
aatttaaactttcctacaccagaatcagcttgagagaagaacctagttgccaccccagccagacactcccttgcaccatatttgcttgtctaatgatgtacttgcttagaagttccaggggctaatcttgaaataaaccaggcatagagatccagttgtggaagtctcccccacctagaaattgcctcaaggtggttaatctacaacccaaccattgtcaaaatggccccagttcatactacaggtggacaacaactcaaaatagccattggagcaagatatgccgacctccatcctgcaccactcccacaagcttcccataccaagtttcccttcccaacccccttcgcttagcctgaaaatttgagatggttctttgagacctaagtccagccattcttctcaatggctagcctttgaataaaactgctttacatccattccaaa

SEQ ID NO: 91913 - DNA, 950 bp, Homo Sapiens
aaaagctcaagaggagaacaagaaaatcgtactggctggatgcgttcctcaagcccagcctcgccaggactaccttaagggactgagtatcattggggttcagcagatagatcgtgtggtagaagttgtggaggagacaattaaaggtcactctgtgagactgctgggtcagaaaaaggataatggaaggcggcttgggggagcacgattggatttgccgaagattaggaagaatccactgatagaaatcatttccatcaataccgggtgtctcaatgcttgtacctactgcaaaactaaacacgccagaggaaatttggccagttatccaattgatgaactagtagatagagccaaacaatcttttcaagagggtgtttgtgagatatggttgaccagtgaagacacgggggcttatggcagagatattggcaccaatctccccacactcctgtggaaactggttgaagtgattcctgagggagcaatgctgaggcttggcatgacaaatccgccctatattttagagcatctggaggaaatggcaaaaatccttaatcaccccagagtctacgcttttctgcacataccagtccagtctgcctccgacagcgtactcatggaaatgaaaagagaatactgtgtggctgacttcaaaaagagtagtggattttctgaagagaaagttcctgaatactatgctacgatatcatctgtgggttcctggacgaaaccgatcagatttcagaacagtgaacctgttgacgagtcaattccagccgttttaccaattaccagacagaacctgctgcaaatggcacgtccgcgtgaaagcacggcaagatctccgggtcctacgccatacccatgtggaacatggttccgcaactttctttttgccacactaagttccacgccggggtcccacagaaacctcgagaaacgagcag

SEQ ID NO: 91914 - DNA, 451 bp, Homo Sapiens
tttaatgcagacacgggtttctagatacttacattagaagatgatggtactggctctaaaaatgtgtaattttccttcaaaaatttaatattatctgcttggatgtatatccaagtgtatatattcactaatattttaacagtcaataatctgtcacttttggaagcataaaggtcataaagaaaaattaatcggagccaactacctaggcactaagtataagagagaagataagaatgaaagtagctaagaaacaatgtctccagataagaaagagggggcaaatgccctcaggcagaagaacagaatgatgctgctgggggaaaaacagaactaatcatattcctccctgtgttgcccactagatgttgctatcaaccagaacagcttggctgctgctgaggttaggtgggcacaagcagagggaaagaagggtgtgaaacgtctgcaa

SEQ ID NO: 91915 - DNA, 624 bp, Homo Sapiens
  misc_feature (86)..(86): n is a, c, g, or t
  misc_feature (114)..(115): n is a, c, g, or t
  misc_feature (117)..(117): n is a, c, g, or t
  misc_feature (130)..(132): n is a, c, g, or t
  misc_feature (173)..(173): n is a, c, g, or t
  misc_feature (191)..(191): n is a, c, g, or t
atactcttctgatagtacgagctctacggtagagacagcaaagaagacttagcaggtaccgggggttctgtatgaaaagaggcccnaattagtttccaacggccggtccaatanntngtggtacactttnnntgtagcgcacaggccattttggctctgagtacccattgagncaagtagatccctcttcncgaggagaggccttgggatccagacaggctctctctgaggaagacgctggcctggggtcactcattttcacggaaagggtgtgctggcgggatgggtggaagggcctggggccccggcagcccattgcggaggttttctcgggagatggtgggtatgggactaagggtgaaagggaagttgtgagttgggtaagaaaggcctgaggatctggcaggggaaggcggcacacctgggtgtgtctcccagaggaaggcctgtggagccctggcttcaggagacagaagagaggattaacggtagaagctctttcatgttagaaaataaaacaatatagctaagggattatttggttgtaaaatccaacaccattaataaaactgttatattctgactccttcctcattaaatccacatgaaaagacatgtgaccta

SEQ ID NO: 91916 - DNA, 576 bp, Homo Sapiens
tgccctgtcccaggcctccctctcagagcttgccccagggactctctggccctcagggttcaatgtattctgaccaaggccaagctttcctggggctcagggaaaatcacactttgctacccgaagctgtatcccctcagatgccaggaaggccgtgatcatctgactccaccctcctgagacacattctctccctgactgtcctgttctaagtcagcggagcaccttaggatggaggggtggaggcgaggccagatgcagcctctgtgaacaggtgcctggaggctgggaaatgaccctgagagggcaggacacagcaaccgtgggcttaaggtgaccttgagagcaagcttggcccactttacaattctgttcagagccagcccctaacatggtggtcatttattcatttgttccctcattttaaaaaatgtaaggccaccgcgcccggccaagaagcccagattttaacagatcatttcatgtgttttcttgatttgctttaaatccatgaattattatccaaaaggtcatttaggtataagataaatagtctttgaaaggtaaagaccgtcg

SEQ ID NO: 91917 - DNA, 497 bp, Homo Sapiens
ctaaacccagcagaagagaaagtttaagaaagcggtcgtcgccaataccaaaattagctatgatattcaggaagaaaaaaatggaaacacgataaccacagtcaataaagaccaaggccacattccattgaccagagctcagccacgcgccacacctggctaaagagactctggctgaagaattccctgaatattttaatgtagctctaggttataacacagaacaaccacaaggtggcagaagaactccattcttgtaaatctcttagtggcttctttatttcatcttccctattccatctaatgttccctgaattttactattttgttggtttgaaaatatgtgtgacttacgtcctttaaaggatttggttcgtaaggttttgaatagactggaatataaaacatttatagaaaagaaaaatacctacagtatgatgttagtgaactattaataatccaattaaataaaatatatttgctttggattaataaaa

SEQ ID NO: 91918 - DNA, 493 bp, Homo Sapiens
  misc_feature (147)..(166): n is a, c, g, or t
gcggccgcgaccaccctgaagggcaccgctttcccagtgcggtcggtggtggcctcccctcgcccggtgaaggggaaagcgggccgggagacggccaggctgcggctccagcgcctgcccgcggctcaggccgaggacacgggagannnnnnnnnnnnnnnnnnnnaggagcccctgctgccagtgcctgaggatgaagaggaggcgcagcccctgcccccagtctgcgtgtcccgtatgagggggatgtggcgggacgagaaggtgtcgctgtattgcgacgaagtgctgcaggactgtaaggcagaagatgctgatgaagttatgggtaaatacctatcagaaaaattaaagttgaaagacaaatggcttggagtctggaagactaatcccagtgtattctgtgtgaaatatgaagaagcttctatcccttttgttggtatattggttgaggtaacttgtgaaccataccaagactcatcatctcggttca

SEQ ID NO: 91919 - DNA, 500 bp, Homo Sapiens
  misc_feature (500)..(500): n is a, c, g, or t
agtctctttttccttgaattaaattgcagctgttcagaaaatttctcttccagggcactgtcacataccttttggaatataaattgttacaagctttcctgaggaagcttaaaagcttttataccctttgacctgtagttctactcctagggaatttccctgaggaaccaacaattcctgtaactgtcttacagaattagttaagaagatacatatacatataaaaagaggataactttaataaaaaaaataggtgtaacagaatttactaatcaaatcgtaagttaatgattagataaattatgccaagtatatatgctggagatgatgtattgtatacaaagaatttttaatgacatggaaaactgctatgtgtaatggtaaaatgaagcaagatacagaactgcttatacaacatggtcagtaaaaaaatgctataggtacatatctctatgtctatatagaaatagaaaaaaaatgcctctgatattcagagtacn

SEQ ID NO: 91920 - DNA, 435 bp, Homo Sapiens
tgagccagtcttaccttctccagacaccctctctcttagcaggttttttattgttggtttttgtcagccaaaatatttgtgagtctccataactgaatgtgatcccttcttctagggatgctggtgctttacttgcaagatggatatggtgatagtagaatctcaggcactgtaatgagcctggctactatggaaagaacttcagcatgagcaggagtctaatctggcattgctaggacttttggtagccatgatataaaacagttgcagagtaggcttgtcccagcggggaaatctggaagggcttcgtggcagtgacatttactaggcccttgaggactgtgaggattttgcctagcagagagagggcaggtagagaccactgtgatcctggaagcttttgaccctgtttggaatacaaatttataccaaaaa

SEQ ID NO: 91921 - DNA, 469 bp, Homo Sapiens
agacaggaaaacttcacgttggcctggaaacttcttccaggctaagcctgagtcttcaccagacactgcagcacgaaggcccttctgccttttggctcgccctggcccagaatgcgcaccagccggcaagagaaagaggcccactgcaatatgctgtgaagaatacataagaagtcaaactgttgacctcttttccccagcccgttccaaaactacatccctgaggagttgtgcacctctacggaaagttcagatgaaagagctaattccccttgatctctcttcttgttcagagtggaggaaaaacatataccatcccttccatcaatcctcagcataactttgccagggacactggtaacaagctacttttacctcagaagttggagagtatcacttgacccacattgtgtatgtgtaaatatctttattcagtgtatatacaatatattcttaatttgaaaaaaaa

SEQ ID NO: 91922 - DNA, 493 bp, Homo Sapiens
ttgtaaagttcttcagtgatttaaatgtgtatctgccatgtgtaatgggatgtttctacagagtaaacggatagacctttcaaagtggctataaaatgaatgactaggagtgacattcataactgcattgctgatagtaataggtaatgttaaagcctttgtctttgtcaaacagaatcaatcttgttaaattagaaatgaggagtgatcctgtaaggtgtatacctatcatatctaaggcatacacacacaagcctcacttccttctttttctccctgactctcttacgagtgctcctaaactcataagcatttctcttaagggaatgtccttggaactccagcagtatctctcttacttcagtttaccacctgctgggctctcagcttctgtggttctggtaattcatgtaacaggaagcccaaggtgatttttaaatagcaacatccaatatattaataagaccatatattgaaaagctaagttttgaaa

SEQ ID NO: 91923 - DNA, 406 bp, Homo Sapiens
tctgcactagtcttgcctgtcctgatcttcctggggtgcgcgcactccttcagcgtgtcctggttttaaaagactaacccatccggatgggcctgaactcaagaagcaactattctaagctagactgagccttggcgtctccgcagcctgggaagctcggatagagctctttgaagaaggcggctgcaagccagtctccgaaccccaggggacttttgggcaagggagccggtggaagcagaaggaagaagatgcgctgagagtcctcacaactgcgtctccggaggcagaacgaagtggggacttcagacaatcaagcgtcatccttgctccccctccccacacggaaccctgcgattatggcaagagaaaactggtttgagcttgagaaaatttcaaaaaaaat

SEQ ID NO: 91924 - DNA, 375 bp, Homo Sapiens
actccgaccccaccgcaggttgtactgggccccacgttccctgaggagatgggagagacccagtctgagtactcagattctagctgtggtgagaaaccctatcgttgcaacatctgtggggcccagttcaaccggccagccaacctgaaaacccacactcgaattcactctggagagaagccctacaaatgcgaaacctgcggagccagatttgtacaggtggcccacctccgtgcccatgtgcttatccacactggtgagaagccctatccctgtgaaatctgtggcacccgtttccggcaccttcagactctgaagagccacctgcgaatccacacaggagagaaaccttaccattgtgagaagtacaacctg

SEQ ID NO: 91925 - DNA, 669 bp, Homo Sapiens
  misc_feature (65)..(65): n is a, c, g, or t
  misc_feature (107)..(109): n is a, c, g, or t
  misc_feature (179)..(188): n is a, c, g, or t
tgagggaatacggtcaaagtggggacagggatttccagctggtcaggagctccaccaatctaaanaccacagcctgccgaaatataatgctgatttttttcacagannnatagtttttttgtttgaaaggggttacacatatagcttatatatatttattcttaaagtacaaaattatnnnnnnnnnnacatacacacacacacatcacttatagttaataagtatggttatctagtgctgaatacatctgaacataaagggtgagcagtggtgggaaaagactgagaagtcaggagggttggtcagctgcatccactgaagattccatgttgctggtggaagtctccccctcctgccactggtgagaaaaatggctcagactgttgcttcttcactttaaaaagtttggtggagctcttgtttgccaacagtagcctatggtggcacttgtcttaaattgtgtatcatgcttttcctgctccctccctgcagtggcatagcatgttaataaagatctaactaaaaagtgcacaagggttcaaaggcacctagaacaaaagaagtcacaacacagttcagtaatcagtgctttccacagtgacatcaagttgccaagaaaagataaaattataagcacaccacagtattctggcttaatgagcacagaa

SEQ ID NO: 91926 - DNA, 465 bp, Homo Sapiens
caataaatgtgaaaacctagatgaaacctggggcaaagcctgccgtgtattcccaaatgatttcccttccttctgggcacacagccctgttacacttcccattctcccatggattcatctgcagccaggtgcctaagttctggctaatgaaatgtgggtggcagttaagttcaccacctccaggcccagcctgtaaaagctaaccccgcagcgcccccatgctgtccgcagggaagaatgctggatacagaagcgccagtggaggactctgagctcttaatgctcccacaagatgggagagttctggctctcagagcccttccccagcccacgacggacaatgtcaagagcgggaaataaacttcattgtgttaagccactgatatttttgggtttgattggtatatcaattacctccctaatgtaaaatggatatgtttcttaaaaaaacacaagtattgttgc

SEQ ID NO: 91927 - DNA, 1148 bp, Homo Sapiens
  misc_feature (94)..(128): n is a, c, g, or t
  misc_feature (179)..(317): n is a, c, g, or t
  misc_feature (323)..(370): n is a, c, g, or t
  misc_feature (436)..(633): n is a, c, g, or t
cagatactgacccatcccataagtgggcggcaattcgccgttttgttttgcgaacgaccgagcgcagcggagttgtgagcgaggaagcggccgnnnnnnnnnnnnnnnnnnnnnnnnnnnnnnnnnnncagtcgacggtaccggacatatgcccgggaattcggccattacggccgggnnnnnnnnnnnnnnnnnnnnnnnnnnnnnnnnnnnnnnnnnnnnnnnnnnnnnnnnnnnnnnnnnnnnnnnnnnnnnnnnnnnnnnnnnnnnnnnnnnnnnnnnnnnnnnnnnnnnnnnnnnnnnnnnnnnnnnnnnnncagccnnnnnnnnnnnnnnnnnnnnnnnnnnnnnnnnnnnnnnnnnnnnnnnngagatgaaatttcgctcttgttgcccaggctggagtgcaatggtgcagccttggctcagtgaaacnnnnnnnnnnnnnnnnnnnnnnnnnnnnnnnnnnnnnnnnnnnnnnnnnnnnnnnnnnnnnnnnnnnnnnnnnnnnnnnnnnnnnnnnnnnnnnnnnnnnnnnnnnnnnnnnnnnnnnnnnnnnnnnnnnnnnnnnnnnnnnnnnnnnnnnnnnnnnnnnnnnnnnnnnnnnnnnnnnnnnnnnnnnnnnnnnnnnnntgagccactgcgcctagccgtcacatttctaaacaagcatgaaaggggttcatttttgtcttcttcttgcctgccgtcagcatggtggaaatggctctgcctatgctcatgcttctggtgcccaatgccttgcactgtgccattcaacactatgaagagaaacaagtagccacacctcaaaataatgtggctgtcaacatggcctaaataaacctacacaaaccagtacttgccttttgctggaaacattgattatgtgctcctcacgtagtagaaagcggtatcctgattagtctaacagttgtgttagactttagggccagtattgtcagcatttatttatttatgtacctttgttatgatgggatatttttcatttgaaacttgttcataaaaatgtcaatgacattgatgactgatttgtacatatttttcatatagttttgtttaaaaaataattcatgcaaaatcttgaagtcatttttgctattgaaataaaccttaattaaaataaa

SEQ ID NO: 91928 - DNA, 1491 bp, Homo Sapiens
agctgatgaggactcctcctaacgtgtgctgttagtttgtttctgagggtagcgacgctgatattttccacaaaagtccagtaagttacaaactagaggagaagcaactctaacagggccaccccttccgtgcaaagccctgctgcagctctggacagcccccaactaaaagggactgcctttcaacttgaaatctaacattgaccactggaaatatgaacgtgtttctattatgagatgaatgtgacgggattaaatggccttgattagttatcttacccttggtcttaaaaatttgttatcggttttcttcattgtaggtgtttattaataccagtaaaaacagattatcacacatcttccataaaatgattgtgatagaaatgtcactgagtgtgtacgatgatacgccacctgcagcagcatcctggaatattacatcattctaagtgcagtacagagcagctgggttcaaatccaacttgactggtgtgggctcccacaaaagctcattctcagttaaggatgcagaaggagatgaacttttgctaaacccaagagctgaagatgctgccgtggaagcccgatttcgcttcttcagtggtttacatgcatcagacagatttttcgttgctgcctggctcttgagcgaggaggctgcctccatggccttgtaagagcttgttctggccgttttgtcagtgattgtgtctctcttccgaagactgtgcttgtccgtcctgagtcttttcctgggtgtgtcctcagcttcagcatcttctgtagggtcctgtatcctctttgtgtggtttctttttttcccatttacattaccagagtcttcttcagcctggacaggggccaccagggcaaacttggtgttgtagcgtgctctctgcttctcactcagcagactccactgtgacctgagcagctcttcaatctcctcacctgaagcatctgggtgctcagctaccacctcatccctgtgtttttgacagaagaccaaaaactgggatgctgcatctcccttcctgcttcgtggcatggagactgtggtcttcttcctcccaggaggagaccctactcctcttctggggtcagcctctgccgtcttttgaggagtactcttccctatgtcggggtgactctccagggtctctgcagagctacacagtttggccctccgccttctcttcatgggaatgcactcttctctcacagacttggggttttcagcagcttcttcactgactcctgaggattctgccatttctcccaaagactctgcagcaatgccagcctccttggctacttgagggttgagatgaagctggtcccccacatagagaaaggtgaacttggctttccgctcctccactgacatgcttgcagcttcttctgcttgaacaatgcccatttcccactgggccctcaatttccctgaaattggtttcaatagcttaattttctcagctttcgtgggtgcct

SEQ ID NO: 91929 - DNA, 485 bp, Homo Sapiens
gcggccgccacactcgagcccgggcccccggcacgtctaggccgcggcccatgggctccgccgcctgcccccggggagccttgccggagctcgcgccctgctgccagccccgcgagcagtcgcagccccacacgcgatgggacgcgggctgtgggattcagcaccccgggggcgaggaattcaggaccctcggcggggcaagggcctatagggttccgaactcgcaggagggtcgctcctaccctactcgctttttcccggcaccggaaggccccgcccactgctttgtttcctctccagaccgcgcattttgggtctcggaagaggttcagaggctgttgttgagcaatgcatgccaggtcagctgagctagcgggttatggatgcacggattcggaggccagctttttgacaaccttgtaaaggaatccctgcggcaccttttcgtgttaccaattggccggaaggggtcctccaatggccag

SEQ ID NO: 91930 - DNA, 828 bp, Homo Sapiens
gggccaccatggcggaccgcaggcggcggctccggccggggacgttggccccggtgcgcgagggcgtgaactgcaggtccagatgtttcacaaagcacaagaacgggctgaagttccccacctctctgcacagccggcagttggtatttccaagaaaggggctggacgacttcaggaagggctgcccgccttgcactggtctggtgactcaggtccctgtggagggctttctgccccagatttatcacagagctccccaactggccccaaagaagaggcagatcaagctgctcaaggaagcagacgtgctttccaagctctcgccagcccagcaggttcggaaggcattcctggaggacgtggaggcccacctgaccccacatcccttagcgctctacctgaatctggaagaagctatgcccatagagctcttatcaaaggtgctggaagtgcttgatcctgaccggaagctggaggacacatgggcttattgtcaggacaccaggaaaggaatgaaggaacccacgaagcttttaaaaaaacattctacccaagtctacctgggaccttccaagaagacgtctgtgtcaaacgcaggccaatggctttatgaagaaaagccacataaaatggatttgctccatgaaaatggtcctcgtcctggtcttcatgaaaatgtatgcaaagcagttagtgacttctgcaagtgggttactacttttgtaagttagtggtaatatttaaacctacttttaaatgtcaagctcaaagttgcttttattaaaaaacagtattggataaaatctaagtcaaatcctcataaaaaaa

SEQ ID NO: 91931 - DNA, 491 bp, Homo Sapiens
ttttcacaggggtcgaacacataacagtttatttcttacacttaaaaagtttactgcaagtccatcagcactccagtcaggtcccttctaaacagcgacctaaggacccaggttgcatccgtcttgtaagtatgccatttggaacatcttgctttcaggtcaccatgacaggcaaaagaaaactggagggtcatgcagaactttttacagtccaacatggaaatagaaaatcacttctgtttacaatccctctgcttgaagtagtcaaatggcattgcctaactacaagaggtttggaagtgaacaggagcagatagatacatgatgagctgtaaatgcttttgccatattctacaaataatataagcttataaaaagcattttaatgaacaattctgaaaaactctatatggatacaaaatatcccataaatgtaagtagtttttatcagcataaacatatatttttaggaaaaagccaaagttatgaag

SEQ ID NO: 91932 - DNA, 537 bp, Homo Sapiens
tggccatccagttcagggaccccctccctgcccagcaccaatgagggacagatgtgggcctccccagcacccaccctgattgacagcggggactccgtggtggccaagtatataaacaggttccgccaggctcagcccaccagtcgagaggagcgccagcctgcaggcccaaccccagctgacttttggtggctgcagtctgactctccagaccccagcagtcaaagtgcagcaggtacctctttcagtgccatccactactcccacccctaaacctttgctgatcaatgcccccagcagccactcctcctggccctcatacctcaactggggcttctcagcaggagccaacaaaccagaaggaagaccccatacagctgtccctactgcggtcaacgtgaccagtgcatcccatgctgtggctccccttcaggaaataaagcaggtgacatccccattcactccctgccttgggtgcctgaactgacaacaccagccctaggatagaattagaagatcaggagcagtggctcacac

SEQ ID NO: 91933 - DNA, 613 bp, Homo Sapiens
cacggtaacccctaccccagcccgcggccccagccattctccaggcctgggccgtcctcggagacgccggtgaataacttcccaccgccgcggaaccgggctcagcaaaccccctactgcctcgccccggtgcattgtgcttaatggacgttcgaaggagtcagccacccttgctgtgttctgagaggagcctggagaatgaaggagcccgggcactcaccctcagtggaccctcgcagtgggaggggggtgtcattcttctctcagaattaaggttaatagccgagttcgagttctcaccaaattaatttggggttggagctcagtaagactggttttcaggtaaccgacgagggaccgaaacggccattctgggttgcgtgttacggtgaacagcaaactgcatggatgtttgagcaccctcagtatctgtaactaaaaccctgaaatgcggtctcgctgattgagttgctaccctctggggagactaaaggtgctggactgggtctggtccctttaggagggtctgtgcttggtagaaagtaatcgtgtttcttccaggcagattgtgttgatgacatttaataagagacgtgtgtcctgaccaagtaaa

SEQ ID NO: 91934 - DNA, 465 bp, Homo Sapiens
gtgcacgaagctcccaaagagattatccctgaaaagaaagtgtcggtggtgcctcgtaaaaagcctgaagtcccacctgttaaagtgccagaagcttccaaagaggttatccgcgaagagaaagtgcccttggctcctcctaaagagcctgaagtcccacctgttaaagtaccagagcctcccaaagaagtagttcctgaaaagaaagcgccagtggctcctcctaaagagcctgaagtcccacctgttaaagtgcctgaggctcccaaagaagttgttcctgaaaagaaagtgccagtgcctcctcctaaaaagcctgaagtgccacccacaaaagtcccagaggtgccaaaggcagctgtcccagaaaagaagttgcctgaagctattcctcccaaaccggaaagtcctccccctgcagatttccagcgtttccattaaggttaagtaagcatctacaaacct

SEQ ID NO: 91935 - DNA, 506 bp, Homo Sapiens
  misc_feature (488)..(488): n is a, c, g, or t
tttgaattgccaagcacatgtcaacatttaatgtaatattcacaaagacaatgaaagcaggatacagtaaatatttttgtcccagaagtaagatggaaacaagttgtctaggggtgtcctaagatagagtgactttgtaaagctttgataatgtgtcgcaactttgtggcagggaaagcaaacatacgtattttatgtcattggttctggggcagagctcatgctaagcagaaaagctgacataattcctgttctgttgttcggctgccaaagtcttaggctaaaaagaggtggttactgttgaatgaattaagtcttccatgctcctaggattctggttcttccaggactgtgggaatttcaagaacctccacttttctaggtgttttaaactgttttccagagttgaatagcaacataaccttatgatcttccagtaccctcagagactcacatgtgtgcagagaagttcattgtgcaacagtgtngattgcaatctggttgtg

SEQ ID NO: 91936 - DNA, 486 bp, Homo Sapiens
taaagagcactgtggttaaaagtcagcttaattaaaagcagatattccagttctaacagcctgggactccttaggaaaaaagaggaagtgccacagatcccgttttggaataaacctctgttttactcatgaaacttcaggactaaaaagtagataagattcctctcaaaatctaaggctctgttccattttgcattccattatctgatattttttacttttgggggggtgacagaaattaatttgcattatgagagaactttggtgtgtaataactatataggaaatatacttttgaggacagctaatggcagttatggggaaatactcagctctgctctgcaggtttggatcagagaagcatgctcttagccacctaggaagtatggagatgtccccatcccccactgagagataacactcccatggggatgagctgattccctctttttgggatccaggatctggtataaaatgggaccctta

SEQ ID NO: 91937 - DNA, 646 bp, Homo Sapiens
gacatcaatcaaataccctggaaacgtggaaggcaggggaaagaacaaagggagagcaaaatcgccccaatcccacatcacccgcgacgtgaaaggatttgtccttccagctgcgggactcctatttgtttatttcaaccccgcgccagctccaggcacagccgttcagggtgatgccaaagggaaatgagaacgcctggtttcgagtgccagcctgaggccccttaagccctagcctggctccaaaaactgcagcctgtttccctcaacaaaaatgacgtcaagaatacctagatgtgaccacaccgaacttgcttgcccgttttgggaaacccaactttcttcctgaatagtcagaacctctggctttcctggtctcttaagaaccgcaaactattgaaaagcagatgcgtctttcagcctctttaataaatgcagtaaggagagttgggacagagttactttcagactgtggggctcccccgtgccaaagcattcagacgaaatgtgggggatagcggggggaaggcaggcaattatctgaatgttaaacagctgaatatttggaaaccccaatctttggctgatttttaaaaacctttttcacacgtgttctcatgtttaaaaaacgccttgaacagaaaaa

SEQ ID NO: 91938 - DNA, 498 bp, Homo Sapiens
cacacacacatgaactcagatttgcaaaccaggtttctgaaactttgggtaaggtgtatgcttttaactttgaaatgtataaacacccagcggaaacgtatacctttcagtgcatagtgcattgtgtgcttaccctgggttgtttaaacttgtgttcaaatattccccctccaagtgaaagcctgtcgggaattccacagtaacaactttactgttctcccattgatgatcatatacgttacctcttcctagcggtacatttgtatgatccttactactggaattaccgggttaaaaggaaatgcttaccactaagatgtcagtattctcctcatggatattttcagtctcaatgttgccagtctaatagtatagtatgtggttgctttactgctgttctccccacccccgtggagttgtgtcattattttaatgaatgtgagctcttgacttactctagaattctaatacagatactttctgcaatgattaaaaaaa

SEQ ID NO: 91939 - DNA, 750 bp, Homo Sapiens
  misc_feature (217)..(356): n is a, c, g, or t
ttgctgaataaatgcttctcggtttgttgtaatccctttgatcactctccagagactttgaatggttttctttgctaattttgaccagcttggtggatacctcttcaggagagaggtttccccaaactcctccaccactgctccagaaatccccagaagttcttgacatttcgtgagggcaaaacttagagcacaaggcatcagtggcttccttctnnnnnnnnnnnnnnnnnnnnnnnnnnnnnnnnnnnnnnnnnnnnnnnnnnnnnnnnnnnnnnnnnnnnnnnnnnnnnnnnnnnnnnnnnnnnnnnnnnnnnnnnnnnnnnnnnnnnnnnnnnnnnnnnnnnnnnnnnnnnaagttatcattattactattgtcattatttttaataatccacgagtttataacttcagagtgttggaatcataaccagttcacacaatacttttgtacaagttataaaaggcatttttcctcaggacaatttattatttgtctttcaaagtaattataataatataatgattttgttagaataagacaattttctatcaaattccataaaattattgaaataaatatacaaatccatagtatctacaatgttaacacctccctttaaggttggaatgtgcacagtcttgtggtatgtggcagttttgtgtgacaatatatgaccttgcagagtgcactaaaatcattcttatttccaacaagaataaaataaaggaaattattgatctagaaaa

SEQ ID NO: 91940 - DNA, 563 bp, Homo Sapiens
actcagaacgtagcataaagtcgtcactgctcccagctgggacgtggtgtcttggcatcccttcctgccgtccttgactctttcccatcttcagttctataattttctcccaaacaaatgctcttttagagttaacactaaagatctggtctttgccgtcaaggttgacagaacagctgttcatggtgtttgcggtgaaacccgtgttctctttcaatgcagtctgtggctttaacgtgtgtcctgtaatttcgccaagttcatttcttgcctctggtaacttgggggtggatttccttgggctctctaggtgtactgctatgtcagatgcaaaatgtcacccagcttcctgtcacatatccttgtctgtgcattcatgcatctacctcattccggttttctttctaatctcatgtattcctgttgtgaggaaatgtgttcttttcccgatccttttgtagttcatacacgtgacaattgggtttccacgcacgtgcatgagatgttcctccttcaaaccttgttactatgtcagcacattaactgcctggcatggaaaaaga

SEQ ID NO: 91941 - DNA, 402 bp, Homo Sapiens
aaattggaatcatcctgaacatctattgtttggcccgccttttcaaatgatttgaatgcttttctacaccacaaaatataattttcaaatgtgttgtctttcaaatgtgatttgtatgtggatgcataatgtttccttatatggatgtcactgtcatttatttgagcaatgtttatgcctagaaatgagacttgttggcaatgtgtatatagttggagcaaaatgtctgagtactttgaaaaatggtgtcagagcccaaatgacttggacatctccactctgagccaactggctcagtgttagtcacaactggaaaagggagatggagagaatgcctcacagactcatgaatgtgtttgtatgatgttattaacagagtaaattataaaatccagacctaaa

SEQ ID NO: 91942 - DNA, 541 bp, Homo Sapiens
  misc_feature (64)..(64): n is a, c, g, or t
cgggcacgaggcttgaatgtggctagaggagggcaggccggaggccaacatgcaggaaggtgcntgatgtacaagcccatactggccggaaggcaggcctgggtgaggacactctgttgttgagatgaaaatcccctgggggagagaggagaatagagggggcataaaagagagcacagccaggcacaacgcgcaggcgctgagtcaatgagaccctcctgcacatcacacaggtcagagacacggccgcaagcccctcctgtccacatgcccagagtttagagacaccaaggtctcagcatcacctagaacctctgagaagtcatctcttgatccccttgacaccaggacttcagagatgcccggtttcaaaagaagacaagcaagggggattcctcagtcaacacccattttcccctctctcccttgcccaccgaaagtgatttataagcacagcagaaatcaaaacaaacaagccatgcttggaaaacgaggatccacatgtgtaaataaacgggaactacagctcaaaggcaaaaaa

SEQ ID NO: 91943 - DNA, 470 bp, Homo Sapiens
caggatgtatcaatgcatgtcagatgggggtagataactttggggcaggttatcacaacctaagagttggtggagaaaacatgggaatgaattctagagaccacaaaatgaaaacttgaaagtgttactctttctcagcttaacgtttttaaatccaaaaaacaatttttacatttcttgggattcgaagagttgaacttcaggttgccgtggttacagtgtacagtatatattatcagtctgtaccagtagaccagtaccctaactactgaaaagaatatggcagttttccatttgtctagtttctgtatgtacaatttactatccaattaattacttaagtggatttcttgttcttttttaaaaacttattgctacattgataggcagaatagcttctgaaagtgaccagttttcaatttcataggaagaggtgactcattgaaaaatagctcaagcaaagtaagcta

SEQ ID NO: 91944 - DNA, 532 bp, Homo Sapiens
attagtcataaattcttctttcagtggcactgatctgtgtcatcactcagtcaaccgcataaattaagacctaggcacagaacaactctgtttctatttctataaaattctagaaaatgcaaactaaaccataatgacagagaatattagtggtttcctagggatgggatgtgggcaaagagagacgaaggaaggagggattaccaaggaggacagggaaacttcgggatgagggatatgctcattatcttgactggtgatggttttacaggtgggccaaaactaatcaaactttacacttcatctatatgaccagctatcatatgtcaattatacctcaataaagctgtttaaaaacatttagggtatatctactggaaagtaaaactttttaattatagactctatcatcacgtgcatagaaaaatccaaaggattctacaaacaagctactagaaccactgactgcatcaagatgcaggtacaaagttaatattcaaaatcaactatatttctatacaagagcaacaaa

SEQ ID NO: 91945 - DNA, 534 bp, Homo Sapiens
tcgggttcagtggcaaaggtgaagaccagcactgccgacctgggacctgggcctctcccgggcctggggaggacactggactttgaaggggaatgcagcctagaaggcctggaccctggagtcaggagatgctgctcccatccagtaagccctggctggagctcttctgggcaccaaccctggcataaaaccagtggtgcctctgggcctgcactcaacagtgcctctgatggagcaggttcagcttggttgtgacctctgctagaagccctccctggcctccctgtgcactgagctggtggttcctcctttgcgccccaggtacatgctcagatctgtgtaccctacactttgtcctccagcttcgtgtttggatgttcacaactcccatgagaagggcccccgagagctggcacagtgcatgtgtttcctctccagacttctacaaacctggcacataattgtttgctgaaagatggcatgttcctaaaacagaggaagtagaacctgaataaagcgaaatccaacttccca

SEQ ID NO: 91946 - DNA, 500 bp, Homo Sapiens
aagaatgtaaaatgaatccccaaatctagtttcctccaaagcacttcttaatgtaggaaatagtttttacaaaccctatgtcagtactaatgttcctgggtcaaacccagtaatattgttagtgtatgatgttacaccttatttaagaggcagagtggttttgagcaagtcagttaacgtgatttgatgaagaaataaggaattatatacatttagacagaagaatattttattttgaaaataggatttcgtgcaataatttttcttgcataacttagttcatataaatatgtacatctgtttttctggcagatgccttaaggtcatgtttttcagtatttgagtaaatctgtatgtagcaatgttctcattgatttcagaaaaaaatatattctttatattgttgccaggagaaatgtttttgtttatttaaaattattatggatattgtgttgttgtatcataactaactgcctcagcaacaataaatatgcagtaag

SEQ ID NO: 91947 - DNA, 819 bp, Homo Sapiens
  misc_feature (40)..(40): n is a, c, g, or t
  misc_feature (43)..(77): n is a, c, g, or t
  misc_feature (385)..(623): n is a, c, g, or t
aacgaccgagcgcagcggagtgtgtgagcgaggaagcggncgnnnnnnnnnnnnnnnnnnnnnnnnnnnnnnnnnnncagtcgacggtaccggacatatgcccgggaattcggccattacggccggggggaaggctgcgggcgtcctaccagtgccaggactgccagagcgggaggagcgcggcgcgggccagccgggactgctggacagcggggtccaggctagaggcgagcgagcggtcagtgacggctgtggaggagggaggcgctgggcgtcagcgcgggacccgagcctctggaccactgagctggggggctggctgaggtccacctcctaacaaattattggaaggaatatgagaaaaatggagtttcactcttgtcannnnnnnnnnnnnnnnnnnnnnnnnnnnnnnnnnnnnnnnnnnnnnnnnnnnnnnnnnnnnnnnnnnnnnnnnnnnnnnnnnnnnnnnnnnnnnnnnnnnnnnnnnnnnnnnnnnnnnnnnnnnnnnnnnnnnnnnnnnnnnnnnnnnnnnnnnnnnnnnnnnnnnnnnnnnnnnnnnnnnnnnnnnnnnnnnnnnnnnnnnnnnnnnnnnnnnnnnnnnnnnnnnnnnnnnnnnnnnnatgagccactgtgcctggctatacttatattttcttctgtgattttaatattttagtgttatgtttggtctatgatccattttgagtaaattttatattggtataaggtaggggtccaactttatttatttgagatggaggcttactctattgcccaggcagcatgcaatggtgcgatccagctcatgcaactctg

SEQ ID NO: 91948 - DNA, 543 bp, Homo Sapiens
ggaagataatactataattgggtattaaatcacgttttcattaccatttcatataatatagctattaaagtagtttgggatctgtgtctatgatatagtacacttaaattcaactacattcaatgtaatgataagacttagggatttaaaatagaatccaaagacaaacccaaatccagaacaaaccacaactaatttgctaagtcagcaaacaaatcagaagtaaatatttggcttaagtaaatagcaaatattttctcaaaaaatactaaaccaatgcaaggtagaatctaaaccggcaaatttctttaaaatactgaacacggcaaatgtacaatctctaatttacgcctaacttgcaagtcaacatttcattcagaatggagatatcacctatgctacaatcattatggtaaataaagttagttgatcttaatgaagagaataaaaagctaaacatgaccgaactttaccacctgactttcatctttaccaggccccagtttatcttgatctgattcctaatacttacccctcatattg

SEQ ID NO: 91949 - DNA, 509 bp, Homo Sapiens
ggggtgggtgtgctgttgccttccctctcctcggttcctgatgccttgaggggtgtttcagactggcggctccagtgggccaaagggcaaccacatgagcatgggcaggggctttctccttggatgtgggacccacagcagcatcctgaaggctgggggtgggtgggtggtgtgctttcgccttgaggacgctagggcaggcagcacacctggatgtggacttggactcggacacttctgccctgcaccctggcccgctctctacctctgcccaccgttgtggccctgcagccggagatctgaggtgctctggtctgtgggtcagtcctctttccttgtcccaggatggagctgatccagtaacctcggagacgggaccctgcccagagctgagttgggggtgtggctctgccctggaaagggggtgacctcttgcctcgaggggcccagggaagcctgggtgtcaagtgcctgcaccaggggtgcacaataaagagggtactctctca

SEQ ID NO: 91950 - DNA, 899 bp, Homo Sapiens
gacgctgctaggggctcaccaaaaggcacaacctgctgcatcgtcaatcctgcgaggcactcgtgtcacgacctgagaaagcagtcaccagctggagactgatactgacatgtgcatgatacttgtgtacaacgctgaaatctgctgaataggctactaggccatctggggctctgcattacttctgccttccatatcttgtggtcctgcattcttaactggtggaatcagattcgcatccagaatactagctataaaggagtctggaaaacacagaattccagtattccaacttctgcgttgtcaggaaggcatactacaaggaggaagtcgcatgagtgatagctgatcctttcccaggcacttcatcttcttaaacatagtatattaattacaatttagcccattcttgatggctcattgtcatttctgtgagcttctcttttcataatggcctgtagttggaataatcatagggccaagggattttaacatctgtagtaactttttgtcctaggttagcttgtatctctcccacctcccataactgctgctgagacatctatgtttgatatcatttgacgtcaacctcccctgcaagccacaggcagggagagcacctcacccaaagcaaccagtttattggctggtcagcaacctgtgatttctgtagcttaaaaagatgagtggggcttattgtcttttgaactaagacaaaaaggaaagaatttccaattaagggtgggagcttcagctgagaggttttgaagtgagttggctgtattcttttgcaagaccaattgttaaattttcaagaattttgtgagttgtcaaacagccatttttaagaattaagttgcataataatttaataaaaacaaagataaatactcaaaaaa

SEQ ID NO: 91951 - DNA, 672 bp, Homo Sapiens
gggagggcttgcgtaccttgtgaatgtgtagaatcaagaataattaagggttcagcacatgtttgttcacaccagtgttctgcacatggagtgtgtgattccagaaacaagtgccattgttcgccaggctataagcctccaaactgccaaatacgttccaaaggattttccatatttcctgaggaagatatgggttcaatcatggaaagagcatctgggaagactgaaaacacctggcttctaggtttcctcattgctcttcctattctcattgtaacaaccgcaatagttttggcaaggaaacagttgaaaaagtggttcgccaaggaagaggaattcccaagtagcgaatctaaatcggaaggtagcacacagacatatgccagccaatccagctcagaaggcagcactcagacatatgccagccaaaccagatcagaaagcagcagtcaagctgatactagcaaatccaaatcagaagatagtgctgaagcatatactagcagatccaaatcacaggacagtacccaaacacaaagcagtagtaactagtgattccttcagaaggcaacggataacatcgagagtctcgctaagaaatgaaaattctgtctttccttccgtggtcacagctgaaagaaacaataaattgagtgtggatcaatttgcaaa

SEQ ID NO: 91952 - DNA, 498 bp, Homo Sapiens
  misc_feature (418)..(418): n is a, c, g, or t
  misc_feature (428)..(428): n is a, c, g, or t
ggagttgtatatccgctctcagatccactaccatcattatctgctcctttacccatataaccattagtaatataaccagaattatttgttaccacaccatttggaattggtatagtatcagacttatctacagactgattctctccagatttattttcataagacttcccattctttttgtccatactgtttttctgaatgaaattcttggttttaattcctgctttcccaaaggtgttggcctttacagtctgcttcaggctagtgtctacaacttgctggttgccattgaggaccctggaaatagggttggtggcttcatcagaactcaggttctttaaagatatttctctttctccagcattaccgtttagttcaccatagcctgttttcttcttcggcgtttcctggtgctgcntggagggtgntgtttctgctcatgtttcagcggctttggctgggccttggggctgccctcggctccatgctgcaggtatt

SEQ ID NO: 91953 - DNA, 854 bp, Homo Sapiens
  misc_feature (823)..(823): n is a, c, g, or t
cagtcgacggtaccggacatatgcccgggaattcggccattacggccgggggagaatttcagggcatctcagcacgaggatgttaggaagatcctctacagattttgggcttttatttggggattttggaaagggttgaaggaagcaggctttgctccagactgaatgctgcaggaagatactcagtacagtgagtatattttatatatcttttgtatagggaggacaggtgagagagatactaaagctgtaattggtcaagaagtagcagctatagtactggtataaagatagatacatcgacctgtctctattctggaacagaacaaacccttgcgtgtggagtcctaattagggaaaaggagtcaggctggctggacgaagggaagcaaaaggagaaagcagacaagccataagtctgcctttcttcgtggtccaggacacatagccctgctgtgcaaataactcacaatctgcctgtgcccagccatcaccagaccctcagctgatagaaaaatggaagttagttcactgcaaccctggcattattagtactgcacaaagccctcttccacccacaacataagcaccattctacaaaatccccagcaagccttttgtttcctagcagtcaccttctctcttgctgacctgcctgttgcaccctttgcaaggtattttcatactttatctaataaacccggcctttctttacctcccagcgcgcaaacccggacacccccaaccacccccaatcgcaccctcaccggtagaacccggggccgaatgttcccaataaattacggtgatcgtaaaccgaaancctttgtgggggccgccctctgggcccccct

SEQ ID NO: 91954 - DNA, 326 bp, Homo Sapiens
aataaaacaggacctgtcaacctaagtaacagacaggctctctaaaataaaagatgtttatatggaaataatgcactgcaatgagaatgtacatgccaaagtaaactatgtgtgttctccgagacgtaaaggaaagacagaggtttttaaagaaaaaaatgagaaggattacataattgttttgaaataagattggccacaaaatcagtaacaagggtgatgccagtctcaggatggagaggcacttactgccagtattttctgtgtaaggctgtgatggcctttgtgcaaggttgtggttgtgtttttttgtgagtttttattat

SEQ ID NO: 91955 - DNA, 380 bp, Homo Sapiens
acaggctgtgtctgtggctgccctggcttagggctctggctggcccctcctttccgacctggtttggcagagcagccccgcaggaccagctcgcaaggctcctggggccagtggggctctgtcctgtgaggcggtccctccgcaaggacagagtcagagagaggctgaaaccaggtcctgaaaaacatcacagaaactacagctggaaatttcctgttgaccctgatagactactacttgacaccagccgaccgatctgctggctgcccaccatggtcctgccacaattctgatgggacagagaattggccttactttctttcctgataaatagccatagacctcaagccagccagttttggccagcttatagagactgt

SEQ ID NO: 91956 - DNA, 749 bp, Homo Sapiens
  misc_feature (478)..(487): n is a, c, g, or t
aaacagaaggttaccttatattggctatttagaatgagctaattaacattgaaaatctcttggacacatctcaattttactatgtattccagtatgtgaactgtgatagaaattttgattactctaaaaaggggatgggcatatatcttaaacatgtgggaatttctaaatttaaacgaatatgtagacatacccccaaagacaagcaatttttaaaagtttttaattcaacttttgtaaaaattgattttgtcacatcagagattctcaattttaaaaacatgtactgagaagcaaattctattgtttctctttgaataagcgaacaggtaaaagggggctttgctcaataactagatgctctgtattttttctaactcagacttacagtaactgtagtaactcttcccttgctccacttgggtacttaagcagcctcattttattagtaaagactcggatatgatggtgcaaatcnnnnnnnnnncacctctgtgactgctaaactatttatgaataaaattttaataagaagctacattaaaatactatggtgagacctcactaacaaatgcaaatcatgagcaagaatgccattacttttcaatatatttaaggttcttaagtcaaacaatactacccagtgttctctcccaaataatcactattggtccatgtgtagtaaactgggaaaatatcattcttcatttttatccaagttggccatcaatgaatttcactgttagttc

SEQ ID NO: 91957 - DNA, 626 bp, Homo Sapiens
caaccctgcacccctttcctgtgacctgcagcgaagctcggctccagcaacatcccgggtcagtccgaactccgaaggcgccaaggcagggagggaccagtaggtgaagggcagccgccctcttgcgccgtttcagtcctccagtcgctgttgaatggagtttccgtctccagtctcagccaaagcaggcaaggcggacaacctcggcctggcaaccagaagtatcattccttgattcaggatcaggctcaagagttaacccaactccgaaacctctgtaggggccgacctgctggaaaagaatcttgctgagatacagaacctgcgccagcgcctggaggagtccatcagtctcaatgaccgcctgagggagaggctgcagcatgtgcttagcaatggtgaccaaggaaaaggtactgcacagtccactgtagcccctcattcatatactcagagtcactcttctggctgtggtgaggacatcctgtgacatgatgcctagagagtctggaagaatgttctccagaacttttccagccctatccaacagaattcttgggtgggaacttggaggcattggatattatctttaaatgaagagatcaaattaataaattatttttaaa

SEQ ID NO: 91958 - DNA, 389 bp, Homo Sapiens
ccgcaagaccagcgaggggtcttccaccactgttggcttccacaatccaagaatgttcgaacagcatcatccacggtccttcatgctgtaccaaaaagacatccacgcctcccctatgacaaccgcatgatgctcaaggcgtgcatccttaggaggccatgagcattctagccggcggcacccacgtggtccctgcggctgcacagctgctgggcttccatgaggaagagggcagtggacaggagtcatgaagactgattcagaaactcccctgcaggaggagaagacgtctgagccatccctgtgccaccaccaagagtcactccagcttctgaaaaagccaccgtgggggggagccgcctccaattaaagtccttggtcacatcaaa

SEQ ID NO: 91959 - DNA, 704 bp, Homo Sapiens
  misc_feature (386)..(486): n is a, c, g, or t
gcggccgcacagcctcttcaggcctggcagcaggtacatgtcggcgacgctcagcacatcataggctgcctcgggggacagctgcagtgaagacagggatgaaggtgccccccgaggtcaccaagggctcccagggcacaacagccaaggctagggcctgtggtggttggggggcactggcgggaaggcttccagtgggagtaggagctccctgcgcatgtatggggttgggggtcggggggctggcccagattcccacagggatctgcaggaccgctagggggcagaagactggggggttctcccatgccctgagcaggctggcagggcaggcgggaggcagggccctcgcaggagccagggtctgagctccgagttatacagannnnnnnnnnnnnnnnnnnnnnnnnnnnnnnnnnnnnnnnnnnnnnnnnnnnnnnnnnnnnnnnnnnnnnnnnnnnnnnnnnnnnnnnnnnnnnnnnnnnngcgggggctgtcagaatggtgggacagaggcagctagtcaagacctatgcagggactctgccaggggtgggagactatctaccaggctccctccctctcaagaggctgtggggacacagagcccacctacagatacatcctgtgctggataagactgaagccctcagattcaggccagagcctgggtggcacagggagcacgctgcagacagagacaa

SEQ ID NO: 91960 - DNA, 511 bp, Homo Sapiens
agaacagcatcactgaggaggtgacacaggagccagccatgccacgatcttgtgaccaagacactccaggtagctggaacaacaaatgcaaaggctctgagatgggctgagtatggaacactgggaagaaggcttagaaggcaggctggtgtggcaaggcttctgggagctggggtgtccgcagctggcctgtgagcactttttggcacgggagcttcaatggacagcggcggagcacaggctttggcttccaaaggtatgagctcgattcttgctctgaaactggcaagccatgtgagtttggacaaggccctgcacctctttgaccctccgcttccataaccgtacacacaaacctaactcgctggactgttgtgaggacccataagggaagcatgtgactcatggaagcaacaaaatattagctcccttctcactcgcccctctcacctctgctggaatatccccacccgcacccaccaccattaaggaaaacatacaattttgcaaa

SEQ ID NO: 91961 - DNA, 415 bp, Homo Sapiens
gatttatatgctggcgttgatgtaggacagcaatcaggcaatgttttctgcctttgacagttggtgtgatagtttgcttccagtgaagtttgactcactgtatctggaagctgtcagaagtgggagcatgaaaaggtcatgacggatggctgtggataagtggttaggggagggagctggtaagggagacaaactgcctcccttgtttccaagagaaggggctgaccctggctgctcccggccagcccccgtgctcttttcttccccacctgcctgagctggaaagaagcctgccgggctccagttttgagaggggcaccaggttgggtgtagtgtagctcatgagcccttcccagcagcgcaacccctggcataccactagaactgctagaagttctgttaaagaaattctgct

SEQ ID NO: 91962 - DNA, 545 bp, Homo Sapiens
tgttgctggcctggacaaggtgttggacccggcggcaagcgttgcccgcttgaaccaggaaaaagcgtgggcttggcgctcgacaacgtgccggcaatgcacgggcctgtcgtggcgccagctctgggacggcaccggagtcgtcaagcgttgggcggaggaccagcacagccagggtggctttgtggtacagccgccggcgctctggcaaaccgaaaaggatgactggacggtcccttatggccgcatctactttgccggcgagcacaccgcctacccgcacggctgggtggagacggcggtcaagtcggcgctgcgcgccgccatcaagatcaacagccggaaggggcctgcatcggacacggccagccccgaggggcacgcatctgacatggaggggcaggggcatgtgcatggggtggccagcagcccctcgcatgacctggcaaaggaagaaggcagccaccctccagtccaaggccagttatctctccaaaacacgacccacacgaggacctcgcattaaagtattttcggaaaaaaaa

SEQ ID NO: 91963 - DNA, 766 bp, Homo Sapiens
  misc_feature (523)..(523): n is a, c, g, or t
tttggtattaaatgcacaattaattactttcaggaaatcagatgattgatggtggtgggaagttaacagaagtgtggatgaaagagagaggaaggacccgtgctcaggacgggatggtttgcatcccgcctcggacatccgggactctcagggcgtttgatcccacccccacctggcaaagcggcaggttagtcagcgccgccgctggggatttctagtctcctctgggccgagctggtgtttcgtgactggttcctttctcttctcttcaggacagggtctccaaggctgccgggtgtcttgaaaaacgtctcacgatgtgtgcgttggatgctcttgggggtcactggaactggtgactgatgtaattttactactgagactggatgtcccacgtaaacgggggactcaggttgttggacgacactgtgtgaccttgacatcactggacttaggtttagtgagggctgactctgaagctgagggtctgcagaagggagtgtggacgactttggattaaccncagctgtggggccgacgagaagctgggctattgatccaaggccaggcaagctgaaattcacaggtcctgtgtttgggagagcaccaagagtagaagaaaccgggcccggcattgcaggagaatagagaacaggaaaagggcccagaggtggagatggtaagaccatgcaagggacactgaaagacggcagctgacctgaggacgggcccacagtagggggggtttgactgccagataaaagta

SEQ ID NO: 91964 - DNA, 407 bp, Homo Sapiens
gggtataacctcatcctggagcagggcaccctatcgtcagatggtatcatctttaaggggttgtctcagccatgcctttagaattacctttcattgcttgtcatgctggaagcttctgaatgttgcattttgtgatagaaacagtgggtaccatggtcatgtgctcacatctcctttgcggtaaagaaaaggatcactcattaacatccaccagataacattctccatgaaagcaccaaataaactaaccagaattggctacagtttcttcaagaaaataccccaatggaagaaaaaaaggtggagggagaaactgaatgaagaaaggatgatttgaaattaccagaaagtggaacgtggaaaaaacagagtaaaactagtttgagaataaaaacttaggttgtaaa

SEQ ID NO: 91965 - DNA, 473 bp, Homo Sapiens
tttagatgagcaataaatatttgataaagaaggaaataattaagtgacagatgtgactcaagagtgaccactggagagggtggactagaggctccagcagacagcacctctcctcacagggatagaagcccaggagaaagacaccagggcatcgtaagaggctgccccttagagagctcttttaggcaagtctagggtcagagtggaccccagccaggtgcctccaattagaccctgggagccacctataactaagagcttgattgtctccctaaatgggtgggaaagtgaagcaggagccacatggagcctcttcctggaaagtctgcctgccaagagccaaagggctttaccatccattgcccctgcagttcacgcagggctggccctaagtcctctggttgtcgaggggtaagtccccatggtctgggccggcttcaggggacaggagttcagtgtcaggcaactccaag

SEQ ID NO: 91966 - DNA, 520 bp, Homo Sapiens
cctgatcggaggagtgcgggccggagggtgatgggaccatctagcccctaaccatgggcccagaagagaagaccatcatgacaaaaaagttctccagctgttttcatccaggcctggtggcggggcatgctggtgcgacgcacactgctgcatgcagccctcagggcttggatcattcagtgctggtggaggcaggtgctggagaagctgctggcaaagaggcggaggatggtgttggagttctatgtgcagcaggaatgggcagcagtcaggctgcagtcctgggtccgcatgtggtgtgtccgccagcgttactgtcgtttgctcaacgctgtccgcatcatccaggtctattggcgctggcacagctgccattcccgtgtctttattgagggccactatgaactcaaagaaaaccaacttaatattcaacttgaaatctctttgggcttacaggcttgtaaggtgcaacaatgcataccccttccattaaaagaatgaccaggtctgctaaaaaaaa

SEQ ID NO: 91967 - DNA, 477 bp, Homo Sapiens
caaatgagatagaggtaatgtttctgccaacaaacagccacagagcattttatttttctagaagagcaataacagagaccccagggtgtggtgtggcaggacgaggagcatccattttgctggtggggattgtggctaaaataatgtggctctggagccagcaatgggcagcatcttcatgactttccagcttccaggctgtaagcagagatagcatctcttctggacagccagttatgtgatagtgttctgagagtcattcctggaagtcagactaaaggctgctccttcagcctttccattcatcttgtaagcaggaggcttctgtgcatggccagaaactaacaaaagcacattgtgtctaaactaggttgcagtggtttctgttatcagcaagtaaatcctgattgataaagatactacaatatatgcacatatatatgttatagaatcaataaaaattggatactttgcttt

SEQ ID NO: 91968 - DNA, 382 bp, Homo Sapiens
tttctaaattttccaatactttattaagcaaaataaaataatatttaactttttagatcccaggcttcaacattatttgctattcaatgaaaataaataaaatgtagtggttttcacatttgttaccacagatttcaaaataataatctacattcctaaaaactatttacatatacaaacaaaaaagaacataattaagctggagtttttccatgtcattgtctttggggtccaagcagcagaaccctacggccgattgccagtgatgtgattcaagctcaagaacaaaaagttgagctgtgggtatattagcttgactcataaaaaggatgctaaccaaagggtctccatctttagagaccaaacaagggcaaatgtgcta

SEQ ID NO: 91969 - DNA, 478 bp, Homo Sapiens
  misc_feature (50)..(113): n is a, c, g, or t
gatcctgtccccccagaaacaccatctgattcagatcacaagaagaagannnnnnnnnnnnnnnnnnnnnnnnnnnnnnnnnnnnnnnnnnnnnnnnnnnnnnnnnnnnnnnntcgacatagtccagaccacccaggtatgggcagctcccaggccagcagcagcagcagcctacgctaataggaccactggactctttgccaggatggcttttcctgctgtactgaacctgctgataaaagctgccttccaggctcttggacactgccttgggagcatcctgcagctgggacagaggccagctcctgttgggctcagttgagactaagtaaattaggagagagagggacatgcttttgtaggctcatcccagttggttttctcatggacatctcttcctctcccaggaagcttacaattttcttctctctcttttgtgcaatttgtctgatttaggacttgttcaagtgtttccttt

SEQ ID NO: 91970 - DNA, 1270 bp, Homo Sapiens
ccttcatctggagagtcctctgcacaagctcagacagcaggacaacgcgcatcagtggttctcaagagggggcaactttgcccttacacgcctctcacctccacgctgggacactaggtcacgaatgggggaagcggggagggagaatgctaaccccctggcatgtatctagtcagcggaggcgacggctgctgctaaacaccttacaatccacgggagggcccctcccctaccccgaagtagccattccgcagaggtggagagactcgcgtgtagatcaatgcccacgcacttggccgacggaaatcacgaattggtgaccaattggatcttggatctgaggaaaaagctccagcttcagagggaactctcgaagttttgcccagagcaaacggaggggttgcgttgccatcgcctaaaatgggaaaatggcaggcgtcacaggttgcaggggaaggttggagaccagttgagtgccccggagccttcctggaaagagtttcctatccagcccgcctcggtttccgcatccgtctgattccttatgatgttgagggtgccggggtctgggtcctttatgatgcagagggtgcccccgtctcacctcgggcgcctccccgctcccgcctcctcctggcaacctggtgggcggctccggacccggcgacccgcgaccatcttgtcagttgctgccgcctcgcaaagggcatctctaggccagtggtgagctgcggccgcgtggccgcaactcgctccagtactcagggactccctcgtggagtccttggtgtgtcgcctgcaggttctttttttgaagaaagcagggagtgaacggccttgtgagacgactccaggagcaaagggcgactctcacaagacccaagtcctcctagagcacaggaaagtgtcgcttcaggtcgaagaagggagagaaagcagctttccgcatctgcatggttgtctagtggctaggattcggtgctgaaagcgccacggcccgggttcgattcccggtcagggaattgttttgcactggccgccctcccgcagaaatcttcctttaccacgctgtcagccggcctgctccaagggccagatgtagaacagcctccgcagcgaggggcaaacccgggcaaaggagggcaagtcgtggtgggccacctctcacgtttatctccgtgtctgtcatccgcagaagcggctttagagagcgactgagcgtctcgctcaggtgtacacagccgtgcagagcctcgtttgggaatcgccg

SEQ ID NO: 91971 - DNA, 345 bp, Homo Sapiens
  misc_feature (79)..(99): n is a, c, g, or t
tccagtatggaaatccatctgttccagcaccatttgttgaaaagactttctttctattctcaatattatatttgagtgnnnnnnnnnnnnnnnnnnnnnctttgcataatacaaggttcacataaaacccaattcttggctggtgggaggatcacaagaagattatcagagacacaggatgggggttaacagagtgtgtgtctaaaaggctgagaaatgctgcctcaaagccctctggccccgggcccggctgcaggtatgcatgttgtggtcccagcttaagataagcttgcggcagggcgccaggctggccctgtgacctagggctctgaagacgccagcaaa

SEQ ID NO: 91972 - DNA, 546 bp, Homo Sapiens
  misc_feature (322)..(343): n is a, c, g, or t
cacgaggatcatgtcctgtgcagcaacgtggatggagctggaagccattatcctaaatgaactcactcagaaacagaaaaccaaataccacatgttctcacttataagtagaagctaaacattgagtacacatggatacaaagaagggaaccgcagacactggggcctacctgaggtcggagcatgaaaggagggtgaggatcaaaaaactacctatctggtactatgctttttatctggatgatgaaataatctgtacaacaaaccctggtgacatgcaatttacctatatagcaagcctacacatgtgcccctgaacctnnnnnnnnnnnnnnnnnnnnnncgtttggattattttccctctttcgaacaaagacattggtttgcccaaggactacaaataaaccaacgggaaaaaagaaaggttccagttttgtctgaaaattctgattaagcctctgggccctacagcctggagaacctggagaatcctacacccacagaacccggctttgtccccaaagaataaaaacacctctctaaaaa

SEQ ID NO: 91973 - DNA, 523 bp, Homo Sapiens
tgagttctttcaggcctttatggtgtttcctgtgtcataaatttggcctcccatttaaaatattcagtgtctgccctactggaggagatccttgtgaatgtgaaccaccatgtatgtgagcacacatgtattatgttcagggcaattacttcccctttctaggtacctttgaatacatatgaaggcttttaaagtagtttgtaaacctaaacttctatacagatgtaaagttgtactatttttattattagttttttaaaacacagatgtaagtagttgatatttttcagaatatgtcatgagctatacacacttcacctgtaacatttatatgtgactgttttaatggcatatgctgtaaaatctgtcatacatctgtacaaaatacatgagtaaaagctgcatgttccaatagtgaaacgatcacagggatatctgtgataaaaaagaggtatgttaaaccaatcttgggcaatattttgctataaatatttaaactgttatggaataaaatcctttacta

SEQ ID NO: 91974 - DNA, 711 bp, Homo Sapiens
agaggatccttaatctgtgtcattgcgaaggcatctgcctttattagattgtgtagtatctctgacacattactttctgagggtgaagaaaatcaaaaaccacatgaaatcgagacacaaaagttgattcatctccgtataagaaagcattcttcctcatcgaattctcaatggcagcatccactagagtaaggaagatgtaaccagttagcccatctcaagagtataaatgctccatccagatgaaaataaaagaacaccttctccaggtccagttgaaagcaagttcttggaatagggcatggagatgcctctgccccaagatttaacactgaacagatccaataccgagattcaagggagattaatgcagttgttacccctgaaagaagacctacttcttctccaaggccaacgtccagtgagcttctacgatctcattcaactgatcggcgtgtttacagtcgttttgagccgttttgtaagattgagagctctattcagccaacaagcaacatgccaaataccagtataaatcgcccagaaataaaatctgcgactatgggcaacagttatggcaggtctagtccattgcttaattacaacactggtgtttatcgctcatatcaacccaatgagaacaagtttcgaggatttatgcaaaagtttggaaactttatacacaaaaataaatagctattaaaatgcaaa

SEQ ID NO: 91975 - DNA, 676 bp, Homo Sapiens
  misc_feature (31)..(31): n is a, c, g, or t
  misc_feature (135)..(135): n is a, c, g, or t
tgggagtccgacaccgagggccttccctcgnaggctcatctggtacatctgagccatctccctcagggtctctgccgagtacaggcaaatggggttgttatattgcctcggctggctcgagcccggcagggcttntgggccgagtaggtcccgggccccctctgggctggtcttggccctcaggctggcccgcggagggccagggtcagaggcctcggcgagtgaggagaaggcggagggccgggagaaggcagggctaaaggtgggcctgagctccggggtgcctggggtgcctgggctggccctcgcctcagggctggggctgggtgccaccaggctgccgttcgtgtccagagcggggtccttctggtgagggatcaccggcagaggggtctggactggaggtgctgtcgtggagatgggaatgggacgctttgatttctgcagggtgaggctcaagttgtagctggcagacttgatcttgttctgggcttccaggtgggtcatggtgtctgtgttgacgccgtcaatggccaccacgaggtcaccctggctgagctgggactgggctgccttgctgcctggtgtgatccgggagatagtgaggggcatgttgaagtccttgcccccctgcagacggaagccccagggcccgggcccagtcagggtcacactg

SEQ ID NO: 91976 - DNA, 399 bp, Homo Sapiens
caagaggttgtcctgaagtaatgtctgctgcagcactggggccacctcctccaagctcaacatgtggcaaagttcatttttaacgtgctggattttccgatgaaagcctgaaacctgcacatctgaagatgccttcgccatgatgcaatggatgccaaacacgacatacacccttgggacggtgacctcagccatctgcaacaaggctctcagaaccagtcctttgactataaaaaaagcagcagctttcactaaccaagcatctttaatccaagccaaattacagaactctctaacttagaggtgatcgtccgtacggcagatcattacaacatgaaaaacgtaagctaagatgttgaacacagccagaactgaaaataaaagagctttctaaaacaa

SEQ ID NO: 91977 - DNA, 513 bp, Homo Sapiens
tgggggaggagtcggcctgctcagtccccacgacatagcaggactaggttgacaaacaaccgagatgggacacatcttgagaccctcacagtccttggaggaaggcagacgagaaaaagacaagaaaagtgttgattggctgcccttcttattaaacatcgacgcgttcactgacgaggacgtaaacaccgatctggcgtaccacgagcgtgtgtattttcgtttcacaaatactgcttcattttgagcatcaattctgaggtgggacgttatcaccactttttccactgagaggtgacaggttcagaggttgtttgtccacgtttgcacagcgtgtgaaggggaactgaaattgggatctactttccatacctttattctaagcaattatcaaatgcaaaaaagggaggagaggaggagaaacagaaaaaaatgaagataaacctcatcccctcctcaaggttatatataattctcctttgaagataaaatagcattagtaaaagaaaaaaa

SEQ ID NO: 91978 - DNA, 655 bp, Homo Sapiens
cagtggaatggctcctaatcagggtttgttcccaccattgccctgagctgctaggatgcgctctgtccacccatggccctgtactggaataacagggtaaataattatcttatctgtttttattaatccgtcttaaatgtgtatatagctcagatttattttaatgtctgatattggaagcgtttggggtctttagaagtttgatgatgttgtgaccagacatttgccttaggaacttaactcttgtttgtatcccttagtctatggtaaaattggttttgttatacatcatttcacttaaagttgcagttcctaagaacctattgatgatgttcagtgcagacttactgtacctttgggaatttaggctggagagacgtccatagccttaggtatatcatttataccagacattatgaagttattaaagtctcctatactctgtacaccagaactgtgtcttctgtaaactacctcaggatcccatctggttcttgagccaagaagtatgacttaatctgccccaaaaaattcacactggagacattcccaattaatgatgatggtagctttttgtgaaggttcataccttattcaaaggcagaaaaggtatactggagtgaactcctatgattaaataatgtcattatctaaa

SEQ ID NO: 91979 - DNA, 486 bp, Homo Sapiens
ctctccacacaggtgtttgacagggctaaggtgggcaaggcgctaagagtccatgtcaccctcaccaacaccttaatggtggctctgagcagctgcacgatggtgctggaaggaagcggcctcatcaatgggcagatagcaaaggaccttgggactctggtggccggacacaccctccaaattcaactggacctctacccgaccaaagctggaccccgccagctccaggttctcatcagcagcaacgaggtcaaggagatcaaaggctacaaggacatcttcgtcactgtggctggggctccctgagacccgccctccagctgccctccctggcacccctgccccacctggctcctttctactcctggctatgtcgtcttggctccacctctgtcctctctctagcctgcctgggaatgaatgaagctctgttagaaacaccgtgtgctttgggaagagacaataaagatgtctttatttaaaaaa

SEQ ID NO: 91980 - DNA, 660 bp, Homo Sapiens
  misc_feature (45)..(45): n is a, c, g, or t
actttagaaggcgaagagtttaatcacaggcagagaattttttgnggcctttcaaaaaggccaatcaacgaaggtgctgaaatcttggctgatactttaaaggaatatgcagtctccacagtgccagtggcagatgggtgcatttgaaagagtttctgcagcatggctgggcctaacctgatcgcaattgggtctagtgaatctgcacagaaggcccttaagatcatgcaacagatgagtgaccaccgctacgacaaactcactgtgcctgatgacatagcagcaaactgtatatatctaaatatccccaacaaagggcacgtcttgctgcaccgaaccccggaagagtatccagaaagtgcaaaggtttatgagaaactgaaggaccatatgctgatccccgtgagcatgtctgaactggaaaaggtggatgggctgctcacctgctgctcagttttaattaacaagaaagtagactcctgagctgcagagtcccccccggtagccggcaagaccgcacaggcaaggccgatgactctgtgcccactcctgttgttttccttgacaatctactgtgccactgtgctactaactcttgtttacaaaatttgattctaagttgaattgcttcattcaacactcccaccctccctctacaaa

SEQ ID NO: 91981 - DNA, 441 bp, Homo Sapiens
agagcctgccagccaggcccgagtcctctccagctcagagacccctgccaggaccctgcccttcaccacaggtgagaccgggaggagggtggcgggtggagggaggggctcggctgcacgagtccatgtgggtgtcttggtgtcacttgggacatttttagaggccacagagtgcttagccttgttaggcccacgtagtacccatggagcacatggaacagctggttattgcatttggccgatgaggaccaaggctcacgaaatctaaggtgacaagcctgtggtcaaatagcaagtggtagtcaagccaggataagaattccagtctcctgccaatgcactcagcccttttaaaaaatgatatttattactgttgctctgcttgtaaaaagagctcagaagtattttagacattttgaagagtacagaaaaacctaagaa

SEQ ID NO: 91982 - DNA, 973 bp, Homo Sapiens
  misc_feature (807)..(807): n is a, c, g, or t
  misc_feature (936)..(936): n is a, c, g, or t
tctaggtacgagcctgggtggcgaattcggcacgaggacctgcctcactgtcagccccagagcctgccagccaggcccgagtcctctccagctcagagacccctgccaggaccctgcccttcaccacagggctgatctatgactcggtcatgctgaagcaccagtgctcctgcggtgacaacagcaggcacccggagcacgccggccgcatccagagcatctggtcccggctgcaggagcgggggctccggagccagtgtgagtgtctccgaggccggaaggcctccctggaagagctgcagtcggtccactctgagcggcacgtgctcctctacggcaccaacccgctcagccgcctcaaactggacaacgggaagctggcagggctcctggcacagcggatgtttgtgatgctgccctgtggtggggttggggtggacactgacaccatctggaatgagcttcattcctccaatgcagcccgctgggccgctggcagtgtcactgacctcgccttcaaagtggcttctcgtgagctaaagaatggtttcgctgtggtgcggcccccaggacaccatgcagatcattcaacagccatgggcttctgcttcttcaactcagtggccatcgcctgccggcagctgcaacagcagagcaaggccagcaagatcctcattgtagactgggacgtgcaccatggcaacggcacccagcaaaccttctaccaagaccccagtggtgctctacatctccctgcatcgccatgacgacggcaacttcttccccgggagtggggctgtggatgangtaggggctggcagcggtgagggcttcaatgtcaatgtggcctgggctggaggtctggacccccccatggggggatcctgaagtacctggctgcctttcaggataagtcctgatgcccatcgccccganaaggtctcctccagacctaagtccctgggggtctgca

SEQ ID NO: 91983 - DNA, 428 bp, Homo Sapiens
attgggactgaagacattgccaacttacagatatcatttttatttggagtatttttttgccttgcagtgctcctgagaaattcaaaaatgcattaactttagctctataaataacacaacctaatattaaggttgcgttggaaatttcccacgtttagatatttccctaaaaatcaaaagacaatttaaattgttttacatagagaaaccttaataagtatttaactttttaataagttaaaaagtaaagactggcaaataatcacaaatgtcagaacattaaagtagcattttttccataggaatatataaaataaatatcatctatacttacttgatatttacaaaacttaaagataaatttttgtggatggaagatgtcttgaatacttcaatatgtggaaaacttcattatctttaaatatcag

SEQ ID NO: 91984 - DNA, 437 bp, Homo Sapiens
tggtatggctgctcacctgatcctactctaaagatataacaggacttgaaatttcaagctctagtattcagctcagtgacttcaacaattctttcaagccatcaaactattgaggaaggcaatgtgttcaccctggaggctgtttccagattcctaaatgtacagtgatttcagcattctgtctgggaataagatccatccttccttcagcgcaatcaaccgatttctacctgaatttactctaatatcttttcttattacaagataactatttagattctgctttatgtttagtccgtatttctttaaccctaaaaagattatgaatttgacatgtcattgatctctctaataagcgaataccaacccacaaaccactcatccttttaaaaatatttcatgggcatcggtgccataattaataaatttttaagagt

SEQ ID NO: 91985 - DNA, 549 bp, Homo Sapiens
acagggcaggggaaaatcttaggatggttgtacaattgactggaggattttttccccttggaagacactattgatctcaacctgctgacttttcctaatgcttacctgaaggaacccatcctggctagaaagggtgatggtactggaccggtattcaaccttgagttttcaagctgccaaacaggtcttaagggaggtgcttatatcccaccaacactctcccagctcccatgtccccaagacctctggagtttcctcttgaatgtacatgaaccactgtaatagcattagacttttaattgagtgtgcaatcgttttccatggagtttggtccgttcattattttttagttaactacacttcttgatattcaaatgttctattaaaaaaactgagtatgaagaaaaacactttactactgcagaaggaagaaagaatataatatgaccatcttcaggtataacagtgttgtttaaaagagaattattgtatgattataaaagatgaaataattaactgaataataaaacaaagctattagtaagcaaa

SEQ ID NO: 91986 - DNA, 451 bp, Homo Sapiens
tttaagcccactgacaaggaactgagagagactatagcattgctgacagcccaacagactgctctggaaattattgtcaacatgtgctgcaatgaaggtttgttaacatttacatttagacattttccccctgagccaagagggaaactcccgtggagattttcttaactattccagttctgcgtggtttgcccgcttcccagatccctctgatgacgaatgggaagagctttctagcagtgatgaaagtgacgcatttatggagaattccttcagtgagtgcgggggacagctgttttctcccctctgcctctcccataagttcacacggctctcaccaactacctcatcccaaagaaggtaatccattttcattctaggcttaccgtggagcatgggaaaagcttaagcaaggtattcattttgtgtacaaaagaagcaagctcacact

SEQ ID NO: 91987 - DNA, 942 bp, Homo Sapiens
gggagtactaattctggtgaatttcattctaatagggctctctgaatcaaagggtactgttattaattctgctgtatataagctgtgcttttccgataagttggctgctttttgagtggaagcctttagttgactattatcttgtacatcgtcagaatcaatacctctaatggtttctgtagtaggtgtgctgctaattcttccagatcttctagttgacttgggcgtggaaacatttagcaagctggcttcagattcagctttagactgtgtaagcttaatatctttaactggtatgctggtttttcttgacaatttattattgttacacagagaggaaacctttagaaggtcatcatttgctatatcttcataaacaagactttcattgttaaataaagtgctgcttttgaaaaactctgttttcctttgtcttaaactcattctattttgatattgtttctcttttaagaaaaaggttgtttctttcttttgagtgtttccctctctgtttttgcctggaatagccccagtatctaatgttttcttattcttcttctttagctttttatttttctccttcagaaaacttcctttatcagtgtgtaactgtaaattgccattttttgaaaccatttggataccagaattttccatgatttttttagaattatcatctcttcctacttcatatagacatttttcattaaggtctttctgcttatcagaagactttttaactccatttttaagtgcatctgatgctggctgcctaaatgctttcataaattgctgtctttcttctagagtgcattttggtttcacagcttcagaacttccagcttccaaaacagccaattctaattcttcctcctgtataacaacattagattttcttttctgaactgtctgttcattctcaggatcagataaactattttc

SEQ ID NO: 91988 - DNA, 495 bp, Homo Sapiens
tagacctgacagaggccttaggagttatcatctctttccattaacatatgaagaagctagagtctacagggattgagaactggctccaagatcataagatcttagaaagtggctgtcctgctgccctctcattaccagacttgacaatggtgcctcagcaggatggcatttcagaggcaacccatcttgcacaacctggaattctctggaggtctagtccagggccaccaggtggaaggctaaggaggaacagctatgagcactgcaggagaccgcctcaggatactcttgttctctcctcttgctttgctgtttttgttctccaaatgaccatcatcgtcagaagacaattttgaccacgaaatgtttgtagtgagaatatcaggcaggtgtctgatattccatggtttacagtttattccaggcaggtttatgtttccttgctaatacacgtacaattttacaactactgtattaacaggcatttacaacaaa

SEQ ID NO: 91989 - DNA, 386 bp, Homo Sapiens
  misc_feature (286)..(299): n is a, c, g, or t
tatatggagtgggacagaccttagaacagctaaaacaatcttgaaagggaagaataaggtgggagggatgactctaatattaaggcctgcgatataaccatcataaccaagacagcatgacaatgtcacagagggagacccatagatcaacgggagggagtaaggacccagaaacagacccacacaaatatggccaactaattttggacaaaaatgcagaagcaaatcaatggagaaaggatttcaacaaattattctgtagtaactgaatattcatccatagacnnnnnnnnnnnnnntgttgcgaaagggagtcttgtgtgcacagcctttcagcccccactcagtggcctaagaatgggccctggaaatgaaacacatctcac

SEQ ID NO: 91990 - DNA, 508 bp, Homo Sapiens
aaataaaagttctacttctaaaaacataaattttaagcagtacccaagcttctgtccataatactcttccaagtcacaaaagaatttgaggctggaaaaaaacccatatataaaaaactttacaatagtacaataaatttttataaatgttgttaggaacaaaaccttttaaagacccataaattataattttaaattattctctgtacatattactataatgtcagaaagcaaacaacaggtatttctcacttaactaaaattcatttccaagcacaaattaacctatgtaacaggacacattaaaatttaggtaagtgagagaatgttatcttatccctacgtaattgctattatcagtaagctatgtttactatggttgctctggctcaactctcccaatgagagctagctctttataaagacactaacctaaatgccagcaaaccattgggttaggtaaagaatctagacacaatccacagttttagctattagccctttaccg

SEQ ID NO: 91991 - DNA, 261 bp, Homo Sapiens
aaagggaatgaaatgccatgagccagtatctgtaacctgcgggtgacaactcgagagcaacaagtgactgggtttaagatgatctccttttaaaggcgtctttaaagcaaaaggaagcatgtgtgttagggatccacgcgcatgtgatgaaccacatagagcagtgaagtggtgcaaatggaaaattcagtagccagtacatggggcgaggaggtagtgagatggcacgagggaacagcacatgcgtgaatgcaaagggta

SEQ ID NO: 91992 - DNA, 348 bp, Homo Sapiens
tttgcagtaaagaatgagtttaatagacacgaggtcggccatgccccatgggagatggcgttagtactcaaattatctccctgaaggcatggaggttatgggtttttcaaagacagtttggtgggcaggggaccacggtagggggcaagctgattggttgggttggagatgaaatcatggggaattgaggctgtcctctcatgctgagtcagttcctgggtggaggccacaggatgggttggcgggtccaggtgaggacacgtggttgtcagaaatgcaaaaacttagggtacgtgaagctgccaaatttatcagagaaggaacaggcatctctcgcatggagccgtg

SEQ ID NO: 91993 - DNA, 458 bp, Homo Sapiens
ccagaatctgtatgattctatggagctattttaaaccaattgcaggtctagatacctcctttctcagcactataaaagctcctaagttagaggagtccctaaaactgagttacctaaagtttacttacattaaagtatgaatattaattttagaaatttgagactttattctgtaccagccctgtataataacaggttatctaggaccttcctctgaggtaggtctaaatactgatctatgaggcggaactaacgttttggggactcagcatctctgccaggttccaggattatagacagaagagtcctgtcataccactttctggaaaagtcctaatttcatgtaatccttttattttcaataaaaacaaatagctaaatgtataaccaactatgatgttatgttttcaataattttgtaaaacagctcatataaataagtattttaattagaagaa

SEQ ID NO: 91994 - DNA, 687 bp, Homo Sapiens
acggctgcaaagaaaggaagtgagcagaatgctcgtctttgacagagctggtctccatgcctgcacactccggcttgcggcccacacagttcttagctctgcaagatgctgcacaggtcactctcccactggcttttcccggttgttcctgagaaatgggccttggtcatacctctgaagtcatgggacatctcagcaggattctgcatgttagagcagctgtcacagaccctgacctcctggagggtggcatgtccacaactggctcctggttccctcctggctcctacatgccagcactttttagcctccgggatgaattgaatcaaatggaaacatctcagtggaagatgcataagaagctgcttccacatttttcattgttcccccttgaaattctcagagataaacaaactatgtgcccttttccttctgtcatcagtgtagccgccacctctgtcacacctggacaaaggtagaggagcaagcagtaaggctaggaggacagcctggcatcgctcattcgccttcacattcatgagcaaagacataatgattcgcctgatatctgtagaataaggagcctgaccacagagtgcgatggtattgtgtgttggtagttcaccagcgtgtagagacagtccaccagaaactgccaccatcagaatggtaccagttaccattctg

SEQ ID NO: 91995 - DNA, 660 bp, Homo Sapiens
aacgctcccataggggaatttgccctgaggccaaaattcggcccaggggtttccattgttgatatgagggaaatttgagaccactggttttctttcatattaccaggaagaaatgagatgggcccctttcctttgaagggtatctgctaggaatacagtggggctttagtgtctaggtagcatttataagctggcaaagctgatggcagaaataaagcctcagctaaggcccagggagagggaagcagatgagatgtcagtgatgggaagaaaagggtctgtttcaattggcatgcttccaaacacccctcaaatgatccacacgaaacaaatcagaacaatttgttgagcttaccagacggttactgcgttagcactttgaattttcatagtgttttacagaattttagttatccctgtcactctgtagaggtggttggcatcattatcacagaatcagaaatgcacagaggatgaatctgcctcccaggggcattcgttaccaagtgtttatctttcaccgcacatactgactcttctgttatcacacagccgattgggctgttatctcgggcctctccaaaaataaatgtgtcccttttagaaaagccctgctttctttgtctttcttctgtctgtatggcaaatttgtgcagaatg

SEQ ID NO: 91996 - DNA, 767 bp, Homo Sapiens
tttgcttccatgtactctggctctttcccagcccacgaggatgggatccaacatgttcagtcgagccatcaggcttgcctaacatctcgaagctgactaaggagctcttcatgtagaggaattagagagtccagtgttccaaaaatttgattcaactcttgttctgtcattatggagagttttcagcatggggtcatgataggccttttgtgctaatttcaagtctgtctatcaagtcttcttctccttgggaaagctcaaagatcgcctcctgacgttggatttccttggatgtaagcatcctgattgacgcacacatcgaaggtctcactccacagcttgctatctctccgtttcgtgctcgagggggcggcatttctggaccagggtcggggggccaagatgtcagggcggctctcactgcggaagctaatggagcggctgcagggtttgactgaagcgctttaaaggcgtggccttcacgggcgggatgaggtttgctagcgacgtgactcgggaaaggggtttgacccgtttattactaggctcctcagcgtccttggccggaccgctggccgggggtagtctccaggctgcagttcgctctcttgaccgtgaggtagaaggggtaatccttggccaccatggcggctgccgggcctgccctttgggatgtcaccgctgaccctaggcgactactcaactcccaggcaaaagggggccccagctccacgatgccagggcggcggcggcgacacggagatccg

SEQ ID NO: 91997 - DNA, 777 bp, Homo Sapiens; identical to SEQ ID NO: 3593
  misc_feature (405)..(415): n is a, c, g, or t
  misc_feature (465)..(465): n is a, c, g, or t
  misc_feature (469)..(505): n is a, c, g, or t
  misc_feature (535)..(535): n is a, c, g, or t
  misc_feature (619)..(632): n is a, c, g, or t

SEQ ID NO: 91998 - DNA, 367 bp, Homo Sapiens
aaatcagaaagtaaatgacaggatgatttgcaagacacagggatgtaaaattaaaaagcctctcgagctccaaagaagcagattctgctttgctctatttgtgaaagacaactggatgagtaaagattactacttgcaaggagactagcaatttatccaaaattggaaacagagaaaacggcatcttcttttcactcattctgactcaaaatgggtgtagctcatcagagtacatcgttacattttcgggactgttgctacctggctcacatcactttggtagcttgaactctgccatgattgggaatatttacaccacaaaaatgggctaatctcctaggaatggattctaggacggcatcagcat

SEQ ID NO: 91999 - DNA, 306 bp, Homo Sapiens
cttgcccccacacggagactgactctaaaacccttcatccaatggtgctaacccccggctctcccctgccccacctcacccacccagagaagcacagaccccgccaggggcaggggcccaccgcacacccttgtcccgggcctgtctgggactggccttcccggctcagccagtgaggctcagaagggacacaaagagggatggaagaaaagaacaaagagaaactgttcctcccacccccttccctgatgccaggggcaccagactgattctgaggcacaaataaaagaggcttcatacaagaaa

SEQ ID NO: 92000 - DNA, 426 bp, Homo Sapiens
ttttacaacaaaaacatcttagaggctttattacttcatcactaacaagggactccaaggaatgtgaaacagatcatgatttgcacaaacagtacatttttaagcttcagaagataaagcattccagacgactctgtcgaaatacatcaataaatttaaagcagctacatctaaattgtgaggataaaatacatctaccaacaggaaatcaatgtcttaagcatacaaatgcaaaccttaaaataatttaaatgtaaaatatacaactgcaaatattaatcacagtaacaaacacaaaatagaagtatatattaagagtattccaggatttctgttattacagatttgatttcataaatgcaggaactctaaccatcaagtaaaggttttgataaatcacatcaaaatttcctaaaatgtcaagtg

SEQ ID NO: 92001 - DNA, 431 bp, Homo Sapiens
tttcatgtccagcaaaattaagcatcataagtgaaggaagcactaaatatggaaagaaaagaccaccaccagccactacaaaaacacactgaagtacacagacaagtgatgctaaaaaccaaccacatacataagtctgcaaaaaagccagctgacagcatgacgagaggaccaaatccacacataccattactaaccttaaatggaaatgggctaaatgctccaattgaaagacacagggggcaagctggataaagaaccaagacccattggagtatgccgtcttcaagaaacccatctcacatgcagtgccctacataggctcaaaataaaggaatggagaaaaatatttcaaggaaatggaaaatagaaaaaagcaggtgttgcactcctagtttctgacaaagcagactataccaataaagattaaa

SEQ ID NO: 92002 - DNA, 381 bp, Homo Sapiens
aaatcacaggaaaatattgatttcattgtctccaaagtgataaaatcatgtattactcatttttgcacttaaaatttttcttatttattccaaggtggtttgaaggtccaagtatgaaaataaattagggggattaatgtataacagttataaagtatcatgttgtattaaagagcttacttagattgatgtttttaaaatgtatcctgatgaatgtctcaagaatgcatctgtcaagttttttagactgaccagtagcttaaacttttttcaggattttaggtaatttgaaaggagtttagagacccttattgaaaatatgatttaaaaatccaaagcataaaccgtaagaaaaattttaaataaacatcttttaggctg

SEQ ID NO: 92003 - DNA, 435 bp, Homo Sapiens
cttcaaaacaagcatcttgatgtggagaaaattgttaatctctttcctcagtgtacaaaagatgaaattcaaatttatcagtcaaatttatcagtcaaagttagttcttagtgatcatatggtcagctaatattagttcttagtgatcagtggtcagtaatcttcaaagtcagaatctatcaccttggtaaattatataaacctaacttgagcagatctgattattcttggatagtattcaagtggtatcttgactattaaactacgtatagtgttgctgaaatagaaagaaaacagcattggaattggattcatgtatcgtgggatacaggtgttatttcaggtgatgtacttgcattattttctttagccatactaactttttgtcacaataactaagtattcaattatatataaagagtgaaacattaaaaa

SEQ ID NO: 92004 - DNA, 464 bp, Homo Sapiens
ccagaatgtttttgggtcgaagttctcctttggaaaatctatggggtgatgtgtcctcagccaccctttggttttttcctggtcatgggtttcagtactatctggggataaaccaagataactgccatggttatgttagctagagtgtccattggatctcagcttctggtttattttctcccataagatgacctgaggtatggagtgtatcctctcaagggagcaagtggatattctggggctgaggggaatcttccggtgtactcttattttgaaacgggtaaccctttgaaatgttaaaattgccttccctcaaccaggcttccatttcttggagacaaattgctggtcagccaatcagatgctggtaatgaggggaaaacacagaaataatttctgccccctggattctctaaggggacagaaaaatagtgaaattaatatagtaaaagaaaaagagtaaa

SEQ ID NO: 92005 - DNA, 753 bp, Homo Sapiens
  misc_feature (587)..(623): n is a, c, g, or t
actgcatgtctagtactttggggatgcccattctctccaaggctctcatagcctaactgtagagaaaaggcttacatgtatgacatattaagattgtagaaaccagcacctgtgggacctctgagagggtctggaattagggttcaggtaccatccatctgttacgtgctttgaagatgccactccatctgtgggattcaatttacataaactgaagactattcttctgagttgaagtgaggagaggcatcaatcacactggaaaattatttgatctcctggaagcaaaaagtccaccatgaagttgttcttgccatggacttctagaggagctgactgtcctttgggaagctacaaatacagccttaaaatctgttagcagggaagagaggctttttctgagtgatcaggaatgaagaagcagagatcatgcaaggtgtttccatccaaaagtaggcatctcatgtcatctgctctggccagtatttaaccttgagaaaagaagaagtgtagagatgatgtacttgcctgagggatggattaaaaagtctttggtcttctctgaacggtactactgaatttatccnnnnnnnnnnnnnnnnnnnnnnnnnnnnnnnnnnnnngaaaacagaccatgtacaaatccaagcctgccatagaagttgttaccctacatagagtccatgcctgtttgtccagagtttgggaaaagtcagagcacaacctagaataaatgcgataatgtatcacaaa

SEQ ID NO: 92006 - DNA, 1142 bp, Homo Sapiens
cagtcgacggtaccggacatatgcccgggaattcggccattacggccgggagatatactttatctttttaaaaaagtgtaaataaaatcaaagaatgtaaagtctatctcttacgctagaggtccaaagctgcctctgttttaaagattatcccaatgtggaagatgcccatgactggtcagctacttcctcctatacattttggtttctttgagggtcactcattgagacacgcaggcctctgagagggtcttgttctagatttcatattgcacttggagggtaacagctgctttttcacgcatggtactcttgatgtttttcactctgtcaaggattttgttggctatcaatgaatgtgtctaaaacttagtgcttccaggtagttatagtactccaaatcaaggaccaacttaaacgttaatttttgtgcaaaaacaaacctgaaaaatatgcttcggaaactggtgcatagttctaatggtaagtcagatggtatattcaaattgtaattaagagatttaaatattagaacggtatgtaaggtagtataattaccactattttaaaacaattcagttaaacactgctgcaatatttcagtgttgtgcttgaaaatatgtacagtttttttccaatattaataccttatgttgtccttaaatatttctaaaagcgcctttatttcagcattacctttttttcatcactatcttttataaaacattaatataagtcgttacttttagaaactaaaggaaataatagctggaaaaccctctgtagtttaaaatcagtcattaaactcacaatagggtaagtaaatatagccacctgttaacatgtaaataagcataatttgttccaaagatggaatattgaaacttagttcatgtctgctgtaaaatattatttaaatgctgctgggcatttcacttaaagaacttaatgtcaacagctacaacaaagaccaaatctgaactgctaatgtggctgctttgtagggaatggactaatatcagtgtgttagatcttaaggtatcagtatttcagaatcctgcgacgattttatttctaaattcatgtactgtatgtccataagtgaaaataaaatgtcatattcttttctataaaaaacccac

SEQ ID NO: 92007 - DNA, 508 bp, Homo Sapiens
gcggccgccagggaggcggcgggccgcgacatgctggccgccgacctccggtgcagcctcttcgcctcggccctgcagagctacaagcgcgactcggtgctgcggcccttccccgcgtcctacgcccgcggcgactgtaaggactttgaagccctgcttgcagatgccagcaagttacctaacctgaaagaacttctccagtcctccggagacaaccacaaacgggcctgggacctggtgagctggattttatcctcaaaggtcctgacaatccacagtgcagggaaggcagagtttgaaaagatccaaaagctgactggggctcctcacacgcctgttcctgcaccggacttcctgtttgaaattgagtactttgacccagccaacgccaaattttatgagaccaaaggagaacgagacctaatctatgcatttcatggtagccgcctagaaaacttccattccattatccacaatggcctgcactgccatctgaacaagacatcct

SEQ ID NO: 92008 - DNA, 421 bp, Homo Sapiens
agcttatgactcagaataactatttctaataacaaattttaagttctcttcatgcagagcagctgacacaaatcttcaactcattgatgatggcatctgactgttccaggtattaagaagagagaaagaatctgagaaattatggcgtactcaactgtggacagctgaaagtctggcatagcgtgccctcatcatcacaaatgggctcgcattacaagctacacttatttgacaactatcagcatttgtcaaccggcactcagatttgaagactcatttcacagctggagcaagagaagacaggaaggaaaaatcagagtaaggtttcaatgagtttctgcaaattctcagaagttttgctgccactcagtgtcacaataacaaaaagaaataaaaatagctgatatttactaaacaaaaa

SEQ ID NO: 92009 - DNA, 454 bp, Homo Sapiens
cagggatcgcatccacccccaccaccgcctcctctgcctccacctggcattcgaccatcatcacctgtcacagttacagctcttgctcatcctccctatgggatacatccaactccatctactgccccaggtccccatgttccattaatgcctccatctcctccatcacaagttatacctgcttctgagccaaagcgccatccatcaaccctacctgtaatcagtgatgccaggagtgtgctactggaagcaatacgaaaaggtattcacctacgcaaagtagaagagcagcgtgaacaggaagctaagcatgaacgcattgaaaacgatgttgccaccatcctgtctcgccgtattgctgttgaatatagtgattcggaagatgattcagaatttgatgaagtagattggttggagtaagaaaaatgcattgataaatattacaaaactgaaa

SEQ ID NO: 92010 - DNA, 596 bp, Homo Sapiens
ctgggccgtggcgcgcctggagggccgcgagttcgagtatctgatgaagaagcgctcggtgaccatcggccgcaactcgtcgcagggctcggtggacgtgagcatgggccactcgagcttcatctcccggcgccacctcgagatcttcacgcccccgggcggcggcggccatggcggggccgctccggagctgccgcccgcgcagcccaggcccgacgccggcggcgacttctacctgcgctgcttgggcaagaacggggtattcgtggacggcgtgttccagaggcgcggggcgccgccgctgcagctgccgcgcgtgtgcacattcaggttcccgagcacaaacatcaagataacgttcactgccctgtccagcgagaagagagagaagcaggaggcgtctgagtctccagtgaaggccgtacagtcacacatctcgcccatgaccatcaacattccagacaccatggcacacctcatcagccctctgacctcccccacgggaaccatcagcgctgcatacttctgcccttcagcctcggggagcgggtcttcaggtacaggttggtcgagtgatgcatctgacctcattaatg

SEQ ID NO: 92011 - DNA, 421 bp, Homo Sapiens
tgggttcaagcgacacaatctgttaatttgaaatggaatttagaagtgatgaaaaaccactaggcagaatcaggatatggaggagaaaaacatccccctcaggtaccacaatgcagcaagcagaaaatgtcaagaatccacaaaaagatagacatgtaaatagtaaagttccattaaaaataagaaccaagaaagaattctgaaaagcaagggaattctgcaaagacttcacaaaaatcagtcaagtttcaagaataacaaagtaaatcttaagctgttgctgaagtgcttagctagcagaataaacctatttcattttctttcttgcagctcacaatcctttttataggttgtaaagcaaaagcagaaagcttcagaaggtcttgggaaatgacataaactgggttaagtatgactttta

SEQ ID NO: 92012 - DNA, 495 bp, Homo Sapiens
tgtcttgatttggaccggtgctgagaacctccatgtgaaaataagttgctctctggactggttgatggtctcagttatcccagttgcagaaagcagaaatctgtatatatttgcggatgaattacatctgggaatgggctgccctgcaaatcggatacatacatatgtatatgagtttatatatcttgttcgtgattgtggcatcaggacaagggtagtttctgaggaaactctcctttttcaaaccgagctgtactttaccccaaggaatatagatcatgaccctcaggaaatccatttggagtgttccacctctagtgtttgatgcagaaatcatggggagactatctggaattagttcttctgtaagcctatctgctcaaatcctgtaccaagagtccacgaggatctagaaggcgtagtatgctggctctatgccatactcctgaatgactattctgtatatgatcatgatattaaacagtggtaaaactg

SEQ ID NO: 92013 - DNA, 512 bp, Homo Sapiens
acaggttgtacttctccatatgtgagactactggaagtgagaagcaatatttgtcatttctaaaactggccaggctgtgctgacccaggattagtaatttgttatgtctgttttcccttagatgtttgggcactcagatgctatcttggtgcacacacacaacattgctgttcagtcacaaatccgaacaacttaatataataaattgtactaaaagtcatttaagaaataccaaaaagtaagcttttgtttctaaccattgttataaaggctaatataattgttgttatatagcagtaagatatatttgtgtgcatgcgtctccaagtcagttgtaaatgtcttgagaacagagaatacaattgtcatctttatattgcctcatttctccactaatacttagcaaataaaaggcaataagtaaatatgtactggttgaatgcctctggagacctagagtttaaagttttaagtcaataaataaataaatatttactcttaaataaaaaaaa

SEQ ID NO: 92014 - DNA, 574 bp, Homo Sapiens
ttttaataacttattttatacatattgtgcagatgtaaatcttgtaattaatggtcaaactgtataaagggattggtagtcaaaacatgtacaaagaaatacctgtaaaactgttttgtctcatgttttattggaccaaagttgtggtttgtatggagtgtagtagtagtgtgtacaggtagaaaacttttaaatacagcatgcaggtgtttcagttagcttgttttcatcaccataactgcaaagatgtggcttagttgtattgcatgcttcctataatttaactctccataattgatgcctgcagtagtgtaaggcatttcatactagtctcctctagtagacctgtgacttactgtgttggacatattatttagacttagtcatacaaagaaacttagctcttttttcatctcacagtaaagcctatttccccaggaaaaaaataaatgcctttgaatgaaaattctgaaattgtaaatgtctattttaatattcacctatgaaagaacctgtgaatatatgtaaatacgtttaataaattttattggtcatgtaaaatcattgtaaaaag

SEQ ID NO: 92015 - DNA, 352 bp, Homo Sapiens
  misc_feature (195)..(211): n is a, c, g, or t
tggaaatcgccccctcaccgtgatccaagcgttaaccgctgccatctcattggtccccagaccattccagggttccagcataaactgggagaagagactcgggaaggcggggaacggaaggtgggcattgccctgggaaactcatgtctgagaagccttttggcagagtattttgcgttggcacggagtcttcannnnnnnnnnnnnnnnngaagctcgcccacccctgaggacgtggccaaggagaggagggcaagggtggctttgcctgcctggaatgttctgtgctcaagtgtgggtggatggagaagatgttaggctgaaataaagactttttaattcaacgaaaaaa

SEQ ID NO: 92016 - DNA, 627 bp, Homo Sapiens
gccgatgggggcaccgtggacttgcgcgagatgctggctgtgtcagtgctggccgcagtccgcggcggcgacgaggtgaggcgcgtccgcgagagcaacgtcctccacgagaagtccaaggggaagacgcgcgagggagccgaggacaagatgaccagcggcgacgtgctgtccaaccgcaagatgttctacctgctcaagaccgccttccccagcgtccagattaatactgaggaacacgtggatgcagctgatcaggaggttatcttgtgggatcataagattcctgaggatatcctaaaggaagtaactactcctaaagaggtaccagcagaaagtgttactgtctggattgacccacttgatgctacacaggaatatacagaggatcttcgaaagtacgtcactactatggtgtgtgtggctgtaaatggtaaacccatgctaggagttatacataagccattttccgaatatacagcttgggcaatggtagatggtggttcaaatgtgaaagcccgctcttcctacaatgagaagaccccaaggatcgttgtgtctcgttcccattcatggatggtgcaacaggtcgctcttcaaatctttggatccagactactattaatc

SEQ ID NO: 92017 - DNA, 748 bp, Homo Sapiens
gcggccgcagaagctgcggttgaagccgtgggcgcagatgtcaggcactgccggtgccgtcgtgccgtggtacagcacctgctccaccgggcgccgctcgcatcgctgcagcaggcgctcccggtacagctcatactgctgctgcagcagcgggtgcgacacgcgctccacacgaacgacgcggatgctgctgcgggcagcgtccagggtgtcgtagaaggcccgcaccacctcctggaactccccggtgttctctgccagacgctccaggttgttccagggccccttcagcgtctgccccgccaaggtagggcctgaagctgccaagggaaaggccaaactctgatcccaggggccagccagaagtgccaccaagtggcgggcagcacgggcagggtgggccccgaagccacggaggatggtgcagtcaccacgcagggcaacactcacaccatggcaccgctccaggcgagcacgcagctctgcaggcagtgtgcggcgccagggccccaccgtctcctcctggacgtggacctccaaggcagccctgagcgcccggtccagctcctccacatcctgctcaaaggccgagtgcaccaccagctgggccttgccatcagtccccccatctgggggctcttctgcctccaacgggggctgctccagcagggagagggttagggcttgccgcagggcagcagcctcctcctcctcgtgccgaattcggcgcgccgtcgacttcatactc

SEQ ID NO: 92018 - DNA, 530 bp, Homo Sapiens
gcggccgcagaagctgcggttgaagccgtgggcgcagatgtcaggcactgccggtgccgtcgtgccgtggtacagcacctgctccaccgggcgccgctcgcatcgctgcagcaggcgctcccggtacagctcatactgctgctgcagcagcgggtgcgacacgcgctccacctgcggggaaggcccgggccaggattaaacaccctccctacgccctggggccgacgcagggcagagctgagcctggcaaccaggagccctctgttggaggagtccagggtttgagggagcccttgcagcccccatcatgctctgtccagcagcagacagtaacacctccgtgaagcaagtgacttcagagggccgctggggaggcctgacccctccccctcccgtggaggtctgcgggcgggcaaaccccacccactcaagcgaggcctctgcagagaaaagctgagccagggccctatgctggctacaggacttgactccaacacgaggagatgccacagacctctcagtgctgaaag

SEQ ID NO: 92019 - DNA, 588 bp, Homo Sapiens
agccctaggcggtagggccaggatgcacaccccatcatggctgctgacgggcatcccgagctgggccccgataggcatccagggccaggcaccgcataggttcccatgtcccagcatggcctgtggctgccctccatcccttccccagagatggctccttgggatgaagagggtagagtgggctgctggtgtcgcatcaaaatttggcaggatcggcttcctcaggggcacagacctctcccacccacaagaactcctcccacccaacttccccttagagtgctgtgagatgagagtgggtaaatcagggacagggccatggggtagggtgagaagggcaggggtgtcctgatgcaaaggtggggagaagggatcctaatcccttcctctcccattcaccctgtgtaacaggaccccaaggacctgcctccccggaagtgccttaacctagagggtcggggaggaggttgtgtcactgactcaggctgctccttctctagtttcccctctcatctgaccttagtttgctgccatcagtctagtggtttcgtggtttcgtctatttattaaaaaatatttgagaacaaa

SEQ ID NO: 92020 - DNA, 807 bp, Homo Sapiens
cagtcgacggtaccggacatatgcccgggaattcggccattacggccgggctctgaactttatgaaggggttccccttcctcctgggagctggcctcctgctcatcccggctgttctgattgggatgctggaaaaggctgatcctcacctcgagttccagcagtttccccagagcccctgatctgcctggaccagaagacagagggcaagaggagcaaagtgaacaccaagcaactggaggtctgcagctggaagcccagcccacagcaggacaagcaactcttttctaagggcagtgctctctttggacgaggtagtcaagagagaccaaggcaccaccccatccacagctgacccagcctctgtctaggatctagaatcataacccacacaggcccactgcaggacaggtggcagaggagctatttgggacaggagtcagttctccctttctgctatccatcacttataaccccacaggccagaggagaggtcctgagagaggtgacacttcagggaccagaggcagcacgagggctggcatctctccttccagcccaaactgcacagccccaaccaggttcccaacacgtgtagcagtcatcagccattccttaacaatgaatgtggtacctggttagtgccagccttgggaaggagggagggaggtaagaggggcttggtgatctctggaggaagagtgttgcctttgctgtggttggggaatcgatccttggctatggcctacccactcccctggctgaagagtgccaatcattacaaatcagcttcagcaaaataaaaaaa

SEQ ID NO: 92021 - DNA, 475 bp, Homo Sapiens
atgtgctgggttctgtcagatcacatgtacttttaatgtggatttaatagcagccatttgtttagtagcccctctgtgccagctactgtccacatatgaccttactgaatccttgtcacagtacatgatgtagcaggatttactggtgaggaaggggagacataggttaagtgactactcccggtcacacagctgtgaggtggtggtgccagagttggaatatggccctttcggactccagagtatggtatttatttcttcacaggtgctctcttttctgctgtggcctgtgtgaatagcctggccatgctgacggcctccggcatcttcaactcactctacccagccactctgaactttatgaaggggttccccttcctcctgggagctggcctcctgctcatcccggctgttctgattgggtaatgcagggccctgaacccatgctcataatggagccctttctcttaaaagt

SEQ ID NO: 92022 - DNA, 384 bp, Homo Sapiens
tcacaggaagaggcttggtggctacagaaagacagaaagatgcctgacctgcttccagctgcttcagcccccccactgtcccatctccagacacgtcaaactgcaactggatgacagacattaagctggaactttgcagaacaaattccatgaataataggacttggtccaggctcctaaccatctttcatccttgggtgtatccatcggcctaggaacacctaacaccacgtgatgtttaatcctacagcaaaccatcgacactttcagcttgaatgatcatgtatcacttagttttcaagtttaattcaagtgcatctacctcttctccactgttgacaccagaaaactcccttccatatgcccttgtggaactcactatac

SEQ ID NO: 92023 - DNA, 453 bp, Homo Sapiens
caacaacaaaaacagatgagctcaaacctgagaaaacctggaatctgcccaaatcaagccgtttatagcttcgaggtattaaacagccactaggacagttgatgaatttgatggagtcagtggcatttcacaagccttcacaggcacggggtcatgaaaggtgcatgggaggatccggaccctttgcgcccagcatgctttgcttgcgatcacctccacatcgcccttcggaggaaagcggcagctggtcaggctcctctgagacctttcaggagagccctgagaggtgaggtgaggacgaatgataaggaactgaggccaccgtgagcaagaagatatagatggcaggaacagtaagggctgttcattttacttgttggggtttgtcccctacttgttctggtatttacatagtttcacgtctctataaatctgataagaaagtgcaaaaaa

SEQ ID NO: 92024 - DNA, 372 bp, Homo Sapiens
tgatcctagattgttctataaacacataggcactatctcatttacatgcacacttttcctattcagcaaatatctgagtgcctactatatgctgaggataggggaaaggctggcaccccatgcacttttcagatgtctacagcagaaccccaaagattggcacaacttaagtaacagaatccaccaagacaaacttcctcatccaatctattcagatccaaccctgtcggttctgatttctaaaacatcctctgtcaactgacaaaaagacctcactcttcagatgaaaccactaccatgaacaaactcctggactatggccttgtttaaaatatcaatataataaagaacattcataaaataagggctaaa

SEQ ID NO: 92025 - DNA, 466 bp, Homo Sapiens
tgagggggccgggccggggctgcggggcgaacggcgcggctaggatccggcggctcagcccggggcggcgaggctcggcacggagatggcggcgcgctcggcgcagacagagctgtgaaccaaccccgctcacggctaacaagcccacccaccatggcgagccccactctgagccccgactcctcatcccaggaggccctgtcggcccccacctgctccccaacctctgactccgagaacctcagccccgatgagctggagctgctggccaagctcgaagagcagaaccggctcctggaggccgactccaagtccatgcgctccatgaatggcccgccgcccttcgaggacccgctggctttcgatgggctgagcctggcgcggcacttggacgaggactcgctgccgtcgtcggacgaggagctactttgggcgtagcgtgggcgctgccctgcaggacgcattg

SEQ ID NO: 92026 - DNA, 1287 bp, Homo Sapiens
  misc_feature (1042)..(1042): n is a, c, g, or t
  misc_feature (1060)..(1060): n is a, c, g, or t
  misc_feature (1072)..(1072): n is a, c, g, or t
  misc_feature (1098)..(1098): n is a, c, g, or t
  misc_feature (1108)..(1108): n is a, c, g, or t
  misc_feature (1154)..(1154): n is a, c, g, or t
ctcaaggagctgatccgcaagggcatcccccaccacttccgggccatcgtgtggcagcttctgtgcagcgccacggacatgcccgtcaagaaccagtactccgagctgctcaagatgtcctcgccgtgcgagaagctgatccgcagggacatcgcccgcacctacccggaacacgagttcttcaagggccaggacagcctgggccaggaggtcctcttcaacgtcatgaaggcatactcgctggtagaccgggaggtgggctactgccagggaagcgccttcatcgtgggcctgctcctcatgcagatgcctgaggaggaggccttctgtgtgttcgtgcggctgatgcaggagtaccggctgcgggagctcttcaaacccagcatggccgagctcgggctctgcatctatcagttcgagtacatgctgcaggagcagctcccagacctcaacacccacttccgttcccaaagcttccacacatccatgtatgcctcgtcctggttcctcacactgttcctgaccaccttcccactccccgtcgccacccgggtctttgacatcttcatgtatgaggggctggagatcgtgttccgagtgggcctcgccctgctgcaggtgaaccaggcggagctgatgcagctggacatggaggggatgtcccagtacttccagagagtgatcccccaccagttcgacagctgcccggacaagctggtcctcaaagcctaccaggtcaagtacaaccccaagaagatgaagaggctggagaaggagtacgcagccatgaagagcaaggagatggaggagcagatcgagatcaaaagacttcggacggagaaccggctcctgaaacagcggattgaaaccctagagaaggggcaagtgacacgggcgcaggagtcggaggagaactacgtcatcaagcgggagctggcggtggtgcggcagcagtgcagctcggcggccgaggacctgcagaaggcacagagcaccatccggcagctacaggagcagcaggataacccccgctcacagtaanattcgtgttcccactggnagacctattggnaccattgaagctgcgggtataggtanacatgggggnccttcgggcgatagtcagtacaagttctccgccatgttaaaacagnaacagctcgctgccggacgacaacaatgtggcgcagctgcaggaggagctgaaggcgctcaaggtgcgggaaggccaggcggtggcctcgacgcgagagcttaaactgcagctgcagaagatctcggaacacc

SEQ ID NO: 92027 - DNA, 318 bp, Homo Sapiens
atggcttctgtgtgctcaggaagaagaaacagatgggattggtgagcatctagccaatttccaccacaaatgctcattttggctgcctccaggccaaaggtaaaaactaaaaagccagagaatactaaatgttggccaagatgaggaaaacagaaactctcatcctctgctagttggaatgaaaattgatgcaacgtccctggaaaacagtttggtattacctagcaaagtagaacctgtgcctcccctacaacccagcaattccactcctggtatacaatcaaaataaacttttgtacttgtatcccaaataataaa

SEQ ID NO: 92028 - DNA, 425 bp, Homo Sapiens
aagagacagaagaaagaaccaggaaagatttggccaggctgatgagtgtcctagagccaaagatgcctgtcagggagtcccatgtccacaggaacagctggcaccagaagctcttctgtgctccatcactgaccaggcacattctgtaacgtgcgtggccgtggcatgaacaggcagcagatcctgagggtcagcagatgcagggtcaggagcagcaggagcgttgcagaggagcacactttcctccctgcagtaggagcttggcagagcacattttcatggccaccacacttatccaatagaattgtgttttaggaatcctgttttttagctctagaaattctgtttggtgctttttatgttttccagttctctccttatgtttttcatttaattcttagagcatactgaacatttttataaaa

SEQ ID NO: 92029 - DNA, 677 bp, Homo Sapiens
gccttactgtaccaacagaaagagtagctgtcttactccagatcccatgcaatgagaggaataaggtagtgtagtctacccctgctgcaccgggtagtggcagcaacacactggaaaactcctgggccagggacatcagcagcagcggcaagcccacagctatgaacttgcccattttgttggcagcagggcttctgagatcatagggtctgcagccatgtgcacaagcaacaagattctgatgagcatggcagtgcagagacaaccccctcagcgttttctgcacggcagcctttacttccttgttcctcaggctgtagattaggggattcaacatggggattaccgtggtgtagaacacagaggccacattctcctgggtcaaggaactgattgtggagggttttaagtacatgaatgcagttgatccatagaacattcccacggctgcaaggtgggagctgcaggtgctgaaggctttggatctcccctctgtggtgctgatgccgaagatgctggagagaatgaaggtgtaagaaacaagaactggtaagctcgtgactatgatgttgaatccagccaaaaagaagactgtcatctcaacatcataggtgctagagcaggacagcttcatgagagggaggatgtcacagaagtagtgactgatgaggtgctca

SEQ ID NO: 92030 - DNA, 403 bp, Homo Sapiens
  misc_feature (365)..(365): n is a, c, g, or t
ttttactgtttctagtgaatttatcttcccatttatagtgggggaaaaccgaggtatcaaggcatcagaggatttgtccacaggcttacaagagggtactaaagtgttgtgacagtagaccagttcttggattccaaggggaatgtgggagtccggaagaaatctttgcactctgctctccatgctggggggtgcagaactctaagcaggtcattttgtctccatgacattctcttctctgaggtaagaatcagtaacacccatctaatcttagagtaaaggtaaccatagagttcctttcccaaaagacatcaagactcttcaataaatatttgttgaatttttgtcatgctctgttgcactanggatgcagagatgaagacactcttcacaaaatgccagg

SEQ ID NO: 92031 - DNA, 503 bp, Homo Sapiens
  misc_feature (154)..(181): n is a, c, g, or t
tggcttcccaaagcgctgagattgcaggaagagtgtcttcatctctgcatccctagtgcaacagagcatgacaaaaattcaacaaatatttattgaagagtcttgatgtcttttgggaaaggaactctatggttacctttactctaagttaaannnnnnnnnnnnnnnnnnnnnnnnnnnnaaccctgaggctcagaagataaatatttgctgaagatcactgtgcttattagatgggtgttactgattcttacctcagagaagagaatgtcatggagacaaaatgacctgcttagagttctgcaccccccagcatggagagcagagcgcaaagatttcttccggactcccacattccccttggaatccaagaactggtctactgtcacaacactttagtaccctcttgtaagcctgtggacaaatcctctgatgccttgatacctcggttttcccccactataaatgggaagataaattcactagaaacagtaaactaaaaa

SEQ ID NO: 92032 - DNA, 413 bp, Homo Sapiens
actgttatataaatcatcttgatcaacttaacagaataaacatgacacctatatagaattctcttctgattgcttctaatattcctttgcagttttaacacagcttataagttcacctgacatattttttggtgctgattttgtcacttaacatgacttcaccaaatggtttcatcagatagtttccctctgtccatcctttcatatttcattctgttactcttccttaccgtaccataatctgaatgggctctatatacaggtgctgtggagcatcttttgtaaaaacttccttgtggtgacattttagattatttttatgggatatagtccaccaaccgtaattacctggtcagcgttttaaactcttgcaacactaaatatatacacctacaatatacccgcaaaaatta

SEQ ID NO: 92033 - DNA, 1113 bp, Homo Sapiens
cattatctatactgaaagtgttagtaatatttctaaaaaggaaaagagcagtatggtagataaaagaatgtagagtcaaaaatcaatcatttgagaaatttttcttcttcctatgattatgtttttggttaacagatattattttcattttttgagcttgcaaaagtctgcctaggaatgtgctaaatcaaaggaaaaatctagcctcatgttcacaattggcctggaatgccattcccagactgagatctaactacacagagtatggctaacggcagaagtcagaggttagggagatctggtgtctccatttatctggaaaacagagcaaagaagggtgatcagttatagaaggccaaacagaagtgttttaagttcagaatttcatctttcgtttaattttcaaagtaacagccactctggatcttttcttgccctcttctctatcagtatgaacagcgtagctgcttctctcctttaggaaagtcagtgtgaggtcctggatatggcctagtctccaggtggtgggagtttacattctgttacctataaacagctaaggcatcgttctaagtttgtttaaaatggttgttttaaatggtaaacacaaagtccagtgatttttttaaaaactggctttaatggacattaacaaataatatacactgatttatcacctttaagcaacaaaaacatgacttgtaattattcaaataaggtaggatttttctcttaagtacacgtcttaaaagtcattcacaaaacaactgggcatccactaagaccaaggcactgtgagggaggcaaacagcacaacatcctcacctcaaggagctcagcctgggatgaagacagacacacacaactccagcatgaggccaaggggtagcctgttatgggatcaagtggtggcagaatcaagaagtggttctgaaagtgttctttagtcacagagaccagtaggtttgaaacccagtgatgttactttttaactttgtgccttacctactataagcctcagcttcatccactacagtatgccaccctcttaatagaatttatgtaagaattacagaaacatacaagtaaaggattaagtgtagagccagcatg

SEQ ID NO: 92034 - DNA, 565 bp, Homo Sapiens
  misc_feature (67)..(67): n is a, c, g, or t
  misc_feature (78)..(78): n is a, c, g, or t
caattacagtcacagattaaaagtggagttttaaatgtctggtttatactagaacagtggttctcanagtgtggtccntgggtcgccagcaggaactcatcaggcatgcacaggagttttcagaagccctccaacggcctctgtgtgtgcgtcagagagaaccatagcaccagaactttcaatgctaattctctagcaaaacagtaggcaagaaaataaaaacttctcctgcctccttaactccgtagtcaaatttttaaaagaagattctggttctgaattcatcttgaggatatgtaataggtaatatgtaatatgaatagtctagcaactcatgcaaacatatcttaaactaatgaggaagtatcaagtcccagagatgagagagtggggacctccgaggtcctactacatccatagctaaccatggtcttaagtgctgaggaaaggaaactcagctcttacagtactgggcccaagagacaaagcccggtcctgcttgtttctgccatgagacactgggctttgagcacaggcaagtcccaaaaaagcaaaccaaacgcac

SEQ ID NO: 92035 - DNA, 582 bp, Homo Sapiens
ttatatcatgtttgtatcaagatgtagttaaactcatgtcacattttaaacatctgtaagtcagaaggatcacctttggaagaggccaattactggcaaaagtgattcattatcaagacaaaaagtaaatgtactttggaagtgtaaaaatcttaaaaaatccttaaagaaccctttataaaagcaatgcaaagtatttactatacatctgaataatatgcacttcataattgtgcctcaccccacctcctaaaatcttatatcgatctgtgttttgggtttgagagccaccttaatgtggaaatgcaagaatcagcaggatcaagtccaagaagaatgaagccagatggttctgtaagacccaatgtgaatagacatatacaacaggaattatttaaactgcttaaccattcccacaaaaatgagtaggtatatttggagacgacttttttaaagcagaagttatctacaatattccaattgagagaagatatattcacaggcagtttggacaggatgactccagtcacatgaaagtgtagttttagtatagacagcttatgcaaacatttcaatactttt

SEQ ID NO: 92036 - DNA, 353 bp, Homo Sapiens
ccccataccccagtatagtgcccagaaggccagtgagacagaaccattcactcccctggaaagaacgctgaagccagggagtcaagtggcctggctcagtgggtcccacaccatggagcccagcaaactaggacccactggcttgaaattctggctgcaagcacagcagtctaagcttgacctgggaagctcgagcttggtgggggaagggcgtctgccattgctgaggcttgagtaggcagctttaccctataaagccacccagaagattgaactgggtggagcccaccgcagctagcaagaccagactgtatctccaggttcctcctctttgggcagggcatctttgaaaa

SEQ ID NO: 92037 - DNA, 726 bp, Homo Sapiens
gggggccaagcatatattgaactgagacatagggctcctgacggaaggcaacggctgcctttcagtgctccacctggcagcgttgtagaggcatcttctaatctgagacatggaaacttcattccccggccagactttccgggccctagacacacagaccccatgcgacgacctccccagggtctacctaatcagctacctgtgcacccagatttggaacaagtgccaccatctcaacaagagcaaggtcattctgtccattcatcttctatggtcatgaggactctgaaccatccactaggtggtgaattttcagaagctcctttgtcaacatctgtaccgtctgaaacaacgtctgataatttacagataaccacccagccttctgatggtctagaggaaaaacttgattctgatgacccttctgtgaaggaactggatgttaaagaccttgagggggttgaagtcaaagacttagatgatgaagatcttgaaaacttaaatttagatacagaggatggcaaggtagttgaattggatactttagataatttggaaactaatgatcccaacctggatgacctcttaaggtcaggagagtttgatatcattgcatatacagatccagaacttgacatgggagataagaaaagcatgtttaatgaggaactagaccttccaattgatgataagttagataatcagtgtgtatctgttgaaccaaaa

SEQ ID NO: 92038 - DNA, 254 bp, Homo Sapiens
  misc_feature (15)..(15): n is a, c, g, or t
gccaacctcccttcntccaccatgccaacctccttcctccaccatgccagcctccctccctccaccatgccagcacagggactccccgtaaatcatcttcatccccctttgtggaaaagactgaagatctgtatatgacaaggtcaagagtgggctcacccagtgctatccaagagaaacaccgtgtcagccacctgcataactttacactgtctagtggtcaccttaaaaaaagtggaaagtaacagataaaa

SEQ ID NO: 92039 - DNA, 577 bp, Homo Sapiens
agcttaaaggagggacgtttctcaatgtgaagtctttctctatttcaaatataagcacaaaaagtaatgatggaaaataatgcgaattggtgtgtccagggtcagctggccatcctgtacacaggcaggtggggacagacgagccaaggatgagaggtgacagggcccgtatctgaccccgtcactgcctgacttggtaatattttcagaatccaaagctttctctgtccctatttctgagcttgtaaagggtagctaatagcagttgtttgttgagttctgatcgagaacaataaagatttgcagagaaaaccatgaaaagtgctctaagctcttggacataaccatcacagaaatgtgttttgttattttgctcaatgcagcaaaaaccctccatcctttgcttcctggtgtaaaaggttatatgtgatgctggagtgccaaagtacttggtgtatttcaacagtgcatcaagttatcaccacctctggtgctttggaagatgctgtgatttggaaagcactgtcgaaatgtaaaacattattgccacagtagtaaaaatatccgtgtccaaaaa

SEQ ID NO: 92040 - DNA, 468 bp, Homo Sapiens
taatataatcaaaacatagttagactgtccactgctctagagataaactagatattgatctggctccaaaagaacaaggttaatccatctgccaaagcgagaacacttactaagatcttatggttaaaaaaattttttttaatttcttaacagacatataaaaatgtaattcttcttatgaagactgcttctcataattcctgttgccaacagcaagagctatatttatttcaataaatctgagctagcacttcgattccatcacggcttaaatgtgtttacaaagcttaacatataaaaggtcagtctagtcactgtctaggaaatctgctaattaaattggtgatttttcaacacagtgcagtgactgtgggtgcaattaactcagaaccataggcaactcagcagtacaacctctcctacataatgaatcttctcctttttgtaaaggtacttaagatttgagca

SEQ ID NO: 92041 - DNA, 264 bp, Homo Sapiens
tgctcagctccagcgtcatttcggcctcttagttcttctgaaccctgctcctgagctaggtaggaaacatgagcggcaccaacttggatgggaacgatgagtttgatgagcagttgcgaatgcaagcaattgtacggagacggcaaggatggtgacacccagaccgatgccggcggagaacccgattctctctggcatcatccgactgacactccctacgagtgggacctgtacatataggcttggttccccaaggtaggagag

SEQ ID NO: 92042 - DNA, 500 bp, Homo Sapiens
tacaagagaaaggcagagggacatttgagacagagaggaggaggccacatgcagatggaggcagaggctggagttatgctgccacaagccaccgaatgcctagcgactccagaaactgggacggtcaaggactgattctctctagagcctttggaggaagcgtgaccctgccgacaccttaatttctaacttctggccttgagaaccaggagagaatacacttctgctgttttaagtttgtggtagtttgtcgtggcaaatttaggatgcagatacaggtactaagagcaaaaagccaactgctgtcagggactggcgggtatagcacctgggtcaaacacctggatgggccccgctggaagggcagctgtcctccactccagtccacagcggacaggcagaatgtgggcccagagacaccagatcttctgatttctcatgagaaattgaacatctgagcttttaaataaaatctcctgatctttaaactttcaaaaaaa

SEQ ID NO: 92043 - DNA, 810 bp, Homo Sapiens
tgcggccgccgccgcctcctcggtctcctcgtccgccgccttggggactctgcaccaagggactgccctgtccagtgtcgagaactttactgctaggatttccaattgttaataacgctatgttagcgcgctcgaggaagaaggtaggaatcccggctccttttctcgtcttggtggttcggtgttttgttcgctcctccaggcgcggcccctctcgacctcgcgcgcccattttcgccgctgcgaattctcggacaaaactgtcaacagcccgggcgcgccttttggctctgcgggtccctctatttatgcaaagccgacctatgctacagccccccaacccccgacctggggtagggaggaagagggtgccggggaagggagtccgccctgtccaggcactagaggctcccttgacgtttggcagatgaaaaacaactaagcctttttgaggtgtagagattctcaggtccaggcgttaaaaaataatggtcaaaagaataatacaaaaatagtaaaggtcttgaagaatgccagcgaagcaattcttttttatttgaggacacttgtctggtgtactttttcatgaaaaggaaaaatggttaacatgtttacacaagaaaaaaagtcaaaattatcatttatttcaacctgtgttttgtatcataacagacgtgtggatttttttgtacttactgcgtattctttacaaggagtattgtaaattttactggcaattattattgtactattctaaatgtaagatttttacactttttcagaaataaaaatgcttaattttcaaagaaa

SEQ ID NO: 92044 - DNA, 665 bp, Homo Sapiens
tgcaggaggggccggtactgtagggtgggggtgaggtcagtaatataccaactttctaacagttgccttcatagttcctttgaaagaaacagagattttcctcatttaaacaaattctgttaataatgcaactacatcttaccaatatctgatgcataatcgataagagtctgtactactgcagcctgtaatcgtaccttcttttctgcgttagaagacatcttttcatgtccttcacttgtctgaagaagatttggtgcaaatattactgcaagattgctgctatccatcttattctcactggatctaagagaaacattcctgagaaagttaaagaagtatcttaatacatgaactgtgtggtcagccagaagacaggagagcaacagtatagctttattcttttcctctgtgcctaactgttgagctttcaaaagtgcttcatgcaaatcagctgggagaatgggctctggcagttccctaaaaaactgcttaagaagtcccgcaatatcacaaggaggtgcagaagataggcaaccttcaccatgatccactttattctttagtgcttttaggcgaatcacagatcctgatttccgaaaaagcccttcggtatgaatatgttcttctaaagatgtgcaagcatcgacaagaaagcttggaat

SEQ ID NO: 92045 - DNA, 691 bp, Homo Sapiens
gaagtgaaacaccaatgcaggttttgactggatcatctcgtcaaagttattcacctggctatcaggatttcagtaagtgggaatcaatgttgaaaataaaagaaggacttctaaggcagaaagaaattgtaatcgatcggcagaagcaacaaattacccacctgcatgagaggataagggataatgaattacgggctcaacatgccatgttaggacattatgtaaattgtgaggattcttatgtggctagtttgcagccacaatatgagaacacttcactccagacaccaatttcagaggaatcagtttcccattcccaacaaggggaatttgagcaaaagcttgcatctactgagaaagaagttttacagcttaatgagtttctcaaacaaagactaagcctatttagtgaagagaagaagaaactagaggaaaaagtaggtttttctaataaagttgaattaggtcaacaacatttcctcagcatataattatttgtctgtcatttaccctgtcaggtgtcatgccaggttatgtatacatttatgtggaggtgattaattttgtagtaacttttgagaagccctctgctgtctgcagaaatccaaggattttctttgaggatagaaatgctcttgtatatctttctaacaaatagtaaaatctttaaaaaattaattgcctacaacaa

SEQ ID NO: 92046 - DNA, 829 bp, Homo Sapiens
cagcactttgggaggccgagctagaagaaaaactcaaagaaaaagtggatgtaagtctgattgaacgaatcaatctgactggagagatggacacgttcagcaccgtcatctccagcagtattcagctgctggttcaggatctggatgctgcctgtgatcctgccctgactgccatgagcaagatgcagtggcagaacgtggagcacgttggtgaccagagcccctacgtcacctctgtcattctgcacatcaagcagaacgtccccatcatccgtgacaacctggcttccacacgcaagtacttcactcagttctgcgttaaagtcgcaaactccttcattcccaaattcatcacccacctcttcaagtgcaagccaattagcatggtgggagcagaacagctgctgctggacacccactcgctgaagatggtcctgctcgatctcccctccatcagctcgcaggtggtgaggaaggcacccgccagctacaccaagatcgttgtcaaaggcatgaaccgggctgagatgatcctcaaggtagtgatggcccctcatgaaccgttggtggtgtttgttgacaactacatcaaacttctcacagactgcaacacagaaacctttcagaagatactggacatgaaggggctgaagaggagtgagcagagcagcatgctggaactcctgcgccagcggctccccgcaccgccctcgggggcagaaagctccggctcactgtccctgacggcgccaacaccagagcaagagtcgtcacgcatccgcaagctcgagaaactcattaaaaagagactgtagcagcagcaaaaaaa

SEQ ID NO: 92047 - DNA, 842 bp, Homo Sapiens
  misc_feature (738)..(762): n is a, c, g, or t
gcggccgctgtactctctgtgcaagctcttgagcgtctcataggtgaagaagctcaggccagcgtagggaatgacccccagcacggtgggcataaatccatggtagagagtcttcagcccctcttctctcgagatgcggatgaagacatgaaagatgttgctgtacatttccttcggggttacggccatccgcgctctgaccaggtccagggggtaggtcagtgaagcggctgtcgttccagccagtgcgccggcgaagaggcgaggccaagggggcagggcttctccacggaagccatagtagctgcccaggatgcgcttgtactcctcgtgtgcgctgaactggatggcggcgtagggcaccacgcgcaccatggtggccgagttcccgcgccacaagctgagaaatccctcgttgaggtaggtgtagtagaggacccggaaggcctccttggcagaaaatctttttgaagacacttggaagatgatattggttccgtccaggggagctaccgctgttttggcaagggcaccagccagggccccagacagcagggagctgagcacttgcctgtggtcacgctttgatgagacggacgaggacaggacagcctcagcatcctcatgcaatcgcaccgggccttccttcacaccattacccataccaggcctgctcggaatggcaggagactcggtcctcagttcagcccgacaggcgcgggccgctgacgcttgggnnnnnnnnnnnnnnnnnnnnnnnnntcaccggcccggacgcgtcgccgccgccgctacctccagccgccacggccccgcctcgtgccgaattcgccacccaggcc

SEQ ID NO: 92048 - DNA, 567 bp, Homo Sapiens
agcccaagatttcggcacgagggtcagtcttccagagcacaggatgcacaagactcccagccactgactgtctcatgtatctgcaagggccgaggaaattaatgacccaaggaggctatgatatggtccaaaaacttttcctggattttttccgtaggcggctgagccagaggccaactgtagaggaactggaacagaggaacattttgaaacctcggaatgaacaagaggaacaggaggagaagagagagatcaagaggaggctaacccgaaagatcagtcaaaggcccacggtggaagagcttcgggaaagaaagatcctcatccgcttcagtgactacgtggaggtggctgacgctcaggactatgaccgcagggaagataagccgtggacccgcctcaccgctgcagacaaagctgccatccgaaaggagctcaatgaattcaaaagcactgagatggaagttcatgaattgagtagacacttaacaaggtttcaccgaccttaacagtcgaattcctcttgagtgctatgctgtcttcaaaacataaatttataagaaccat

SEQ ID NO: 92049 - DNA, 464 bp, Homo Sapiens
  misc_feature (329)..(366): n is a, c, g, or t
catccccgcctcccctgcctgcggggtcttagatgtctctctccttcccactgagtttcactccacatttgaattggattaactcatgccatgttaggcaaacgtgcccctcaaatccttccacttaacagacatttattgaaggttcctgtgtgcggggcccaagagaagggacattaaattaggagatgaaccttgggaggccatggcatgcttcggagcctcggcgtcaaaatgacaacccacaccccacttggcggttcatctggggccctggaatcagcagactgaggctggaacccagcaatggcacatgctggctgtatgtnnnnnnnnnnnnnnnnnnnnnnnnnnnnnnnnnnnnnngaatctgcccagcggagttaagtcaccgcatcccggagagccgagtgtctcatagaggctcctggtgtggtctccatgctgctgctcagcacggaatg

SEQ ID NO: 92050 - DNA, 468 bp, Homo Sapiens
  misc_feature (204)..(226): n is a, c, g, or t
gatgggaaaatgattatctttattacagaggctaaagaaaacatatctttatatgagaaactgcaacatggatatcatgtattatttttaccagttgaatactataataaatattggcttctgctaatacagggtgatacagtattaataggatgaagttaacatgaatcaatgctctggcagtggtaaccctgaaccatgtcnnnnnnnnnnnnnnnnnnnnnnnatgtttaattaaacagaatggttctggaggtttagaaccagtgattatgtgtaatttagaagacttcactcaaaccacttaaagttaagttaaagcttacatttaaattcaggaaaattcatttttaattgtattaaaatatgcattcttggaaataaataagattatggtttatttgccttgttaaaacaatcaaatttgcatgtgtaataaggcatattcaaacttcaagcagtttaaat

SEQ ID NO: 92051 - DNA, 439 bp, Homo Sapiens
tgtggtcaccttggcgtgtatctatttatagccatacacaacagggtcttaagcagtcaacattcaaaaaatatgtggtcaagaactaaaccaaacaaaccctggatgatcccaggccaaaacaattcctttccaggcacacaggcccagcagagacaaaaccagatattcattcatcacacacacaagtcttccagaaactgacctggaatgccctgctgaggtcacttcgaatgctctcatcaacgaggggcaggaagaaaatagtggttgctgcatgttttcagccaatcgtcgggcgatatttctcattttctgttgaaacttgcgatgggagaagccgtccccgaaatcccgggcgccgtggagggggtctggtctctgggtctctggtcacccggtcagtgcctccagcccccggcagagctctgttatcgtc

SEQ ID NO: 92052 - DNA, 477 bp, Homo Sapiens
gctgctgcagtcacgtgggagcccctttaagtttccatagagaggcctctctggtgtcacatgatggacatgatataatgaaacaacattgtggagaggaaagcattaggggagcccacggctacaaaaacaagtgagtgagaagaggtgggaggaagagaaactacgccacctcccctgcagccgagtgcacgcagcagcctggcgtgacaagtgggcgacgccggggggcagggagccggggtccttggccctggccggggaccccaccgcccaccgcgcggaggacaacttttagccagcagcccaaaccagcacggcacctgtctccagagtctccaccgctcctcccaattcatcccaaagaaattctcaaaaatacactctacaaatctacgtgcgcatcattttcacctcgcgtcgcgcccgggaggaaggaacgaggcaaggagctaaagcagcgtgcgttcagccctg

SEQ ID NO: 92053 - DNA, 543 bp, Homo Sapiens
ggcacgaggcaactgagaaggacaaccaaagtgagctggatctttgaagcacaaatgcagcaaatccttcaccctgctttataagtggagctggaatagtcctggggctctggggcctgcaggtatcagcttgctctctttgcactttcggggaaggaggactcacagtgaggaagcaaaaactgtgcacagaagtggatcacctgctggtggaaatgtggacatctcttgttcagcagatggcagtttttaaaaaataaaggttgtgaggaaaagacttatataagaagaaaagcatttccagtggtgtggcctgaaaacaaagaataacctaggctgctggaaagcacccttttggttgttttcattctgttccctcccattgtagattgaactttgttctctgctttctttttcttggaaagagaggacttagctttaagtcagcactgatttgggactgttcctaaggcatatcagtgcttcattgtcattgtgtttttaaactttttaaaattaaaacagttcattttggggaagaaa

SEQ ID NO: 92054 - DNA, 515 bp, Homo Sapiens
  misc_feature (17)..(17): n is a, c, g, or t
cagatcttgactccagnaaaagcgtcctgcctgtcatttatgatatttgtgaaagacctaggaacaactgaagctaacacctgagatactgaaggcctggaagagttaggtacggctgatgacactgttgaaaagtcataaacgcacccaagttgagcaagaactgtgttggcccgtgtgtgagaaaaaatagccacgtccagactgggagaatttactacttccaaagacaagttaatagaagcggcacaggacatggaagtatggagtggacaggttaccatttgtacgcggtgattgtatttttaaatgtgctgtaactagcagccatttttattaatgggccaatctaaacagggttgaaaaagattaaccgtgacgccaccccaaattacaatagggtcttgtagatctctttttatagctgtaaaaacggaatcattcttggctctgtgtaatgtttataaggcgtgtctgatctcactgaataaaattttatagaaaagttaaaaaaa

SEQ ID NO: 92055 - DNA, 488 bp, Homo Sapiens
tttcttgtgtttgtcttgctttttgacaactgcttctcccacgttccttgcaattctattctctcaccttcactttactatttgtattcgatggaccaggataattcaggcaaggttaccttgtaaacttgaattggccacacaccatgttgtcacccagctggctatgaagtgaataatggtactgaaagtaaacctgaagacctttctcagatctattttaagtctgagtctgaccaaccatggaaaatattcgacatgaattaatgtagagaactataaagcatttatgacagctccaagaaaaatcatctactctatgcaggagatatgtttagagacctctcagaaaaacttgcctggtttgagggtacacagtaccattttaatcttctgaaaatatctgtattcctgctctttttctgctgtcactgtcaatctgctatatttttcactatcctattaaaatattactgtctcctttaaaa

SEQ ID NO: 92056 - DNA, 368 bp, Homo Sapiens
tggctccttcttgacaggggttctctttggaatccgtacctgccagccaggatccctgtctactggctgctccttggtcctgtggagctttgctcctgcactctgccaagctctgaggctggcctctgtttaggctgctgatagacacctgtcttcatgctaaggcctagctgactggctgagccaacctactcctccagggcctgcccaaccctgatgggtgcctgacgcaggcctggaacatcttgctgccttctcgtactcacagcttaggaagcaaaaagcaagccaggtgttcatacttctctgctggggacataacaaatggcatgacaaatactaaagcaataaatgaactgaaaaataaa

SEQ ID NO: 92057 - DNA, 444 bp, Homo Sapiens
cacctcgtggtgtgaagtcgtttaatcctgcccgctaatgcgtaaggactttccaccgtgtgcaggactccgcgctgggcaggggctctcgcagggtttgaaccgacctccgcctcctcctgcgggttcacaggcctgcgaggaagtcgcgtgaaggagattcgctactgtgtgaggctggcctgcgcggcgtgggcagtagctgtccggggctggggacagctttcggctccccaggccatcccgtcggggcatctgcggccaatctcgaaggtggagaggctcagggttggaacagacttcacggaaggggtcctagaagaggaaaggggtcgtgtttgcccttagagcagtctgggcgtgaagcggaaactttaaaccaccagaaactctggagagcttggagcacctgggaaggagcaaccagagtgggccggaggtagg

SEQ ID NO: 92058 - DNA, 438 bp, Homo Sapiens
tgtcaactggctcctcaacatactcaggctggggtggcgggggtgggggaggacattttcctacagacacagtaggaacatggcctctaggcattaaattaaccagcggtttctttggcatgttcgaacaagtctagaacccaaagcgcatatgctaaggggagaggaaaattgcctacttgataaaaataagcggtatctaacctctgagctcagagcttgatttctgatgccagtttgataagactggcaaatgcacttcttggtaacaacactgaggccagtacgggagcaccgagtattcaagtctcacacatagcatgacttaagaaatgacagcagcattaggaaatgtgctaaaatttttaaaggcgtaacaaccctgtcttctggttaccctaacctgtgatctgtttatttccattttcctttttaaaa

SEQ ID NO: 92059 - DNA, 720 bp, Homo Sapiens
  misc_feature (215)..(238): n is a, c, g, or t
tctgaatatgatgtcttgtttattgccagccaggcacccatggtatatcaatgctgaccagagtccactgagccttagaagtaacgatattttaattaataatgatattatggcaataatacttctatcgttcatacactgaaggtgataatattccaaatatgacaacttttcaaagacagaaggttataaccagatctggaatttccatagannnnnnnnnnnnnnnnnnnnnnnnaaacatctacagatttaagatgacttgaattaatcaaatataattctgggcttcattgcaatgccactgtcaagaaacccattaccctaataattgtaaaaacggaagaatttcttacaaagaaattctttctctttaacataaattcttccagccttgataactcaaacttcttggggaagatgataaattggatagtcattctaaacaactgctgcaacaggatattgtggcaaaaagaaaagacaaagtatagttatcctcttatgatgatatttactttcctgagagcctgtaatcagaagggtccagtggtctcaatggtgactagatttaaatgttcacttcttcactgttgtgataagaacttggagaacttgaaaggtatttcatatttttgttatttctcctcctggttatatattcctttcaatgaaaatgtggaaattacagatgataaatttgtagaattagatgaagta

SEQ ID NO: 92060 - DNA, 484 bp, Homo Sapiens
ggtcggcaggtgacagtattaaatcttacctatccggagttcagggtcccccaggcccacctggtcccccaggacctgtcaccaccatcacaggcgagactttcgactactcagagctggcaagccacgttgtgagctacttacggagtaagcccttccccatgccctgcacctggcaccttcctcctgtgggtctgcttttgctcccagagcctcatctcctcgtttgctgtttgctttgcccttctctggaacatgagttttaattccgaattcataataatcgggccactgggatacagtgtcaacaagggtctgtccagattcagggcggccacgctggagagacaccgagtgagccttcctgcaattgactaatgtgttcctaattataggttcttcccacctgtgcatgaaggttggcagcatctggcaggcattaggctaaagcatgttctcaaaaataaacttcctttcttacaaa

SEQ ID NO: 92061 - DNA, 455 bp, Homo Sapiens
gaaaacaatgatccagcaatacttgtatgcatgttcattgcaacttaaaagcgtaaaaaccccaatggtccatccacagacgaatggataaactgtggtatccattacacaatagactacttactactcagcaataaaaatgaagtaactttcaataaatgcaatattattggcagacattgttgaaggaaaaaagccagacaaacaactacataaaatatgtttctatttagatgaagtggcaaactaatctgtagtgttaaaaattagattagtgattgcctgggccaagtggcaggttggggaggatggctgcaaagaagtatgaggaaactttctccaatagatgagaattttccgtatcttgatctgagtggcaaattgtaaacttaaaatatatataaaatttattgtatgaaaattaagcctcaataaatgtgattataaaaaacaaa

SEQ ID NO: 92062 - DNA, 821 bp, Homo Sapiens
  misc_feature (185)..(193): n is a, c, g, or t
ttttaggtcctctgtttattctgtcaaatgaaagtgttaggccaaggtcgcattatctctttggaaactacatcgagaacagaattcccatggaacgaactcttaatagttcactggtagtcccccttttctgaatattcttcccaacatgacactttataacaaaaatttaactgcaaaactcnnnnnnnnncaccaacagccagattttgatgagaaaatggccatatttatttactccaaatatatattatgtctgtgataatttgcctaaactgtttaaggaatattaacaagtatgatactgcatcgtggtatgtagcaaaaagataggtaatctgacatacatggatgcaagcagcatggctgtgaacctggatatatttagaaatgatcttcagtggagtccttgatgtgacattttccactaaaacattcttctaactctggtatatcttagtgtttcgaactataatttccgtcttcaagccaagacagcagctctacatccttacctaggtaattcaggcatgcgccagtattttggaggggtccaaattagagttagttatgatggtatagatctttaaagtatagtctaaccaagcttgctctggtcttttgtgacatcaaggcttctcagtctgtattcacataaagttgaaacaactaatcaattcagtgaaaaaaaatcagcagatttcactcatacactggtgatatataccactggtattgggtacaatgtaaggagagaggattacccatctcttcagttacttgtaaaatatgattttaaaaaaataaatcaatacattttg

SEQ ID NO: 92063 - DNA, 606 bp, Homo Sapiens
  misc_feature (188)..(188): n is a, c, g, or t
gactgtggaatccacttcgtcatttgcaggtagatggaggaatgaccaccacaaagtttcttatgcagctacaagcagatattcttcatattccagtaataaaaccctttatgcctgaaacaactgcactaggagctgccatggcagcaggggctgcagagggagtaagcgtttggagccttgaaccncaggctttgtcagttctcaggatggaacgatttgaaccacagatccaggccacagaaagtgaaattcgttatgccacatggaagaaagccgtaatgaagtcaatgggttgggttaccagtcagtctcctgaaggtggtgatccttctatcttctctagtctgcctttgggattttttatagtgagtagcatggtaatgctaattggagcaagatatatctcgggtgtgccataataataccagctatggagtcccaagatgtaaacattttacataatgaaagcatatagcagttctgcctcttaatataatgacactattatagactctgattttgtttataaaccacttgctacatgacccatgaaaaccctagacttgtgacctgaaataaagaaaatacgttagaagtaaaaaa

SEQ ID NO: 92064 - DNA, 1079 bp, Homo Sapiens
  misc_feature (209)..(209): n is a, c, g, or t
  misc_feature (276)..(276): n is a, c, g, or t
  misc_feature (343)..(343): n is a, c, g, or t
cctaggggaaggtcccgtacccctccatccggattttcccaaggggcttcgtgtctcccaaagaggttaggaagccactgttcagaaaagggaaaatgaagccctgcaggtttccattcacatctgggaagaaggttttgcctctagaaccagggtctgcccaccaaacttgcctgtgttagcttagaccaaatcacttccctgtcttngaactctagccaaagggtggaccaggcgggagcagagaagccagctctccaacacagggcatcgtcntacccaccagttgccagagagtgggggcctgtggccaggcagccaggaggaggtctgccccagctgntgattcccaccaggccctggagagtttgtccaccagagcttggaatctgcttccaattccaggctccaaccagtcaacctccactgggtcaccgcagtgcacctcttgaggcaggtcttcttactggatgtgtcctcatgcccgggtgcagtgccagccaggcctccatggaactccattcctggtctccgtgtccagatgggttctgcacctatcgggtcttaagatcctgcccactctgcaactgctctaggccggatgggccagagaaggagaaccatggcaggagccggaagcagctgtgcgcagccagccagagggtcccgagggaggaacgcgagcgggcggccggagcctggcggcggcccacaccttcaagagcccaagccagcgctgcccctctcccgggatcccatctagagagggagctgcggcccagggccatctccaggggtcggggacgcacgtgcggggcgggaagcagccgtcggcagcaggccccgggcgcatcatagcacgcgtcctaagtgggccgcctggccctcgggcccgtggccgtggctgcgctgatgggtcttgagcgagccctcgcgcgcgaagctcttgccgcagcgggggcagaagtagggccgccgctccccgaagacgccggggcggcgcgggtgcggcgcgggcatgcgcgcgtgggtgcgctggtggttgagcaggaagcgcggctcgcggaagcagcggccgc

SEQ ID NO: 92065 - DNA, 443 bp, Homo Sapiens
aacacttgtgaccataggaatatagcagtgctaaggcaaaataggtcttaacttgacttttcctgtcatttgctgccattgtttgccaaaggtctagcacctatcttcagaggaaagtcaagaaattagtgctcagatggtgggatgaattcctgaattattgttggctctagtagtttcttcagatcaattttatagtttctttagaactagaaaattaggtctcagaatggcagttggccacccaatgtgtataatacaattactcaaccagctgcttgaaagcaaggggcaacagagaagtcagctactggctcaggcaacaggaaatttgatgatactccttggtcaaatcattcatttaacatacatttatatagaacctttctgtatcaggcaccattctaggtaccacagataaaacaataaagagaactgacaaa

SEQ ID NO: 92066 - DNA, 1101 bp, Homo Sapiens
caagaagagctgtcttgctagtatgctcagttttctgagaggcctcagcaggtcataaatttaggtttgccatgggcaaactacttggtcccaacatgaaatatgacaatcaatttggcataaaagaggcacacgggaacatctgatggactaagaaataactattattaatgcaactacaaatatgaatatcttattacacaaacaggaagaattacgtatttttacagggtattggtgagcagtcaaaaagcgtggcaaattacctagaagttttaaaagttttaagtgatcaaatatttgcatcaaatataattccacccaataaagaactttgtatttaaatgtttttactaaaagcacaaaattaacctttgctctcctgtaggtaccccacctttgtccatacagaagatgcatgtgcctatctcatacgtatgcacatacaaacacacatccacaaacaggtaaaaaacgaatgctaaaagtctaaaagtactccaggcgatcacaactgtcagaacattaattttcttctaaccaggataggaaatgtggcttttgtttactttgtcaatcataggggaaggggagtacgaggcaggactacaggaggaaggtgatgaatgtttatcatgcaacatagatacaacagtaataaatccccattcaagggctggcctgttggcctgatggtgacacacattttgttgccatgcaggagactcatagttcaaatttcaatcttgcttttttcatgccccagatcagaaaagaagtgaagaaacactgtagatttttgccttcaaatcagaggaagggaatacatatgtcacaaccatagctatttttgctgaaaagtgtgaacacagtgctctgagaacaagtctggctccttcctgcaactggtgctaccgtgtcactagaccatgttcaaagaggagaaaaggtgctacatcttgtacagcagaagcaaataacaggaggacagacagggtttcaaggggttatgtgaataaaaggaaaacatatccatcaataaaagtacccccccggccgtaatggccgaattcccgggcatatgtccggtaccgtcgactg

SEQ ID NO: 92067 - DNA, 442 bp, Homo Sapiens
cattcacttattcagccgatgtacactgaatgtatgttatgttcacacactgttgtaggcacgtggggtaccatagggaactaaagagattaaaaagagtattgctgtcctcaaatagcatacattctatcgggagcttcagcttctcatctataaaatggagatacctacttacaaagttgtgaaaatgagaaatgtgtataatgcagtgcctagcacatttgtagatgtttattcattggtaattattattttacaaatatttgtttgagatataaacagttgaacaaaagagaattcccattagtctaatcacttattgaccacacaaatttattgaaatttagacctcagaaacaaacctttaaaaataaaagcaacactgtttcctctgagatcattttttctttcttatgtgcagtggatccaaacttctacagca

SEQ ID NO: 92068 - DNA, 386 bp, Homo Sapiens
cacctggattttgaagggttttgtgtcgtttaactgctcatcagagctctccacacactgaaacctcaattctcttgttgagacactagaagtctgcgggtgcccctcacacaggagaaatgcaagctgcccccttgaaaaacgtcctcagagttgcaaccacaggggccaagtcaagaacacttcaaagactggatgcaatccagccaagaggttggctccttccctcagccagatctcccatgtgctaccataaggagagcctcgcagagctgtggcaggtggtattggcatggatgagaaacttctgcatgggtcttagtgaatgcattggcattcctggatgaaatacattaaaaatgaaataaatccatattaataacaaa

SEQ ID NO: 92069 - DNA, 759 bp, Homo Sapiens
ttcaagtatccctcgggatcgtgtccctgggaggcggataggattcagcactctagaattgtctcaccatttgaataggtgctgctcagcccttttgagtctgtcatcggaaagaccatggctttctcgcttttcatctttttggatggctgcttgtcgcaatattgtcttcttcgctttagacaaccctgtggtgcttactcttcctgtgatgaaggcaagtgtgttcctggagaggttactgaatctggagctgcttttagggagttgcagatggcgcaggcctcccttcctcctcaaggaagccaaagacaccatcacaatcaggcagccaggagccagggcttccataggcccagctctgtacctgtagggggatggaatctgctaaaagtgttctggagtcgttcttggatatctgcttggtatcttctcaatatcttgaccatctgtgacaattttaatcctcatttgatcatattttatggaccagctggcatgctgccttctgatcctttcagctgcagaaaagacaggcttaccttggagatattgcaagtttggttcccggccactgcagtaaatgtcttactatgttgaccgtgctggactcgaattcctgggctcaagcaatccttctgcctcaaccttctgattatttcgactacgggtgtgcgccaccatgcctggcttagaaaaggactttatgttgaacctcttttctcttacaatcaaataataaattcattgagtcatact

SEQ ID NO: 92070 - DNA, 477 bp, Homo Sapiens
  misc_feature (94)..(102): n is a, c, g, or t
gatatctgcttggtatcttctcaatatcttgaccatctgtgacaattttaatcctcatttgatcatattttatggtaaatgagcttaactcgannnnnnnnnaatttagatgcctcctaatgtactataacaggtgctatgataagaaagatgaatgagtttgtaaaacccagggtaaataaggagtttactacaagaatacaacttcccatatgcaagatggggctgggcaaggctgtgagagcttctcttgaattgagcctaagaggatgaggagaattccatgattgaggactcagaggtggacctcccaaacaaagggacaaagctgtgaaagtgcaggtcagattcagagaagagctaatcgtggaatttaatttaaaataataaaagaaaaggactttgatgaacaaccataccgtttttagctcttacatcgtgtagttttccaagtaaaaatgctttgaatgctgaaaa

SEQ ID NO: 92071 - DNA, 306 bp, Homo Sapiens
tacatttactgatggaaaggtgaaatggtagatcgaagccagacattaaaactgttttaaattctcacttacttggacatagaatatcagcagtctcaaagtcattcacccggcagataggcaaaaatgagtcccttgaagatgaagtacaaaaagactattgaaaagtattttgcacattaaatgctaagctataggatataaacatcttattttcagaaagagatttctggatatatttcttaaggtcagtggacgaagccggaattctactataatgtataaccctatagcactgaaatctat

SEQ ID NO: 92072 - DNA, 670 bp, Homo Sapiens
  misc_feature (216)..(224): n is a, c, g, or t
gcggccgctaccgtttccctggggctaggttgcttcgcagaaggctctggccctgagtccgagggggactgcggggtccaggggcgatgaatgctcccgcaacctccggagcttgtgcgcgtacttcagggaccggcaccacgtcaccgtcacctcctgagtagtgagttcccctctgatgaaaccactggtgtgtttactcaccatccccaccannnnnnnnnccccaacctgatggaaggaagtacataatggagagcaagtttttaaagcacggtcgtgtcgtgtgaacttgctctagccaaattaggtttatagcactttttttggctctcattacctccagtccccacataaacaagagtgaccagctgggtcatccgcaagaccgtttgaaattattgtggcttgggtggaaacttaaaggagtgaagtatctgctttccagaaaaatcgttgtcattcaaagtgaaattaaacttgttttctttgcaataattcgcctttatttccttgtatatctgtaaactcttcacttttttgtaattactagacaattcggacttaaaaagagcctcagcatgtgtattttggaattgtgtagcttcataatgtgaaaattattcttttctatttgagtaaagtacagttaatttgaagtaaataaaaa

SEQ ID NO: 92073 - DNA, 435 bp, Homo Sapiens
ggattgcccggggctgcgcgccgggaacctcgcggggctggcgggcgccgcaccccctccctggccgcctgcgccccggggaggccgcccgcgcgcgacgggaccggcagcatgagcagcggctacagcagcctggaggaggacgccgaggacttcttcttcaccgccaggacctccttcttcaggagagcgccccagggcaagccccgctccggccagcaacatgccgtgggaagcacgagttgggaaaagatgggaagggaacttgtgccagtttcgccagctgtagccgtgttttttgggaggccttcccgaaacggggcacgtcggctggactgaggagaccggtgctagagcccgcggcctcctggcactaggagccgcaccaggggagccgggccaacccggccacgctcacatcagattacagaagat

SEQ ID NO: 92074 - DNA, 198 bp, Homo Sapiens
cttggtcctgcccatgtaagacattgtgacgtattgctgggccctacacctagatgatgttggattgtgacatacactttagcacagctcatggttgtgatgatgacacttacgccacaaaacagccaataggagagatactgccacttgtagctagacttacagaaatgaataaactcctgagtcttctgtagtaaa

SEQ ID NO: 92075 - DNA, 692 bp, Homo Sapiens
ccaaggtagcgaggcctgggtggcgatttcggcacgaggggtctttagtattcagcacactgggtaaagttcagtttagacacaatcaaattggcatcttttaaacataagtgaaatatagagagcttgaacttgagttacttaaagaagatacagtataattaattatacagaacaaaacaaagatgtgtttagagtgactctggcctgactcttgtccatcagcccctagtagcctatcttcagcctttgggaagtcttaacttcccaggttaaactagaatattctggaactgagctgtccaaatttcatcttaaagtggatcatttgactctgaaacacgattctcatggcagaaaaagccctggtgtttccttggagctggggataaaggccagtgagccagcctgtgatgagagctgcccctggcactatctgagtggaaagctcattgggacagccatgcagctatcagagccgactgaagccctgtcccttacccctcaggcacctgatgcttaacttgcctcctgggaaataatgatctagcatttacttggaacaatgattaatcatgttctttaataattgctgacatttgtattttaagctgtataccaatgttcgtatttgacattgattttctaaccattagagatatttaattaaaacttggaaatgaaagaaaaaa

SEQ ID NO: 92076 - DNA, 1374 bp, Homo Sapiens
tttccagcatcaggtgtgggacaggcacttgcctcagaccggggccacactgaggtctgcccttctcccgctggccgccacccaggacaccatgagccagtccggggccgtgagctgctgcccgggtgccaccaatggcagcctgggccggtccgacggtgtggccaagatgagccccaaggacctgtttgagcagaggaagaagtattccaactccaacgtcatcatgcacgagacctcgcagtaccacgtccagcacctggccacattcatcatggacaagagcgaagccatcacgtctgtggacgacggccatccggaagctggtgcagctgagctccaaggagaagatctggacccaggagatgctgctgcaggtgaacgaccagtcgctgcggctgctggacatcgagtcacaggaggagctggaagacttcccgctgcccacggtgcagcgcagccagacggtcctcaaccagctgcgctacccgtctgtgctgctgctcgtgtgccaggactcggagcagagcaagccggatgtccacttcttccactgcgatgaggtggaggcagagctggtgcacgaggacatcgagagcgcgttggccgactgccggctgggcaagaagatgcggccgcagaccctgaagggacaccaggagaagattcggcagcggcagtccatcctgcctcctccccagggcccggcgcccatccccttccagcaccgcggcggggattccccggaggccaagaatcgcgtgggcccgcaggtgccactcagcgagccaggtttccgccgtcgggagtcgcaggaggagccgcgggccgtgctggctcagaagatagagaaggagacgcaaatcctcaactgcgccctggacgacatcgagtggtttgtggcccggctgcagaaggcagccgaggctttcaagcagctgaaccagcggaaaaaggggaagaagaagggcaagaaggcgccagcagagggcgtcctcacactgcgggcacggcccccctctgagggcgagttcatcgactgcttccagaaaatcaagctggcgattaacttgctggcaaagctgcagaagcacatccagaaccccagcgccgcggagctcgtgcacttcctcttcgggcctctggacctgatcgtcaacacctgcagtggcccagacatcgcacgctccgtctcctgccactgctctcccgagatgccgtggacttcctgcgcggcccactggtcccctaaggaaatgtcccctgggggaactcactggggaaaaagctggattgcggccccgttccgaagggcccccgggaaccccaaggggcccctctacgtgcccaagttccccaacgggtggggaaacc

SEQ ID NO: 92077 - DNA, 428 bp, Homo Sapiens
  misc_feature (313)..(313): n is a, c, g, or t
cccaaaaagcccagtttaaaaaacaattcagggcgaggtgagggcacaaaggtagaaaaataaggggaaatgatatttctttaaagaacagagatccctgaatagcaccgggggccgttacagcccatgaggacatctccgagtccttttatatgacactagggacccccgtgccatatacagacactgttctcagagattagaagggggaaagaggatattgccacagttctgtccttcgaaatgactccagatgcttctgagtctgtgaggcccctgtgtccgtcatcagcaaaacaagtgagggagaagnttgaggagtgatgaccctagcagttatgggtttaagcctgggaatcttaagccacagagcagaggatttgggggctgaagaaaaagaccctccgcagcttcagcgcgaagagggc

SEQ ID NO: 92078 - DNA, 564 bp, Homo Sapiens
tctcgcggatgaggtcttccaggctgtgaaacctggcggtgtggaccttgttctctcccaggtgcaccttgagatagtactgctgctgcgggggctgcgtgcctgccggcacctcccctcccgccttgaactcccgcttgccaaagcggcaccaggcggcgaagctctccgagttcgtccagcagatctcctcgctcttgaggcccaggtggccgcaggcgttctgcaccaccagctcggccaccagcgggcggtagcggtaccagctattcaccacccggcccacgttggccgcgcccgcctcatacaggctgtcctggcggatctcgccttggtgcaggtggatgatctgcccgccgcccacgtagacggcccagtgcggggcgggcgcgggcggctccggcgcgggctgcagccacagcagctccagcaggtcgccgggttcgcagagcgctggcagcgcggtgaccgcgtagacgcttaggtcggcgccctgagggccaccgctcactttggaaaagatgcattcctggccccgaaaggcggaaaactgagtctcgttga

SEQ ID NO: 92079 - DNA, 1231 bp, Homo Sapiens
attttcaagcacctttccccccattgtatccgaatccctcttgtgtgatatctgtgacaaatagccttcttcttgtgttttctgttggactaattgtctcacgtaaagctatagaccttactaatttggcaggtattcaaaactgccattaagataggatttcatgtcagatacgtatttaaagagtaaagtcaaatttgtttaatgtcagatcagtgacagaagtgaaaagaaagtaattgtgaaagtgatgtttgagctattgtacacatctagcatatggaaagcaaatgcactcgaaaactactattctagaacatgaggcttcttcagcaacttgtgcactctgccattaataaattaaatttttcccctctagaaagccttaactatggcggaaactttttaaccttttatattttaataaataaaacattgtagtcccatttcttagtgtttgaaaggtgtgtcagtgagtcggccatgtctccatgtgtttcagacctgttcatcttattttatgatggtatatttcataagtaatattcccttacatgcaatggagctgattaaaattaatccatttcaatttctccatattggaacttcctcagctaccagatttctggtttggagaagtgctggaaagatttcaaagcctattcagttgtgtatgtggggatacgacagcaactgtgataccttgtagaatatgagtgatatgcaagctgtgttttttaattgttttaaaatgtaaattatggttatgctaaagtgaaaacctagaggaagctaatgattttatatactttgcacgaccaaatatggtcgtagtatgacgagttttatacattgccagagagttctgcctcctctgaaataacattcgcactgtagattgcatttcggcttttcctcctttcacattctttttgctttacacttcacgtcttcgcacctgccctacctcccatcctttcaaagaggtttctttcacgttccagaattcagattgttctgtgatttcttttacatcagtctacccatttctgcaagcagcccttgaagccctttgtgttgattccaaagtgtttggcaaagaaattgccagttggaacccctgggtagtggggggtggttccttcaaaaaaacccggggggaaccccctttccacaaaggttttcaggggaatggaaaaagggctttaggaaaaaaaccccccatttttcc

SEQ ID NO: 92080 - DNA, 543 bp, Homo Sapiens
tttttctctataggacttggacaggggtgttataattcattatgctatctatggcctgtttttaactgactgcccatagctccactagtttctataaacctagctagaaactataaaaaaatgctttggtttaaagaatgattcaaggattctggcaaaatggaaaggtacttctgataaaattgcaccaaaactacaaattaagaatctttttaactttagtggctaactttacaattacatgtacagaatcactccttttctagcagtcttgaggggtggggagactggagggagatatcactctcttttttaggtggagggtaaaagagagagcaccactgaaagccaaggttttaaatacaaaccacatactggtagatcaagagctttgagtgagatgtataagaaagtaagaactctcagaggctttcaagagtctgttgaataggataaaaaacctaaccaaaatgaattccagaaagcagaaatcctagtactgggagaatgatgtgaatttatcttttttaaagggagaatata

SEQ ID NO: 92081 - DNA, 658 bp, Homo Sapiens
  misc_feature (13)..(13): n is a, c, g, or t
  misc_feature (257)..(273): n is a, c, g, or t
cagcatcccaaanaaagactcaaaattttaagaaatatcaaaatatccagcacccaacaaggtaaaagtcacaatgtctagcagctaatcaaatattaaaggcatgcatggaagtaggaaaacaggacccataatgaggaggatattcagtcaaaccaacccagaaattacatagatgttaaaattggcagagaagggcattaaaacagtcattataactgtattctatatgttcaaaaagtcaagtagaaagatgnnnnnnnnnnnnnnnnntacctgaatcaaactcctagagataaaaacttcaaagtatggtgtgaaaaatatacttgatcaaaataatagcagattagactttgctggatggaagattaatataggtgaagccatactagtagatactgtacaaaatgagtcacagagagggaaaaaaagagaaaaatatttgaaaagaccattactgagctgtgggactgtaagtggcccagtaaatgaaaacttggaatccctgaaggagatgtagagaaaaataatggctgaaaactttccaaactaaaaatgataagcccatacccaaaccagttaaggtacatggaaaaaactgtgccaaggaataccataatcaaaattgtcaaaccagtgatacagtgaaaatctt

SEQ ID NO: 92082 - DNA, 389 bp, Homo Sapiens
gcctaggagttccagatttaaatcctggttctacacttcccaaacctcaggtaccttctgtggcctctctaacctcaatttttttacttgtaaaatggggacatttaatagtatctacctcagtgtcgtgaagactaaatgaagtaccacttgtaaagagtttattacagtgcctgacatatactgtatggttagtactgctaaaatgacttcttaaggttaccaaaaggaaaattccacaagctgaccacctttcctattgtgatggtcactggtatttcagctatgatcctttgttgtgtatttatccagactgaaagatgtttttctagtaaccatcttgcatcgtcttagtctccccattaaataaacttttcctacaaactaaa

SEQ ID NO: 92083 - DNA, 522 bp, Homo Sapiens
ggggggaaattctctcaaggaagccctgcatcttccccctccatctacagaaataatgtggtctctgattgcatggaggatgaaagcaacaagctctggtgcccaaccacagagaacatggataaggatggaaagtggagtttctgtgccgacaccagaatttccgcgttggtccctggctttccttgtcactttccgttcaactataaaaacaagaattattttaactgcactaacaaaggatcaaaggagaaccttgtgtggtgtgcaacttcttacaactacgaccaagaccacacctgggtgtattgctgatgctgaggaaaggagaaatatcttcagaggaagactgccgccatactgaggctgagcacagatttgtctttttcattgcatctgtcaagcttaaataaccacctttagaaataccctctgcaccacctgcttcaatcagctggtcctttgtgaagaacgtagagagaatgcggcataaccaccaataaaggagtcttgatttaaaaa

SEQ ID NO: 92084 - DNA, 399 bp, Homo Sapiens
  misc_feature (15)..(15): n is a, c, g, or t
  misc_feature (85)..(85): n is a, c, g, or t
tctgatctgctagcntaactattccccaacacctttaggaagataggtcttccctgaccctcagtctgaggtctagaagcccttntgccttgcctcacaggcatctttcccccctcccccgtcccctagaccagtccaacagcagcccgtgcagcctctgaagtccactcccagtgctagctgatgggaaccccatgggctcctgtctgctatacaaatggaacagactttcttcagagccaaccccagctgccccactgaagctggttgccacagtgattttcagtctcataccagattctgatctcttctcttgcccacctttggtgctgcagagtggatcatcttgttttatactcaagtcatcattaaaatttatagaaaaagagagaatttaaa

SEQ ID NO: 92085 - DNA, 614 bp, Homo Sapiens
ggggaagagtatgaagtcgacggcgcgccgaattcggcacgagggggaccgcggagcccgggatcccgtcagcggcggccgcggccgggcctgcgggagctgcggaggccggaggcgggcgctgtgcggtgccaggagaggcggggtcggcgggagccagcgagccacgggagcgagccaggctaaccttgccgcgggccgagccctgcctcgccatggaccaggactatgagcggcgcctgcttcgccagatcgtcatccagaatgagaacacgatgccacgcgtcacagagatgcggcggaccctgacgcctgccagctccccagtgtcctcgcccagcaagcacggagaccgcttcatcccctccagagccggagccaactggagcgtgaacttccacaggattaacgagaatgagaagtctcccagtcagaaccggaaagccaaggacgccacctcagacaacggcaaagacggcctggcctactctgccctgctcaagaatgagctgctgggtgccggcatcgagaaggtgcaggacccgcagactgaggaccgcagctgcagccctccacgcctgagaagaagggtctgttcacgtattcccttagca

SEQ ID NO: 92086 - DNA, 456 bp, Homo Sapiens
aggtcctccctgggccttctagagcccctggttctcactccctttgaacactttccagcctggctaatagcccactgcatcctggcctggggtacaggtggccagcacaggtgtgggggccagcttccaacacaagcacgggtaggtccctctgcagaccatgggctgcaagaggcccggccttgcccactgcaggggccctgcgcagggctgggcacgaagcaggtgggtgtccaccaatctagtatccaaaaccctgcttggttcacccccacctctgttgaaggaaagcaacactgtgatggagaggagcagctgtggattcaaatcctggcttggccactttctagttgtgtgacttggtgcatctgccctcatctcctcagagacaaaaatggcaacacctcccttcttgggttactatgaggattaaataacaaaacctccaagaagcag

SEQ ID NO: 92087 - DNA, 523 bp, Homo Sapiens
cattgagtatcacactcagctctgctgtgttaactttgtgaaactggatggaacaaactttaacttaccaagcaccaagtgtgaaagtgactttcacggttccttcataaaactataataatatccgacactttgatagaaaaaaattcaaagctgtgcctttgagcctatactatactgtgtatgtgtggaaataaaaatgtattgtacttttggagaattttttgtaggcatttttctgtcagatttgtagtaatttgtgaggtttgttagagattaatataggttttctttctgtattataaaatgcaccaagcaattatggtggacctattaccctatgggtaagaaataaatggaaatatgacatcggatgtttcagcaactgttctgtaaataaaatctttgatcacaccactcagtgtgataattgtgtctacagctaaaatggaaatagttttatctgtacagttgtgcaagatatgaatggtttcacactcaaataaaaaatattgaaacgaaa

SEQ ID NO: 92088 - DNA, 845 bp, Homo Sapiens
  misc_feature (585)..(585): n is a, c, g, or t
  misc_feature (634)..(634): n is a, c, g, or t
tactgggggagagagtatgaagtcgacggcgcgccgaattcggcacgaggtgatgcaagaagtttctaggaaaggccggacaccaggttttgagcaaaattttggactgtgaagcaaggcattggtgaagacaaaatggcctcgccggctgacagctgtatccagttcacccgccatgccagtgatgttcttctcaaccttaatcgtctccggagtcgagacatcttgactgatgtagtcattgttgtgagccgtgagcagtttagagcccataaaacggtcctcatggcctgcagtggcctgttctatagcatctttacagaccagttgaaatgcaaccttagtgtgatcaatctagatcctgagatcaaccctgagggattctgcatcctcctggacttcatgtacacatctcggctcaatttgcgggagggcaaacatcatggctgatgatggccacggctatgtacctgcagatggagcatgttgtggacacttgccggaagtttattaaggccagtgaagcagagatggtttctgccatcaagcctcctcgtgaagagttcctcaacagaccggatgctngatgccaccaagacatcatggacctatcaggggtcgatgaggtggtggnagaacaacctgccactgaggagcgccccatgggtgtgagagcagagcctttgaccccagcttgtacaagatggcctgtcccacgacacagacagactcttactccatgtacagaaccactccctgtcagaagactcctactctcgaataggagtaaagggattgtccggatgacatagtaacaaacacataaccaaaagaagggagaatcc

SEQ ID NO: 92089 - DNA, 619 bp, Homo Sapiens
tcacagacccacggtcattaaaaaatgcaattatttactttttttcatttaaacacatttctttgagattgagcttttgggaataaccacctttccaccattacaataagagataatttcacgtttagtctaatgtacaaattggatttttaaaaaatgagctctatctgtgaagcccttattcctatagaatgtgtctttttgagtttattacttattacagactctaaaaacaacattgctgctgattttcaagtaagctgcctcttctacatagcaaataggtacacttcacttttccctgttttttcttagggcgtgctgttgatttttattgttgtctgacaaaataatttatcaaacaaaagggagaaagactaaaaaatgttttttccacttttctgtatcatgcataatcagcaacaaccaatacaatatttggcaagagtgaacaaaaataaatttactcttgctccttagaaatacaagggttcctttttagttacacttctttcttttactttgtgtcattcagtttagagcaattaaatcttcttttctccctgcgtttccagctcagcgcccattacgttctgtctctttccttagtgcattattg

SEQ ID NO: 92090 - DNA, 472 bp, Homo Sapiens
gcggccgctcctaggctgctccgggaagccttcgatttgcagagcggagtcgagaaggggtggagggtgggggaccggctggaggaggagcctggagctggggccacccgtaacccgcagcagctcccgcgtgggctggacgcagctgccactcgaccgctgcccgggccctcgaggtgcgctcccggctgtcctgcccgggagggctgggggcgcggctctttctgcgcccgggcgcgggtggggctggaatggggagaaggtgaggagctgtggccgcccggtctttgggaggctcgcgcgcgccaccgtgtggcggaagaagctccctcctctgccctctgcacaccggccttgtcaccaggcaggggaaacagctgctgacccaaatgcgaggtgcttcgtatttggagggatcgggggatcaggaaagatggggtagcaggacctgagggataaccagttatttgca

SEQ ID NO: 92091 - DNA, 327 bp, Homo Sapiens
tgcggccgcccagctcacctcagaaagcctcagtgatttccttttgtctctcagtacaaatgatgtccggctgtgcgcaatcgtcaggaggcatttgagaaaccggccagcacggacggggcgttaatcattagcacgtgcagctcagggccctccagcggctcctcatcacccggaggacccatgtctctggaacacagctcaaccttgcgggaacaggaccaccggccagtgtgtgcagactgtgtgcagaaggtgcttttgacacttagttttgctatctagaaacagaatgaataaatgatcttttacttttctgcaagaggt

SEQ ID NO: 92092 - DNA, 326 bp, Homo Sapiens
tacaggcctgagccaccatgtccagccaactttattactattaagcaggttcaaaataagtcagtaactttccctgcaagaaaccttaataaaatgagaggagcttcgatcatgttgtatcctatagggctcagtcttaatgatttgatgcaattactgtcagagggtttctgattattttggaagataaaaataaattttaaacctaaattgccaaattaaaggcatcatcttgtgaaaaattccataaaattgaatatgaacaggaatgatatcacacaaaagggaaataacactaactcagggggttctcacttggtggggtg

SEQ ID NO: 92093 - DNA, 943 bp, Homo Sapiens
gggtttgcgcagaccattttaagattttcagtctcaacaaaacactattaaaacaaagaatctagtaaaatattgtgcatgtactgctaaacaattctagcaattttattaagcaatacctttattatttttgaatattcttaacagactggaacgaaacattttttttcaaaacaaaatatgcatactgtacgcatgtcgcagggttaagtatgatgcagaggttaaagtctgtttgaacaaaaacaaatgcccggggaaatttcatagctataaagttaataactaaattttgttcactaagaggaccttttctatggatttccttcatctctcagtcacactgcaaacttatctgaagtgcacttcccaagtgtagttagagaataggaaggaatgtaaaattcttttttaattattcgtctttgttcgtttgtttgtttttttaaaaacagcccttattaactcttccttccactgattctactgtaaactcataaaagccttttatagaaagcaaattcatgtacactcagcaggtgaaatgttcccacaaagaaaataaaatacaaacagtgatcagacctcttttcctcaactacctagagcatgttagagtgataaagtttttgcacgttaataaaaatggctgacctatttattttttaaaaaagaagttgttcctctgtgataatgcagaattgcatacactgtatacctggaataattttaaaccatatgttagggaaatactggaataaaattgtgtatattctgtatattgcaggtgtttgagcatttctagtgtctcttccacaacaataagggaggaaaagaagtccagatatgtgtccgcaatccctttgttccctgtaattacaatggccaaaatgtgctcctatattactgcaacagaacaaaaatcacaatgaaagcccacctt

SEQ ID NO: 92094 - DNA, 343 bp, Homo Sapiens
tcgttcccagtccccagcctcttggcgttttgtctgacgcctcttttgtgtcggactcgacgctttcagcccgtcctccagtgttttcatccccctctccccaacgttgcactctcagactccgcaaaccccgcccgatttggttcaattaaagttgaccagtatttgttccgagcttaggaagtacttggccaggccatgcgaggcctatatgagaagaatgctaagttcatctgcaagacagacatacagcatctactcttcaagactgctttaaggataagaggaattgaatgtaaagtgctgagttatccataaatgttgtatattattcaaaaaaaaa

SEQ ID NO: 92095 - DNA, 820 bp, Homo Sapiens
cagtcgacggtaccggacatatgcccgggaattcggccattacggccggggtgtggttaacgtataccgattgataaccagaggaacattggaagaaaaaataatggggttgcagaaattcaagatgaacatagcgaatactgttattagccaagagaattctagtttgcagagcatggggactggatcagcttcttgatctgtttactcttgataaggatggcaaagcagaaaaagctgacacctctacttctgggaaagcaagtatgaaatcaattcttgaaaacctgagtgatctttgggatcaagagcagtcatgattcagagtacagcctggaaaattttatgcattctctcaagtaactatcaaatattgtaaatgcaattgctgctagttcagttacatttctgctgactattcagcaaatttctaagtttatggtgaacttttaactcaatgtgtaaatagatctggagaatattcagcataatgctggctcttgtttcactgggggaaacaagttattctcaaatatttgcactgtattaaatttaaatgttaatgtgaaatggtttaaattttacatgctgaaaagctgcagagcaagaggaaccaaacaggtttatctgtgctaccaggaggtgttcttaattgggaacaggactcctatctttagtcacttcgtacaggatgatatccatgagtaattaagagtagaatatgtttgtcttataaaatagaaatgattgtataatttgatataaaatagggaataagttgtataaagcgtaaatgagcatagatttagaattgagataa

SEQ ID NO: 92096 - DNA, 407 bp, Homo Sapiens
gctggtccttcctgaagaactggatacagagactataaataacaaggttcccccaagaggaatcattgtttctatcatatgtaacatgcaatctgttggcctcaatagcaccgctttgaagattgcccttgaatttgataaagacagatcagactgataaccttaacaccataggtgcaaaatgagttgttctgaggtttttttgaaacattaaagttccaaaacatgacatttttaagaataaatttgaaatagagtataactgaatgcagagaattatgtacctctaattgcttaattttgtaatggtcttttattgtagaattggttctttatactcagggaagtaattatattgtttttactttttgaaaaaagtgttaactcttgaaataaaatattctgat

SEQ ID NO: 92097 - DNA, 483 bp, Homo Sapiens
tttaccacactttgatgaatgttcaagttgttaacaaggtggggctagtgaaaggccttctcacactcacaacactctaggaggaagccaataatgttgagaaaagtgtgtgctgtgactaaaggtttctcaacagtgatcgcactcaacagttttctcttgagaatggagttgataatgttgagtgaggtatgagggtcggccgaaacatttcccacatagctgacactggtaaggcctctcttgagtgtgagttctataatgctgaatgagatatgaattccgactgaagactctgccacagtcacaacactggcaggctctctctccaacgtagtcatgtttccgctgataacgaattaagtatgtcttgctgtgggacaacccaggaggaaggactcttgctgcctcatgggctttgagatgttgaagaagatgcacattctggagaaaagctttgccgcactgaaaacattcaaagtg

SEQ ID NO: 92098 - DNA, 961 bp, Homo Sapiens
  misc_feature (221)..(233): n is a, c, g, or t
ggtccggaattcccgggatatcgtcgacccacgcgtccgcataagaaaattatgaaaactaatagccaaaaaacctttgagattgcattaaagagaagggataaaggaccagcaataataccttgtaagttgcttttgtttgtaaaatctgagcttatagttttccttagtgagtaaattcataaggatgggaacatttaaattaagttaatgggcctttnnnnnnnnnnnnnggaaacactcatacctgtagttggaggatgaatactggagacgggttaccaatgtcaggttatactaaaactaaatcagaaagtctgaatgtagcacataatggttctcttctgttgtccaaggctgtaaaatggacagccttgtcacacccccccggtgctgttttacaacgtgagggtagacgctgtcagtaacccagagggaccaggccttcctaggttttctaggcagtcagctgttaaccactcacttagtaaatgtcataactacacctgctccaggaccaatcagtgaaacctgctcggaattaaaggcttcctctgggtgcctgctgaacaactgagctcatgtcatgggcatgtggtggtttctctgttgcctgaaagagccattaaagtcagtcgtgcgtgaagcatctctcttctaaaggatgtgtatttccataaatgctttctgaggatccggtacaaaatgatttccccaagttctgaagtggcttgagaccatgtgggtcccaagtgttataaaagactcctcccccgggtcacccttttgcctgggcattcctggtaaagtacatcttttggaaatcccggggaataatcctccttccagagatgctcatttgggtaactctgtggtagggaaaatagccactttataacagcttcaaagtacttaacctaaaaggagtagccctttaataccttaaaaaatggaccgaagc

SEQ ID NO: 92099 - DNA, 345 bp, Homo Sapiens
ttttaaaggcccattaacttaatttaaatgttcccatccttatgaatttactcactaaggaaaactataagctcagattttacaaacaaaagcaacttacaaggtattattgctggtcctttatcccttctctttaatgcaatctcaaaggttttttggctattagttttcataattttcttatgttgcacacaaaaacaagattcctctctaaaacgtagaggatggggaaaatgcagatgctgtttttccaactaaaaatgtttacaaaagaacagactgtctgaacaaacaaaaaaaccccaccccgttaagctgggtaggaccaatcaggccttataagtg

SEQ ID NO: 92100 - DNA, 385 bp, Homo Sapiens
gagctttgcaaagagcattcctcaggaagattcctcagaggtcctctacaattctccaaaaccagtataatgtagttagtaagaatatggattcctgaagtcatatcccagctctctcactcacttctctgtaaaatgaggacaatgataatgataatgatgatgattagtactcctagaggtatgatgaggataaaataaaataatacatgaaaacaattttgaattgcgctcagcacctgtaaaagcattcaatcaaaggaagtgattatgctacatgttacttttttatttgtataaaagtaccacaaatgtattttatccagatgataaacatttagttgatttccaatttttcactttaataaacaatgtcaagctaaaa

SEQ ID NO: 92101 - DNA, 469 bp, Homo Sapiens
gtggctaccagcctgactcatttccaatactcctttgccaccaggtatggctgtgtgattaaagtcagagaagtgagttgggccacttttgggcctggattttaggacttaggtgtggcccttccacacccctttcccagtccataggctgcacctcacgctgtcccctgccagcctgggacaggcttcttgccaggagaaagaaacttgctgggaccacagtgcaggatgggcactccgtgatggccccagccagcctcctccgcggccctgcctgccctgtcttgtgactgttttacgtctggatggcggggatgtggccagcttgagtgagatgtgctgtaggtgtgacacgaagctggatttggaaaacttagcatgcaaaataatgcaatcaagctttatgttgattacatcttaaatcacattgtggatgttaaataaaaatatgagaagaatttaaaaaaaa

SEQ ID NO: 92102 - DNA, 547 bp, Homo Sapiens
cttcttcctgctgcactgaacccctgccctttcattcttgggcctgtgctaatttctgtgcattcccaactgtgatttttcaccaatttaggggaacctcctctgccagggcctgcttctccccagcagtgcttgcaggggcctgggctggctggcatccctgggtcgatgggtgctcctctccctgcaggctggccactcagtactccttgtccctggcctcgcagcccacccgggaagccacagtgaccagccaccaggtgtgccatcgtggaggaagtccaggttggagaggtggtcttctgtaagcaggtccatctctccacccactgaggcccctttctgcctgtgacagccccacctcgagggtcatggcacagccatcagctccagctcccagcatgctactgccacgccccgagtgtccgtctgggcactggtccatgacctgttgtctttctgtatctactttctgcagcccctcactgaggaggcctcctgggtttgtccagtgcctgctattaaagctttgctccaagatcaaaaa

SEQ ID NO: 92103 - DNA, 1376 bp, Homo Sapiens
  misc_feature (93)..(127): n is a, c, g, or t
tcgtcttttataacatatatacctcatatggcgccctcgctttgctagccgaacgaccgagcgcagcgagtagatgagcgaggaagcggccgnnnnnnnnnnnnnnnnnnnnnnnnnnnnnnnnnnncagtcgacggtaccggacatatgcccgggaattcggccattacggccggggggaacaagccatggtggcggcgacggtggcagcggcgtggctgctcctgtgggctgcggcctgcgcgcagcaggagcaggacttctacgacttcaaggcggtcaacatccggggcaaactggtgtcgctggagaagtaccgcggatcggtgtccctggtggtgaatgtggccagcgagtgcggcttcacagaccagcactaccgagccctgcagcagctgcagcgagacctgggcccccaccacttcaacgtgctcgccttcccctgcaaccagtttggccaacaggagcctgacagcaacaaggagattgagagctttgcccgccgcacctacagtgtctcattccccatgtttagcaagattgcagtcaccggtactggtgcccatcctgccttcaagtacctggcccagacttctgggaaggagcccacctggaacttctggaagtacctagtagccccagatggaaaggtggtaggggcttgggacccaactgtgtcagtggaggaggtcagaccccagatcacagcgctcgtgaggaagctcatcctactgaagcgagaagacttataaccaccgcgtctcctcctccaccacctcatcccgcccacctgtgtggggctgaccaatgcaaactcaaatggtgcttcaaagggagagacccactgactctccttcctttactcttatgccattggtcccatcattcttgtgggggaaaaattctagtattttgattatttgaatcttacagcaacaaataggaactcctggccaatgagagctcttgaccagtgaatcaccagccgatacgaacgtcttgccaacaaaaatgtgtggcaaatagaagtatatcaagcaataatctcccacccaaggcttctgtaaactgggaccaatgattacctcatagggctgttgtgaggattaggatgaaatacctgtgaaagtgcctaggcagtgccagccaaataggaggcattcaatgaacattttttgcatataaaacaaaaaataacttgttatcaataaaaacttgcatccaacatgaatttccagccgatgataatccaggccaaaggtttagttgttgttatttcctctgtattattttcttcattacaaaagaaatgcaagttcattgtaacaatccaaacaatacctcacgatataaaataaaaatgaaagtatcctcct

SEQ ID NO: 92104 - DNA, 570 bp, Homo Sapiens
  misc_feature (50)..(171): n is a, c, g, or t
caagactccgtctcaaaacaaacaaacaaagacttcagccttgaggacannnnnnnnnnnnnnnnnnnnnnnnnnnnnnnnnnnnnnnnnnnnnnnnnnnnnnnnnnnnnnnnnnnnnnnnnnnnnnnnnnnnnnnnnnnnnnnnnnnnnnnnnnnnnnnnnnnnnnnnnntctgtgagaattaaacaaggggatgtatcccaagcgctcagcatgtcgtgcacaccctgaacatggctgctggtattagagttttttctttgactgaatttggaaggaatgtctacatctgtttgctaatcgaggtcccatggtgacacggctgactttaagattcttttaacaccgggattctgccatcctattaaggatatacagaagcaaaaaagctgttagcacatgtccagcctctgagtcaaggagcagagaaatgtgagttggttgttgaagaaatgcaaagactgaatttgcttcatgaccccattttttggtttatcatttgagcagactgagactttccattaattttaaaaagtcatgaccaaaataaaaataaaattattcatgaaa

SEQ ID NO: 92105 - DNA, 249 bp, Homo Sapiens
gcgagaacttaaacccagagtttgatgataaggcctttgtttgtaataattctgccctaaccacctatacacattcactaaatgctcccacagttgcctatgaaaccatctgatcatatccacaaacctaattactttctctttcaaaatcagttctaataatgtcaaatcagtctttattccatcagtggtgcaatgaggaacgttcttagtaaccaggcaattgatatccttaaaaatgtctctgag

SEQ ID NO: 92106 - DNA, 708 bp, Homo Sapiens
  misc_feature (15)..(15): n is a, c, g, or t
  misc_feature (285)..(294): n is a, c, g, or t
cagaaactccctagnataatagagcagcaaacctagagttaaaatttgatgtgaataagtagataatccatatgcttatgctggaattcccaagtaacttttaaaatgtaaaataggtgccctttagtttaatgtgcaaaggttagggagttccattcactcatttattcattcagcatatttattatgtctctatgctatgccaggaactcctaggtactgaaggaacaaaagtaaattcttggcttaaagttgctcacaatttagcaggaagagacatgtttnnnnnnnnnntttctagacccaaggtgatgagtaaacaaagctactcttgtgctgggagtaaaaagaagagcactgatgggcaggtgggcgagggatgcagaagcctttccaaaagaagtgagttttgaactatattgaaacatgacaagaattcaccagtctaacaaaatgggaaacgtattcaaggcacaggaagcaacaagtgcaagacccaggaggaggcacccagacccttgggtacatattctcagctcctaaggacctccttcctaaagaagaaagagttgattgaagatttgataagcatgcatgtgcgtaggagtgggtctagtgtcattggaaaagtgaacctggaaataaagagaaaataaattgaactcggagctaattcatgccttggaattaaatatacatatatataaa

SEQ ID NO: 92107 - DNA, 881 bp, Homo Sapiens
gtctgtggagccaccgctcttacaaagctcggctgcccctacggctctttctgatcattgccaacacaatggcattccagaatgatgtctatgaatgggctcgtgaccaccgtgcccaccacaagttttcagaaacacatgctgatcctcataattcccgacgtggctttttcttctctcacgtgggttggctgcttgtgcgcaaacacccagctgtcaaagagaaggggagtacgctagacttgtctgacctagaagctgagaaactggtgatgttccagaggaggtactacaaacctggcttgctgatgatgtgcttcatcctgcccacgcttgtgccctggtatttctggggtgagacttttcaaaacagtgtgttcgttgccactttcttgcgatatgctgtggtgcttaatgccacctggctggtgaacagtgctgcccacctcttcggatatcgtccttatgacaagaacattagcccccgggagaatatcctggtttcacttggagctgtgggtgagggcttccacaactaccaccactcctttccctatgactactctgccagtgagtaccgctggcacatcaacttcaccacattcttcattgattgcatggccgccctcggtctggcctatgaccggaagaaagtctccaaggccgccatcttggccaggattaaaagaaccggagatggaaactacaagagtggctgagtttggggtccctcaggttcctttttcaaaaaccagccaggcagaggttttaatgtctgtttattaactactgaataatgctaccaggatgctaaagatgatgatgttaacccattccagtacagtattcttttaaaattcaaaagtattgaaagccaacaa

SEQ ID NO: 92108 - DNA, 531 bp, Homo Sapiens
gactgaagattggcaaaaactaaaataaattaaaactgcttacaccagaagccttttagagaagcatgagactgtttgactagtcctacctgggttccggaaatacatgcatcatctgtacttgaagaggccagtgggagaggagaggagggggaggtcatttatctgagtctctccagaagtttttaaggctacattttggaatcattaaacttggccttctcaaactcaatagcagatctctgagattctccttttattattttccataggcaatgggaggaaaggtggatctttttaaataatagaagttttaaacagtccttaacgtgcttttgttgaggcatcttccagaatgtaaggtacagcagctccggtttctattattgtgacttgaatgtcaggattcaagggctcagtgtcaaagataattggctttgactttttgtaatctaggagcagcagtttgtgagatgtttattcaaagtgttagcctgtttttctaccaacaataagctagaaaagacaaaa

SEQ ID NO: 92109 - DNA, 171 bp, Homo Sapiens
aggcgagtccggctgtgaagttaccgtcggtggcggccccggggccacctccgctgtcacctcctccaccggcgcccgctacattcaaccggcccaagccgtcggggctggccacgtcctcgtcctcgtcctcgtccttaaagtgcttctcctggccgttgcgccgggcgt

SEQ ID NO: 92110 - DNA, 1049 bp, Homo Sapiens
  misc_feature (538)..(586): n is a, c, g, or t
gattccctttaagatctttaaggcccagaatggagttcctcagggctgcaggggactgtggtgctaacaattaaactgttcaagactttaaagagttgaaggggactaatgggtatccctagcatggcctcctagatgggaattaactggcaactcctactgtgccattcccagtatgtgtgcttccctttagcctcccatagaattggctgaaacaccctaccaccgttttctgtttccccactaccacacctgtgttatgggtgtcagcctgtgagtccttgaacccttccagagggctcccaagggagggtgatcactgcccttccataaaaggctgaggaaagccaagtgagaagattcaattaatttgggcaagttatttaacatctgaacctgtttttctcttcattgtttattacttaccttgtccaaaaaggtcataaagggtagggctttttctgttccacctctgtactatatttctccccaacaaatatctgcccctgaggacctcaataaaggtttggtcaagtgnnnnnnnnnnnnnnnnnnnnnnnnnnnnnnnnnnnnnnnnnnnnnnnnngacaaaaacgaccaaaaacaacaggggcgggcggcgcgcccgcgcagaaaaaattcatccgccgagggaggggcccccaacgttagcggcagcagccagccagcgttcttttgttgagaaacgagggggcccccaaatgaagggagcgcgccgttataataaaaaagcgagcgtagcgcgcgcggcggcggctttataaaaaacacagctgtctgatcgggagagaaacacgcgctagatcacgcgaggggcactcatgggggaggaaaagagcccacaactatctgcggggcggggaccaaaactggcggcacaaccacccccgccgagagagtaacacgccgccccgcggggagccaatacaaaacggccggggtagtagagccgggtcaaccacgcgcgcgttagcggcgcgcgcgaggaaagcgcgcccgggggagtagtgctgtcaacagttatcccg

SEQ ID NO: 92111 - DNA, 429 bp, Homo Sapiens
caacctgactttcctattgactcatcaggaaccagtcctcagtctggtcaagttgtttcttatttgtgagcagttcaggctatctcctgatggggatgaggccaaggctttcttatcttttggttgtctctgcttaatggaggagcctggcctaggatggaggcctggcttagatctttcattccacctcaggaatgaggttgtgatctttcctgtcctgaccctctctgaattatgtttcaatagtactcttgattgtctgccatgttgttgaagcaaatgaattatttttaaatgttaagtaagtaaataaaccttagcccgtctactgtttgggaagatccttctgtgctagagggagaaataaaatttcaacctgtgttcctcagcccctgaggaagctattaaggggattcattacaagtaaaa

SEQ ID NO: 92112 - DNA, 453 bp, Homo Sapiens
ttttttattaaaaacatattttaataatgctaacctcatataattcattatatttccaactaaagtatataattatataaggaggtttcagtttaaatcatgtccatggcactgaagtttcttatagacaatatttagttgagttataaagcagaatgttcaaaaagaatgacctgtgcctcattttcaggaacaatttgtttatgaagtcgaatctgctccaagccaggactttctagagaatttggggaagtgttacaaattgaggcagttacattataccttgctgactgataaaagctgtagtattcaagtctattttcccttgagttttctgatgcctttagtttttgtttaaactgaacaactttgtagatcaaaaaaatgattaaaacacaagctaagatgaaaaaagctagcaaaatgtcaaaagcctcattcaacttctcaact

SEQ ID NO: 92113 - DNA, 555 bp, Homo Sapiens
cattgccactgggctcaaaatacttccgggggacatgaaactctcccactggtctgagtaattctcccccttcctccacacttccactgcaaaccaggagacagtgcggccagcaagtaccagctctgcagagaaaactccacctggcccctgttcatgcccaagagatttattcacttattcaacagccatttgggaagccactgcttcagaacgctgactgcgtggtgggggacacgaagccaggtcctcagctgcttggtactggctttccctgcctgatccaggggtcttttcaggcaggagtttccttgaagggaagtgatggccccaagcctcttaatcagaagcccaggtaggcagcttctctctttggggtagacacactgggactgaatgctttaggggaccctggggagggcctctgttttggtaggggcacctgtgaactcaggcctccaggctacatcattggaagtgttttactttcttttgggaatgtaactttttcctttgagttttcaactgaaaaataaagctggcagaatccaaaaa

SEQ ID NO: 92114 - DNA, 371 bp, Homo Sapiens
aaattatttattagtaactctcaagatcattttgtctaagtgaattggagatcttataatttaaagtgatccttaaatagcaatacaattactgttgatttttaaaattgatagacatttaaaatttttaaataaggtaaaatctatagagtcacataattgcagcattatatgaagttataaaaatcaatccttttataaaaattctggctaataaatctaagtaaatgtaaaatttaattgaactttatatttttacaattgtgaacatttatgaaagcaatgtttgctttatctcaggggttggaaaactctggctctggaggccaaatccacctgtttttgcaaataaagttgtattggaacataaa

SEQ ID NO: 92115 - DNA, 493 bp, Homo Sapiens
gcggccgcagccctgcccgcattaccctctggcccagggagactcgcccccgccttgccccggaggagctggcactcccctgagtggcacattcagggtagaaaaggcacagggtggagaccagtgggcagtgccactcggcagacatctaggtcgctggtccccttcctcagttccctcggagcggtcttctgtgccctcgcaaaagttcaagaggcactcagcctgcgtgtgcgcccagaagagagacagcagcgaccaggttgagtcattagccagccgggactcccagcccttggcctccagcaaagagatgcggagcccgcacacccaggtcctgaagagcaagctggaagaggtggtggtgtcctcccaggaccagcagattgtggccctggtgctgacccgtctcaagaaggcccagaggatacgggagctgcagcagcaggcggctaaggcctgggaggagctgaagcgctcggatcagaaggtc

SEQ ID NO: 92116 - DNA, 461 bp, Homo Sapiens
  misc_feature (106)..(115): n is a, c, g, or t
aactgtggtttatccatactaggaaatactacttagcaataaaaacgaacaaactgggtacaggcaccacgacctggatgaatcaccagggaattaggctgagtgnnnnnnnnnnttgcaaaatgttgtctactaaatgattccacttatataacactcctggaatgccaaaactatagagatgaaaattaataattgctgtgttaatgaagaagtggaaatgggagggaagtggctgtggctacaaaagggcaaaatgagggatattatagtgatgaaagtgttctttattttaattatatcaatgtcaatatccagactgtgataatttactgtagtttacaagatgttatccttgggggaaactgggtaaaatgtacatgagatatctctgtaacatttcttaaaagtgtctgtgaatcaacaatgatatcaaaataaaaagtataatttaatacagc

SEQ ID NO: 92117 - DNA, 594 bp, Homo Sapiens
  misc_feature (71)..(102): n is a, c, g, or t
ctttaaaaatgaaaaacagtaaagagcacacatttttatttactcacaacactgaataattaatgtaaacnnnnnnnnnnnnnnnnnnnnnnnnnnnnnnnncctctagagtaactttacaaggccttctcatgaacagccttaagttttattgtcaaaataaatgcacttattttgggaaacagtttgaagtaagtaataagcatttgccactgtacttacaacttctcttgaagttcgctttctatttaggtcactagcttttaaataaagccaaccctggttctgcgttacttactacattttacctatagtcattcccacaaaggatgcaatattatattacaaagaaatattactttaaatttgttgaaaaatagaaggaccaatttagagctctgacctaggttcagtcctggaaatggggtctttcacaaattcagatccaattacctccacagttttattaacggtcaggttattagcaaacccgacaagcctaattgggtaacaattcactccctcattgtgttttataccaaatgccgtcggagaaagtttataacacactttataaaagcatcaatttttctg

SEQ ID NO: 92118 - DNA, 2166 bp, Homo Sapiens
ggtccggaattcccgggatataaaagcgccggccctccgcttccccgcgagacgaaacttcccgtcccggcggctctggcacccagggtccggcctgcgccttcccgccaggcctggacactggttcaacacctgtgacttcatgtgtgcgcgccggccacacctgcagtcacacctgtagccccctctgccaagagatccataccgaggcagcgtcggtggctacaagccctcagtccacacctgtggacacctgtgacacctggccacacgacctgtggccgcggcctggcgtctgctgcgacaggagcccttacctcccctgttataacacctgaccgccacctaactgcccctgcagaaggagcaatggccttggctcctgagagggcagccccacgcgtgctgttcggagagtggctccttggagagatcagcagcggctgctatgaggggctgcagtggctggacgaggcccgcacctgtttccgcgtgccctggaagcacttcgcgcgcaaggacctgagcgaggccgacgcgcgcatcttcaaggcctgggctgtggcccgcggcaggtggccgcctagcagcaggggaggtggcccgccccccgaggctgagactgcggagcgcgccggctggaaaaccaacttccgctgcgcactgcgcagcacgcgtcgcttcgtgatgctgcgagataactcgggggacccggccgacccgcacaaggtgtacgcgctcagccgggagctgtgctggcgagaaggcccaggcacggaccagactgaggcagaggcccccgcagctgtcccaccaccacagggtggggcccccaggggccattcctggcacaaacacatgctggactccaagagccccaggcccctgcgcactgcgcagcacgcgtcgcttcgtgatgctgcgagaaactcgggggacccggccgacccgcacaaggtgtacgcgctcagccgggagctgtgctggcgagaaggcccaggcacggaccagactgaggcagaggcccccgcagctgtcccaccaccacagggtgggcccccagggccattcctggcacacacacatgctggactccaagccccaggccccctccctgccccagctggtgacgagggggacctcctgctccaggcagtgcaacagagctgcctggcagaccatctgctgacagcgtcatggggggcagatccagtcccaaccaaggctcctgtgagagggacaagaagggcttcccctgactgggtgcctgtgctggaggcccagggctccctgctggggagctgtacgggtgggcagtagagacgacccccagccccgggccccagcccgcggcactaacgacaggcgaggccgcggccccagagtccccgcaccaggcagagccgtacctgtcaccctccccaagcgcctgcaccgcggtgcaagagcccagcccaggggcgctggacgtgaccatcatgtacaagggccgcacggtgctgcagaaggtggtgggacacccgagctgcacgttcctatacggccccccagacccagctgtccgggccacagacccccagcaggtagcattccccagccctgccgagctcccggaccagaagcagctgcgctacacggaggaactgctgcggcacgtggcccctgggttgcacctggagcttcgggggccacagctgtgggcccggcgcatgggcaagtgcaaggtgtactgggaggtgggcggacccccaggctccgccagcccctccaccccagcctgcctgctgcctcggaactgtgacacccccatcttcgacttcagagtcttcttccaagagctggtggaattccgggcacggcagcgccgtggctccccacgctataccatctacctgggcttcgggcaggacctgtcagctgggaggcccaaggagaagagcctggtcctggtgaagctggaaccctggctgtgccgagtgcacctagagggcacgcagcgtgagggtgtgtcttccctggatagcagcagcctcagcctctgcctgtccagcgccaacagcctctatgacgacatcgagtgcttccttatggagctggagcagcccgcctagaacccagtctaatgagaactccagaaagctggagcagcccacctagaagctggcc

SEQ ID NO: 92119 - DNA, 840 bp, Homo Sapiens
cggctctggcacccagggtccggcctgcgccttcccgccaggcctggacactggttcaacacctgtgacttcatgtgtgcgcgccggccacacctgcagtcacacctgtagccccctctgccaagagatccataccgaggcagcgtcggtggctacaagccctcagtccacacctgtggacacctgtgacacctggccacacgacctgtggccgcggcctggcgtctgctgcgacaggagcccttacctcccctgttataacacctgaccgccacctaactgcccctgcagaaggagcaatggccttggctcctgagagggcagccccacgcgtgctgttcggagagtggctccttggagagatcagcagcggctgctatgaggggctgcagtggctggacgaggcccgcacctgtttccgcgtgccctggaagcacttcgcgcgcaaggacctgagcgaggccgacgcgcgcatcttcaaggcctgggctgtggcccgcggcaggtggccgcctagcagcaggggaggtggcccgccccccgaggctgagactgcggagcgcgccggctggaaaaccaacttccgctgcgcactgcgcagcacgcgtcgcttcgtgatgctgcgagataactcgggggacccggccgacccgcacaaggtgtacgcgctcagccgggagctgtgctggcgagaaggcccaggcacggaccagacttgaggcagaggcccccgcagtctgtccaacaacacaggtaccctttctctctgcctgcctctcctccttgcaggccgcggagctgcttacgttcaccctgactttccctgcagggtgggcccca

SEQ ID NO: 92120 - DNA, 843 bp, Homo Sapiens
acttcccgtcccggcggctctggcacccaggtccggcctgcgccttcccgccaggcctggacactggttcaacacctgtgacttcatgtgtgcgcgccggccacacctgcagtcacacctgtagccccctctgccaagagatccataccgaggcagcgtcggtggctacaagccctcagtccacacctgtggacacctgtgacacctggccacacgacctgtggccgcggcctggcgtctgctgcgacaggagcccttacctcccctgttataacacctgaccgccacctaactgcccctgcagaaggagcaatggccttggctcctgagaggtaagagcccggcccaccctctccagatgccagtccccgagcgccctgcagccggccctgactctccgcggccgggcacccgcagggcagccccacgcgtgctgttcggagagtggctccttggagagatcagcagcggctgctatgaggggctgcagtggctggacgaggcccgcacctgtttccgcgtgccctggaagcacttcgcgcgcaaggacctgagcgaggccgacgcgcgcatcttcaaggcctgggctgtggcccgcggcaggtggccgcctagcagcaggggaggtggcccgccccccgaggctgagactgcggagcgcgccggctggaaaaccaacttccgctgcgcactgcgcagcacgcgtcgcttcgtgatgctgcgagataactcgggggacccgggcgacccgcacaaggtgtacgcgctcagccgggagctgtgctggcgaaaaaggcccaggcacggaccagactgaggcagaggcccccgagctgtcccagc

SEQ ID NO: 92121 - DNA, 904 bp, Homo Sapiens
aacttcccgtcccggcggctctggcacccagggtccggcctgcgccttcccgccaggcctggacactggttcaacacctgtgacttcatgtgtgcgcgccggccacacctgcagtcacacctgtagccccctctgccaagagatccataccgaggcagcgtcggtggctacaagccctcagtccacacctgtggacacctgtgacacctggccacacgacctgtggccgcggcctggcgtctgctgcgacaggagcccttacctcccctgttataacacctgaccgccacctaactgcccctgcagaaggagcaatggccttggctcctgagagggcagccccacgcgtgctgttcggagagtggctccttggagagatcagcagcggctgctatgaggggctgcagtggctggacgaggcccgcacctgtttccgcgtgccctggaagcacttcgcgcgcaaggacctgagcgaggccgacgcgcgcatcttcaaggcctgggctgtggcccgcggcaggtggccgcctagcagcaggggaggtggcccgccccccgaggctgagactgcggagcgcgccggctggaaaaccaacttccgctgcgcactgcgcagcacgcgtcgcttcgtgatgctgcgagataactcgggggacccggccgacccgcacaaggtgtacgcgctcagccgggagctgtgctggcgagaaggcccaggcacggaccagactgaggcagaggcccccgcagctgtcccacaccacaggcccagggctccctgctggggagctgtacgggtgggcagtaaagaacgacccccagcccgggcccagccgcggcctaacgacaggcgagccgcggttcccagagtccccgcacaggcagagccgtacttgtacctccc

SEQ ID NO: 92122 - DNA, 419 bp, Homo Sapiens
gattgttgatgctacctccaaagacagaacatgccaaaagaagactgactgggtggaggctctgccttgcctcaagaaccatcccctgcagagcatccagggaggtttctcgccccaatagcctcacggcacagtactcttgggcagtaactggacaccttttatttgaagaaacaaactgaagaaaaaatgcttccttaagtgctgacagcctttttaaccaatacatttaaaattgtacagaacaaaaaaataaaatcaaagactgatcttgtacagatattagtgttaccagcattcatgtggaaatcaagagcaaagacaaaataatgttaaacaattctgtaccataacattttctgtaatgatactgaaacttaatgaataaaaaaattccttgatcattatttaaaaatgta

SEQ ID NO: 92123 - DNA, 839 bp, Homo Sapiens
ccttacacctcatggtcatggcgctgcctgatgccaacagagatgcagctcaggccctcatgacattcttcaataaagtgattgccaatgaatcaaaaaaccgaatgagtctgtggaacatttctacagtgatggcaccaaaccttttcttcagtagaagcaaacactctgattatgaagaattactgttagcaaacactgcggcccacatcatccgcctaatgcttaagtaccagaagattttgtggaaggttccatctttcttaatcactcaagtaagaagaatgaatgaagccacgatgctattgaagaagcagctcccaagtgtcaggaagctgctcaggaggaagaccctcgagcgggagactgcaagccccaagacttcaaaggtactgcaaaaatcaccctcggcaagacgaatgtctgacgtgccggaaggagtcatacgggtccatgctccacttctctccaaggtgtccatggccattcaactcaacaatcaaaccaaaagccaaagacatattggcaaaattccaatatgaaaacagaaaactgcacctggcagcgagctgcactttccttcctaaatggaaaatgggttaaaaaagaaagagaagagtcgacagagaccaacaggagccccaaacatgtattcctcttcactattggcctggacatctccacataggcagtcatatagagacttgaaatatcattcaagggatttgggtatccagtagacttttagttacatatactacaaaactgactttgtactctcaagtagacctttcgtagaaagaaaatgtttctaataaaaatgtattagaactaaaaaa

SEQ ID NO: 92124 - DNA, 415 bp, Homo Sapiens
gcttcagccgtggggttacccgatctgacaaagccttttccattgtatgtgtcagagagagaaaagatggcaggtggacttttaacccaaactgtggggccctggatgagagaagtccttcaaatgtaattgcaaagtcagagacctacagggaaatggggatcaaaagctctcatcactccagatgctacaaagccttcccttccagatgctaccgattttactccccagagcacagaagaaaagttcgtcattgatgactgctgtcatactgaaatcatgaagctaaaggctacagagggctactagaagcctgagtttctgaagactgtgtggaaccatcaaagcagccctgaatatttcccttgagacttttccattataggaagggcaaataaatagatgatgtatgatg

SEQ ID NO: 92125 - DNA, 385 bp, Homo Sapiens
gcaagtaactctcttcttatctccagcatcagactgtagtcagcttttaacctctggaccagctacattgcctgatcagttgatggccataagtcagccaggccaaccacaaaacgagggccagccacctgtgacaacacttctttctcagcaaatgccagagaattctccactggcatcctctataaacaccaaccagaacatcgaaaagattgatttgcttgtttcattgcaaaaccaagggaacaacttgactggctccttttaactggatataaattccacgaagaaaatcctgattccaagatgtcctgagatcttgtggttccatgagaattattactttaaaaacaaaacagaatataaaaaactgtgtttgagtaaa

SEQ ID NO: 92126 - DNA, 739 bp, Homo Sapiens
  misc_feature (542)..(542): n is a, c, g, or t
  misc_feature (586)..(586): n is a, c, g, or t
  misc_feature (615)..(615): n is a, c, g, or t
  misc_feature (625)..(626): n is a, c, g, or t
  misc_feature (644)..(644): n is a, c, g, or t
  misc_feature (671)..(671): n is a, c, g, or t
gtgtgagacactgctcccggccagtttctgaataagtttaatcagatgcttgctaattagtttttcctaaaatagttggctgtatttccaattcacatttctgctttgtcttcctactttccaggaaggtattgttttgttgttttcacaattgtaaacctgaaagggacttgaacttcttgtccaagcaccagagtgggcacacactgcacacactgggcggctgtacctgcctatcctgtggtaaacttggctccaggagcttccaagctcagcttccactagaaaaccctccttgtgtggaacaggtctttcttcattccattcctctgggcctggggcctcacagctctggactgctgcctggtcctcacttcacctacagctctcggaagtcagttctctactgcagagggcaacccaccccctactcaggcccacccagctcctttgattcagacctttggacccctcaagcccctgcagaaacacagctgcaatgctgaccctggatgctcatgggcaggcctctgctcctgacnagatgggaaacaagactgctggtaggcagcactgcaccactcangcagtatccacacgtgttaatgagcacanttgtgtacanngcacaggctgactagaanagccctgtgctgaggtcacatctgcangagggaattcagtcattacaactagggctaatgctgatccgcatgcatgcatgcggatggcagggatg

SEQ ID NO: 92127 - DNA, 346 bp, Homo Sapiens
tgaatcagcatttacccacccctggaaaaacgcaggagcggcgcattcctgggatctcagcagggcttttgggaagagcagaactgggctggagtcacggtttctgggctgactctagattttccccggcttttgccacctgtgatggctggagagtatctgaagatgacagaccccctactcccagtgacacaagatggttggacccacggctgatttactgctttactcccattctttatggggccagctttaatgagcacccaagcagaaatgcctttgactcctgcactgtgaataactgttattaataaaagggcaagctgcttgccatggaaccttgaaa

SEQ ID NO: 92128 - DNA, 416 bp, Homo Sapiens
cataggttatttcaaaccagcattgttttttatgtaacctgttttaccgcatcttctcagcagcttctgaccactgctcaattttctcctttacagccattgttctggtggacaaataacctaggtactccaaatcctggcaggaaaaatatacagcattatgaaacagcactcagtaatcctaaaatgatttccaaagctggttacacatgacctgcaaagtctattaaattaaaagactttctcattacagagtttagtcaacgtagcaaaaccatgggaaattaaatggaaagataattaaatatgtaaattcataaggaacaaaagacgagaagttaattatacaataggctggtgacaccagagttcattgttatgtgccacaagaaaattaaattttttaaaaaactaaa

SEQ ID NO: 92129 - DNA, 661 bp, Homo Sapiens
  misc_feature (19)..(19): n is a, c, g, or t
tgggtctggcctctccggngtctgcagcttggggccgattcctcggtctctacctcctgttgcaggtctttttcgggctctgtggcttctttggttcacgcgtctcccgacacgcatacgcacagtcctgaacgtatgtgactgaaagttaatccccccagaagtcccagtttgggttccatcaagctgtaagagctttcgtctcaacacaagtcaggcctcttctttagcaaatggctgagacggggctagggaaatcttgatcacacccattaagtgattcgaaagcgttgcaagtcccctgagcctggtacagcctggacccgtgtttctaggcgaatggatgagatattctgtcttgccgtgtgctaaattggacaggttcaggggaagataatttgtataaaaaggtagttctttactgctaactgccaaacttctgcaatcaaaaacacccgtagcagtaacttgacctaggttaaaaaagtgtgtggatgacaagctcagaaggaatatacaagcaactggaacaaggctttgacttaaaggtttggcgttgtttaaaagcagccccgtatacatattgtgttatgtatatgtattgaatgctgtatttttgctgaattaaagcacacttcaccgacagacgtttgtggttaaa

SEQ ID NO: 92130 - DNA, 181 bp, Homo Sapiens
gtctctgtggttcttccggactccgttgccagggcgacgagtgcacctctcgattggagacagggcattccgtggcgctccccaaacggtgacaaacggtgataggacagggacaggccaactgaacctcgcagagaaagcactgggccctatccctttcgctgctcaacctaaactgcgc

SEQ ID NO: 92131 - DNA, 693 bp, Homo Sapiens
tttgccggtggagaggactgtgtggtgatgatctggcacgagaagggcgagtgaaatgatgttccctgcaattaccacctcccctttcacgtgtaaaaagggcacagtggcctgcggagagccccctgtggtggagcatgccaggaccttcgggcagaagaaggaccggtatgagatcaattccctggtgcggtaccagtgcacagaggggtttgtccagcgccacatgcccaccatccggtgccagcccagcgggcactgggaggagcctcagatcacctgcacagaccccaccacctacaaacgcagactacagaagcggagctcacggcaccctcggaggagccgccccagcacagcccactgagaagagcttccaggacgcacccaggacgctgagcccaggagcctgccaggctgacgtgcatcccacccagacggtgtcctcttcttgtcgctttttgtcatataaggaatcccattaaagaaggaaaaaaataaatcccacatttgtgtatgcacccactcacccctccaaatcagcaaaaccgcatctaatttgtccgccgaatgccaaagcaaagcaaacttattataacccttggactgagtttagagacatttcttcaatttcccatcgtgcctttccagggaccagtgcagggacagggggagaaaaggaggggttaagtt

SEQ ID NO: 92132 - DNA, 458 bp, Homo Sapiens
  misc_feature (293)..(366): n is a, c, g, or t
tctttagaatagccaaaaaagtgaaccaacccaaatgggtgaatggatagacaacctgtggtacatgcatatcacagactactcttcagctataaaaagtgttgacctaaaaggaagaggctgaggcacaaaatataatttaaagagtttgcttgagacaaagttaagacagctgcctggaagactcagatgcagatttgaatcatcttctggtgtcattttctttcaggctgaaggacttgctttagatttcttgtaagacagatcaactagcgatgaattatctctgtctnnnnnnnnnnnnnnnnnnnnnnnnnnnnnnnnnnnnnnnnnnnnnnnnnnnnnnnnnnnnnnnnnnnnnnnnnngggctcctcccagcccccagcattttagagttgctgttcaattgtcttctggttccattgtttctcattaaaagtcagccaacttcgtaaat

SEQ ID NO: 92133 - DNA, 543 bp, Homo Sapiens
tcggcctgtgcactccgagagctcagccatccatgaattcagctgctgctcgtctcccacctcaaagatgatgtctgtccggtccttcaccttcagcacaaaggtgtaaaggttgtcaggcatctcaagccgtgtgcaccgccggacctcctggatgctggagcaagctgcttgtagcttgggccttgaactcttgggtgggtcgaagagctccagcacgcggtcgggccaatccgggcccggggcccggcgcagcgccagcctcccgcgctgccagcgtgccccgctgtccatggacgcctcgtcggccaggctgtagcgcagcaccgcctccttcagcgcctcgggtggcggctcccgggccaggctccagggcaggaacttcttggccaggccaggacgggcgggggtctcagcaccctccccgggggtcccgggggcggcagcggtgtgggccgctggcagctccccggccgagcggcggcggaagatgtggcggaggctgcggcgaaagtgctggaaggagcaggcccgggcggcccc

SEQ ID NO: 92134 - DNA, 1389 bp, Homo Sapiens
gctggctgcggatgtgcgcaaggagatgggatggagagcctgagttggcattcgtataaatgacctgcctggctcccaccatgagtgctgagcttaacgtgcctatcgacccctctgctcctgcctgccctgagcccggccataagggcatggattaccgggactgggtccgccgcagctacctggaactggtcacctctaaccaccactcggtacaggccctgtcgtggcggaagctctacctgagcagggccaagctgaaggcctccagcaggacctccgccctcctctccggctttgccatggtggccatggtggaggtgcagctggagacgcagtaccagtacccgcggccgctgctgattgccttcagcgcctgcaccacggtgctggcggccgtgcacctgttcgccctcctcatcagcacctgcatcctgcccaatgtggaggccgtgagcaacatccacaacctgaactccatcagcgagtccccgcatgagcgcatgcacccctacatcgagctggcctggggcttctccaccgtgcttggcatcctactcttcctggccgaggtggtgctgctctgctggatcaagttcctccccgtggatgcccggcgccagcctggccccccacctggccctgggagtcacacgggctggcaggccgcctggtgtccaccatcatcatggtgcccgtgggcctcatcttcgtggtcttcaccatccacttctaccgtccctggtgcgccacaaaacggagcgccacaaccgcgagatcgaggagctccacaagctcaaggtccagctggacgggcatgagcgcagcctgcaggtcttgtgaggggccgagggccggggctgggagcggccctgtgcccgggagctccgcagaggcggggatttgtcagatgcagacattttgcaaggctgccgggtagttcaagaccaaagttttcctcttgtcttaataccataaggactggatgacttctcctgagatagaaccgtttggttcaatgagggactgtgttcgctaagagcgtcgggcggcaaagccaggctggttccttggcctcggggtttcctgggtcggggacaccgctgaagaggctccagcgggacctgcccatcagtcctgcgccacgaggggctccaagcagcacccagcggtccgggggagtctcagacccggcatgcgtggctggcagacctgggagagccagggcagggttttgcgttcagagaaggattgccccagagacccgtggtggacttcatgggtgctgagtggcccgtgtgacagtgatgacacgaaggcttcggcgtttgagtgggtgcaggtgcacgccagggcttggtgcttccctgcctggccctggagggagct

SEQ ID NO: 92135 - DNA, 462 bp, Homo Sapiens
cttgtgcaaggctgacatctgctggacaaacaacacttaagcaaagtgttgcattttagagtaaattcaattcttggcaagaacctacttgtggagtatatactacacattttctgaggagaagttgcatgtaattcttatctttgtttttttataggtaaggtgttttttccttctggcttcttttatgatttttccctttacttgtgattttctgtagtttaaaaattataagcttaggtgtagatttttgcgtttttttgtgcgtgcgtttattcttttcggcgttctctgagctctctggatctgtggtttggtatctgacattcatttgggggaattctcaattattattgctgcagatatttcttttatttctttctctctttcttctccttctggaatttccattatgcatatgttacaccttttgtgactgtcccacatttcatggatattctc

SEQ ID NO: 92136 - DNA, 390 bp, Homo Sapiens
gctggagcacactgaagtggagccacactgaagtggaagatggggctgcagacagagcactgggcagcctctgctccagggaggcccgagagccagagagcagattccataagaagaataactcccattcctcatgcatgagaccctctgctaaatgcttcctgtgcaccacctccagaaatcctcccaagccaggacaccagcagtattacaggaactggatgacaaaaagaagagccgatataaccaggaacctactctggccaccccaagtaaggatctaaagtccagcctcctcctccactgccctcaaggcctttcctcatgaaagcagaggttctgaatgctgatttctgttttaaagcccaataactctttaaacatcaaaaa

SEQ ID NO: 92137 - DNA, 427 bp, Homo Sapiens
gacccagcgacgccatcctgggcagatcccacaaagaagggcacagtcaggttcaccagcagaaacgcgctcactagaacatccggcagctctgttctgctggcgtctggaaaaggcattccatggtgctggccgtgtgctgcttcttgacctgaggggtgatttcttgggtatgttcgctttgtaaaaactgtcataccatacacacatatacgtgcttttctgcaggcatgttatactccaataacacgtttgcttttaaaacatggctggcagggggatgcagggtgatgagaagtttggtatgagtaaccctgaacccctagctctaatttgtttctctgtgactctacaattctacctgctcccctcagtaaataaacacagatgtggattaaacatccaaaataaattttaaaatgagaaa

SEQ ID NO: 92138 - DNA, 194 bp, Homo Sapiens
aagttggaagttaccagtttatgtaaactataatacacctctgacacctgtctgtacatgcatttagtaaaggcttattaaattaatctgtaaatatattatacagtggtaagcatagtcaattttataccttacaaactaagattgtttaaaatccaacaatttaaaaatagatttcaagtggatgctagata

SEQ ID NO: 92139 - DNA, 546 bp, Homo Sapiens
ttaccaaaccggccccagtactggaacgaggagctgcagatgatgagggacctacccaacaagaaccaacctgagcagctgcttcaagaaaaagccatgttcaaggtgcctgaatcccctggtaagtgagtgacagcctcacagcctcaggcccacctggctcctgctggaaggttttcttgtgctcgggagagaagtgagggaagccggcagtcccagccctgtcaggtgccctgaaggcccgtcaggtttgccctgcaaggccttctagcattctgcttcctgggagaccatcccccacctttctccggcctctgagactttgagtccttgggaggagaaggccctccttgctatctgggctgagtggccagggccatccagcttcccaccctccactgactgccatggggccctcccctgagcacatggtgcccaactgtagcccttctagggcaggggctcattggcagcacttgcagcttgctggcacttaaaagtcattagtgcggttactgagagaaatgaggaaaaaataattgttaa

SEQ ID NO: 92140 - DNA, 418 bp, Homo Sapiens
gtaagacaaagactacaatcagtaccataaaaaagtatatcatagacatgtttgatccgagacggaaggttccagagtaagtgacaactaagcagagatcttaaagatgtgggaacacctacatgtctatgttcagaagctgccttgatgccacatgcgggaggctggaaacgctgaaggatgaccactgctcagcagcagtctaccagtgatggatgagagttggtgcacaaataccccagctcccttgcctctcagtttggataatcctgaaaaggtgtgtactatgctatttctgagattaagccctagttacccatagtggtagctaaatatagtagttggctgtattctccatcacttcttgaatcccctgccagtgttctctgcacctccttaataaaccacttgaaacaaa

SEQ ID NO: 92141 - DNA, 557 bp, Homo Sapiens
gcggccgcgggggagggtgccaggaccagcccaggaacctcggagaccacggtaagcggtggctggttcagatcccaactccggagctgtgtgaccccagaaagttccttagccccttggtgcctgcatcccctgacgtgtgacatatacatgaatggggctgttgtaagtgaacgcacacagcacaccggcacatgtgtcacaacacttagatgggtttagatgaagaaacagggaaacctttgggaagtttcctgtagtcaaaggaaggttttcgttttccccctcaaccgtgactgtttcttgggccggcaggataggcttttgttctaggggtgtggagagagggccccttggcagcgtccacggccaactgggaaccaagcaggaatcgtatttgtgcagcctggagttcgaggctctgggtgcgagtcgtagtgcttaagcaggaagcagctgcctgatgcccctagccccaggccgccctgctctgccgtttcgagggcgtgggggtcttctgatctccaccttgatgcacctccaggcccgggtccttt

SEQ ID NO: 92142 - DNA, 784 bp, Homo Sapiens
  misc_feature (313)..(390): n is a, c, g, or t
  misc_feature (625)..(659): n is a, c, g, or t
cagtcgacggtaccggacatatgcccgggaattcggccattacggccggggtgggaaggattgttatataagacaaccaaatgatgacatgagacaataaatgctataggaattatggaggaataattagctatttattttcttggttagggaagagatattattagttgtagaagtaattactaacttctacattttttattgtggaaatcaaaaatatatatatgaaaataaaatgttataattgacttcagtgtcccataaaccagcttcaacaattaccaaattgtgaccaatctttacacacatgcannnnnnnnnnnnnnnnnnnnnnnnnnnnnnnnnnnnnnnnnnnnnnnnnnnnnnnnnnnnnnnnnnnnnnnnnnnnnntgatataaaatggtggactatttgcatataacctgtgtacatcccgtattatttaaatcatccctagatcacttataatacgtaatacaatgtaaatgccatgtaaataactgttatactgtattaaggaataacaacaagaaaaatgtacatgttcagtacagacgcaatttttttgtgtgtggaatattttcattccaaggtcagttgaacccatggacataggaggctgacnnnnnnnnnnnnnnnnnnnnnnnnnnnnnnnnnnnagcatacagacacatcattctctgaaagtgtaatattctctttttacaaccaacttattatcacagctacaacaattaccagtaatacttatatcctcatataccgggtgtacagatctacaaga

SEQ ID NO: 92143 - DNA, 446 bp, Homo Sapiens
  misc_feature (184)..(184): n is a, c, g, or t
gcaatatgtcccaaagtttcagacagtagcgggtcagaaacgagcgaaagccacctcgctcttctgagctacctcggccgccagtccccgggatcacatccgcagccgagcgccaagggtccggcctacacagactgacccgggcgtttcacctggtgcccgaccacggctctggcgccctgcncaggctgcccgcctccttcccctcccccgcttcttagggaacaaggaggagagggtggcaaacgcacccagaccgggggccaaggggagacgccggcgcgtgctgggaggggcatgagttacacccgcgacccttggaacttggaacggcttccccagccccggcggacgccggcccccaggccgtgccactgggagcaggcgggcgccgcgattggccgcggccggcttcactcggtgggcgagccctaccggcgaggcga

SEQ ID NO: 92144 - DNA, 506 bp, Homo Sapiens
cataataaatcctgaaagcagttttatgtaatatatagacaataaaaaataaggtttttcttatagacctgttaagtctgtaaagtcatttatatagggaatttattgttatatgtaatttctatgcttatttcttgtgaatttgcccaaaagtaaggattggagagttagtactttatagaccaatattttgtttagatggattgatgttttgaatgtatgctattcaagtaacccttcttaattatatataatggtatgaaaaaagtttttaatcccttttaatcttatgattgtggaattatggttttgatggccattattactatttattcagatatgaatggagtgagtgttctctgtgccatttgttgtgggggacaggagatgctatttgggaattctggccactgccatatgcttagcttgtggataaaataatggagagaacagtaaacttaactttggctactcttttattacgtaaataaaaattaatgttcaat

SEQ ID NO: 92145 - DNA, 773 bp, Homo Sapiens
  misc_feature (66)..(66): n is a, c, g, or t
  misc_feature (522)..(537): n is a, c, g, or t
gaacatgcttgaatggctgagggatctgaggcatctaactacattctacctgaaaagtcatttagngggcagagcatgctaggtttgtccactcctgttgcctgtttcattatgggcttatttgcatcagcagctggcatcagagctcctagaaggcatttgggcaattgcatgggagatgatttctgtagctggcctagatttcgtcattcaaccacctggcaatactcattttcagaaacgctgcccaatagtctataatcaagggaacgtgcttggcctttcacccagtgactgggaaacttttcttccattctataaccttctcatctagcaccatgcttttgttccttctgaaagaaagaggcttgctgaacacaagacctgcagattggaagctaatcagtgttccttctctagactcacacaagctattcatgtgtgacaatctggacaaccctccgatccctatatgcggggaagtttagttcagttcagtgctctgtcagggatggaagcgcnnnnnnnnnnnnnnnntgcattccaaagaacatgggctctagcagtgcctgttttatggactcgaccagcctctgtcttagagcaaataaacttggtgcccagacctcatctgctgttttctccctagcccttccttcccttttgtggtgtctacccctcccacctttctgtgcccctctttccctgagtacccaaatctttcttctcccatcttaaagaaagcacttgctcaataaatctacccccagaaa

SEQ ID NO: 92146 - DNA, 753 bp, Homo Sapiens
gcaggatattcttttgagtgaaagattccttgcagacggtacacttgtaagggcgagaagggtctaggaacttttccatagtaaaattgggaccttttctgaaaggcagagctctctttggctctgagcccgagtcttcttgtactgacccagagtcactgcccgttgggctctgtttatcttccaagtcactctcttcctccttgtcttcctcaacaattatggtatggtcctcagccagagtggggtctcccattgccaggaggtccccattggccagcaggccaccataaagctgttggatgtcagcctcactcagctccaggtggcttgtctcaaggtgcttcttcagagcctggaaagttcggaaactgcgctgacaaagacagcacatggtggcagctctgatcacatggtactgagaatggagctgcaacttttcaatggtcttgaaggccaggctacactgattacagcggtacttgtacacatggcgatctgacaccggcagctgaggcctcttggcatgcacttcattaaaatgcgtctgaagggcagcagaagttttgaaaacctggttgcaccccttcttccagcagatgaagcctgagtcttctctcacagagcctgggtcagcaggggatggtttcaaatctccgctttgctctgtgcttgcggatggcaagatgttctttcccagatcctctgaggtttctgttaacaaaaaaacacgatgacaacactaacaagggg

SEQ ID NO: 92147 - DNA, 899 bp, Homo Sapiens
cacgggcccagcacacaggccaggatggagcattctttgaggtgttcctgggagcccagcaacagactgggtgttcagtgtgcccctgtcggtctccacgtgggccctgcaagaaggagccacccccgttttacggggggttcagggcttgtggccagatgtgcagctaggcctggatcaggctcccgtccggccccagtgcgtctgccgtgcccgtgaccccaggctgtgtctctcagaatccgccaagattccagggcaggtaactgcagagctcccccgagtcctgtgcacgcctcggctcacactgcaggtcagcagcagcaacgcgggtgacagaaaccagctctgtgtctgtgagcctctgcctcaccttctgggggatggcacagtattgctccaagacatgcaaacagctgcgggcagcagagacagtgaggcaaccctgccacactctccaaccatgccctcctcaggcatgcggagaaagcaccccttcatctgtgcaaggaatcctcaagcagcagacaaaattcatgcactgttaattcagatgttacagtcacatccagtgctaagggctgtcctttgaaaacagctgaggtagacacatcttccaagaacaaatcatagaaatgttaccaggcgattgtcttcacaacctctgcatcagtgatggggacttgggggtaagcttttggttggcgttgtgaacagtgccagctccctaaagcaagcttgcttttctgttgtttgaaatactgcaggagaactgaaattctcttaaaatataccggtttctggttcaagagaaatacttttttgcaccaatttaattcaggtttctaaagccgaggcagggatggcatcacagtctgttgaatgaattccagccccag

SEQ ID NO: 92148 - DNA, 434 bp, Homo Sapiens
aggtgcacatcacattcccttgtccacactgcccgcctctcccacaatgccacccccttccctgtccttccccaactccccagctccaagagtggaagaaatccccaagatcatctgggtctccctctccacacccagaactgaggcttggatatcttcttcaacatccttgccaagacttctccaccctcttgcatacctccagggacagagagcttactacctcccaaggcagcctcctgcctttggactgctctgactttagcatcagcttaatacacagaagaggtttctgtttttctgtggctctgtccatggcatcccacttgcccactctccttcctggagtgttgaggtcacacattgactcccctgagccctcttctctccaggctaaagaatcccgaaggcatcgaggccatttctgctgcaaa

SEQ ID NO: 92149 - DNA, 471 bp, Homo Sapiens
ttccttttatttcatttttatttcagaagaataacagaattaactggaactaagtctagcttttgttttcttcttctctttagcaagttccttagttccttcagtccttctgctaagtgagcagagtgtttataaagagagacgatttaaagatgactgaagacagatgttaaatttgaacggtttcttacttccctagtttcacaagttagggtcttagaagttgccaagcagtactaggatactcctctaggaccgaggtgagttaatgcacagccttgtacttgctaagggggaggggagacagacttgggaatctgcatgtgggtgtgtcatggcgcacacaggtgcagagaggagcagggcccagtgctgcccagctttcctgaaccttcaccaccttggctgataagagccacttgcactctgtccaggaaaacacaaaagtatatatacttagctgacaatgaa

SEQ ID NO: 92150 - DNA, 476 bp, Homo Sapiens
ctgacttcaaaatgaggtcacttgggcacagcacatgcagggaggggcttttctctgagcctccttcatctgcccaaagacaaatcctcaaaaggaaattcaatcatcatgaatcacaaccccaagtatctcatcagccagggaagagtaagtgggatcacagggaaggatgttggcagcgacaccatcccatacaggctcttacctcttctcctgagggctgctccagacaacatttattacccagaagaccttttgtctgaaaaccagccaagctttattcaggacacacttcttgccttcactttcccacttccgtggccacctccatgcagaagccctaagcccacattctttcgatagctcacggtggtgcatgagtgtccatcatctgactcttctcggagtctcatattttgtgggactcctgtgcaaacatatgttattaaaatttttttcctcctgtttaaaaaaaa

SEQ ID NO: 92151 - DNA, 1194 bp, Homo Sapiens
  misc_feature (370)..(370): n is a, c, g, or t
  misc_feature (672)..(715): n is a, c, g, or t
tgtattgtttctttttcataaataaattcagcattatagtatcattaaaagaagccttaaagaggcgtatttttccttttggttgaaggaagggaatagttaataatagttttcacctcttctcccaaaaagtacagtccaaatttgtgcacagagattgctgtggtattcaagaggtacttgcattttagctccttaattccctggccagtgttagctgtttagtgccccctcacccatcccatttaggcacatcccaatagacagagccaggctgagttacagggggagagtgtcatctctgcccccgattaagatggccttgtcacagtgaccgctgagtaggcatggatgagtgggatatttagcntgaggaaccctttcccttttccttctttttggggtctcttcttacagtgaacttccaaaatgtcaaatctagggctgtttcccaaattacactattctaggcatcattttgattcccatgtcactccttaactcacttccttgagcactacatgtatgttgtcagccacgagacaggacttcctaaatagtgtgtgcaccagcctaactctgccttacccagaaaccaaccacctaagaggaaaactcagaagatattaatgaaaactaattgaaagtacgcacacttctcatgtaggaacnnnnnnnnnnnnnnnnnnnnnnnnnnnnnnnnnnnnnnnnnnnncattttgtaggaacaaaatgtaaattttgtaaatacaaaattctttttaaagtcctgtttaaagaacagtagaactaagtgaaaatattcagaacgagctccttagaagaaaggaataagaactttttactggaactattttccatctctagaaaaagtgcttcttcccctccccctccctctccatggtacgtttttgtgaaaatgcttttctgtcaggtttaaacaaacagtttgacatagctcgttgacaagaacatattgtaaaacaaatctaattaaagagtaatatgtggtctatttgtgttcctgttgtaataatttgataagtaaacttctgagggcaaaattactgtttaatattactcttaaaatgttgcatgtttggcgtcattcctaagagccatgtaattttaaacttttaattgcagttagtgaatatgaaaggatttctgaataaaaatctatccacattaaaa

SEQ ID NO: 92152 - DNA, 392 bp, Homo Sapiens
cgcagatgacctagctgcggtgtgagagagcatggcccagacaagcagctgggttggcttctgagaacaggacttaccctgggcttcaggaacatctgatggctgaggttagtgtgcttggaggctgcaggacgaactgtcgatgtttcttagcagagatggtcacagagggcagcagggacaggactggaagggacctgcagcctgcagaccccgcctggcccccgctggcttctggctggtccagtgatgggcaagtgacagaccttccccaggctctgcttccagaactctaatgggaaactgggcctgtctacctttagaagtcttcgattctcagagagcatttgtctaatacaataaaaactggcattaatacaaacctcaaaaaa

SEQ ID NO: 92153 - DNA, 419 bp, Homo Sapiens
agttcagaattcaaaaatcctttcctagtttgtgagataatgggctaaattccttctgcctgccactggggcaaagcaaattgctttagtttttgatgagagttcttagaagtttgttggtattccttcatccacagcatccattgttgaaataaccattttcagttgtgatgccttaactaagaagccaattgttagcctgaaatgcaatcttggtagccagtttcaatgaagctagagattagtcagaaaaagttagctgttgggctttagaaagggattttgagtcctgtcatttctacttgggagcattttggagcagattagtctttcagtataaaaacaagtggctacctgatggaaacttttcttacccttatagggaaactgagcacaagctgaatgatattgtctgctgc

SEQ ID NO: 92154 - DNA, 319 bp, Homo Sapiens
gagccacctcataatttgagccgtgttgagagttaatagattgtttttgtgcaaagaattcgcaggtgaaatatgctatatgtattactgcagttttgtgggaagttgattatgacacagcagagactagatcacagagggaaccagataattctagaaatactagtcttagttatttagtgtttatagaatgagtgatattttgaataagggataattttggataattgaagccagtggttttttaaccaatgttatgtatcagaatcacctcacaaagcttctgaaaaatacaccacaaagtgtggctcacccacca

SEQ ID NO: 92155 - DNA, 454 bp, Homo Sapiens
caagagaggggattattacatattgcagagcccagcacctaggtggagtgactctcatctttttcttctaccccgtatatagccagcttggtgacctactatttgaggctatacccaggcccagaccacagatgaaattgtgcaatatgtggaacaaacacctaaacaatatataacaccttccttggctctgtctacaaagggcacttttatatatcactgggaccatcaaccaggtgatgttaattatcttcctgaaacctgtctacaaagagagttgtgtcgtatacctaggcccgtcatgtaagtgatgtcagtcccttctactgccttggccctgcacttacagtgcattgtgacacataacaaggtactgcacacagacgatgtgattctcctttttgggttctgccaaaaggaagcattgtaataaatcgcttggctcagtaaaaaa

SEQ ID NO: 92156 - DNA, 352 bp, Homo Sapiens
acagaatcagtattgagatcccaggtgattctcatgtacactcaagtgtaagattattagcacctggactttggaagcagccagataaaagtttggatcctgggttggctacttcctagatgtggccaagtcattttacttgccatgcttttgcttttcttgtctgtaaagtggacatgatacctattttacagggtggttttgaggaataaggtcagcattaaacatttatcctctttagggagacagagagaggagatgaaatagagtagaattgagaaaagcagtttcttagacctccctgtgaagtttttcttatttcaacaaataataaaataaaaaattcatacac

SEQ ID NO: 92157 - DNA, 1158 bp, Homo Sapiens
  misc_feature (845)..(845): n is a, c, g, or t
  misc_feature (865)..(865): n is a, c, g, or t
  misc_feature (1031)..(1031): n is a, c, g, or t
  misc_feature (1044)..(1045): n is a, c, g, or t
  misc_feature (1115)..(1115): n is a, c, g, or t
aattcccgggatgtcccggagaagagattggcggaggggaaagactgagtcgtctttcctttgcccgcttctgtggactgttcgaacgcccaggggtgggccaaacccgtttcttaggaaaccaggaatccagggaaggcagaatggcttcctttgggtggaagaggaaaattggtgagaaggtctcaaaggtcacttcccagcagtttgaagctgaagctgctgatgagaaggatgtagttgacaacgatgaagggaactggcttcatgccattaaacgtaggaaagaaattcttcttgaaggctgtgctgagaaaagtaaacagctgaaggatgaaggagccagtttggctgaaaataaaagatatcgggaggcaattcagaagtgggatgaagcactacagttaactccaaatgatgctaccctatacgagatgaaatcacaggtgctaatgtctcttcatgaaatgttcccagcagtacatgcagcagaaatggccgtccagcaaaatccacattcatgggagtcttggcagactttgggacgtgctcaacttggtttaggagagataatcctggcaattcgaagttttcaagtagcccttcacatctatccaatgaaccctgaaatatggaaagaagacctctcttgggcaagaacgctccaggagcagcagaaggtagcacagaggattaaaaaaagtgaagcaccagctgaagtaacacacttttcaccaaagtcaattccagactatgactttgaaagtgatgagattgttgctgtttgtgcagctattgctgagaaagagaaacagtttcagcaaataaaacaaatggttattgtngtctggcttctggggccatnagagactgtaactggaaaggaggatggtgctacaccaccagatggctctggttttatccaagcccgatgaagcagtatgcatagggattatttggatctggtctttttgaatggcctcttgaagtttttgacatagaagacattttactctgggagatagataggnagaactccctggnntgtaaaataatggtttttcagaattagggcatattaaaaactaaaatggcaggggattattgggaataangggtgtgggaaataagccttttgaaaaaaagttatggaatttt

SEQ ID NO: 92158 - DNA, 599 bp, Homo Sapiens
  misc_feature (585)..(585): n is a, c, g, or t
agagactccgagaaagtaccagcggaaggcggccgccgctacggcgattcgcagggagtagcagacgaagacggtggccgccgcactagccaccacgtgtggaggataaacggtctacacggccattccggcgccgagtctagggaaagagttagcgacgacggggaaagaaaatgtgaagagagcgaccgccgctccagggtcgctgcaggaagcctaagtgcagacgccggcttctcccgcagtgacttgagaagggtcagtgaaaacctcggccactgccgcagcgtctctagggagagagttaggggagatagtggccacagtcacagctgctcttgggagagagttaggggagacagcaccttctgcagcagcgacgtgaattttagtgaagttggaggccaccaaactaccgactccaggggaacagccagagaagaccgaggcctccgcctcagtggtccttgggagggagtcagtgacattcgggacccgcgaactagtgacttcggggatagagtcagtgacgatcgcagtcgccgcttcagtggctcctgggagggagggagtgtcgaaggcggncacagcgttggtag

SEQ ID NO: 92159 - DNA, 474 bp, Homo Sapiens
ccctttggaaacacaatatggtactacatagcaagggctgtaaaaatgaccatatcctttgccccataaattctacttctatacttttaaccttaaaaataattcagaaaaaagataaatgcatgaagacatttatgtctgcattctttataataacaaaaattggggaaaaaaactccatgtcaagaaagtgggataagaaaaatagtgaagtattatactgccattaaaataattatttggaagactgtagaaacgtggacatgtttgatatggtaagtaaaatgagcacaatacaaaatagtatgcatactatgattgtgactttgtaaaatctttatgcatgtggaaggtaatctgcaaaacaaattcattgtgttagtgtagcgggatatggaatgactttatttatttaaatcttttctttaatattactttgtattttcaataaaaataaatcactgtacatagtaa

SEQ ID NO: 92160 - DNA, 388 bp, Homo Sapiens
aagcgcaagcacttggcccataacctgagcatgagggaacctgattgtactctgcctcccaaagtgggtgatcctcgtgcaggggaggacagcatcggagatcacactgcttcacagagggatcttcagctgcaaggtcactgctgtactggggccacccttcttaagacagagagtccccagggccaggaggcacctgggaacccaaatggggctccacagaatacacgagcctccaaaaagtttagtattatgaagcatctgaatttttttctcttccagaatggctttaaaaagtagactcaggcccagagtcctcaggacatatcagaaaagctttgagagtgtcctgatccctgcaaagcctctaataaattggtcatttggg

SEQ ID NO: 92161 - DNA, 925 bp, Homo Sapiens
  misc_feature (84)..(118): n is a, c, g, or t
aatgtatagactcactattagggcgctagcctcgtttgtagccgaacgacgagcgcagcgagtagtgagcgaggaagcggccgnnnnnnnnnnnnnnnnnnnnnnnnnnnnnnnnnnncagtcgacggtaccggacatatgcccgggaattcggccattacggccggggggctctaacgaatttgaatgaggagcctcagcgctttcggcgccattttcgagtgatgcctgatctcatcaatctagcgggagagacaggataacctgtccgagagtatagcgccactatgactccgccggaaaaattactttaaaaatcgccaaaaattacttggagcaaagggcagtcggcggagcttcgccaaggctggcgcagtcggttttgacctgtagcagagaaccaattctggagaacagcctcacttctttgattgaatacttacataatgcattggaacatgacatgagattaaggtttaataatgatagaatgaagaccacaataaaagagacctctacttagctcagcaattcttacctttcttacctatttgatgaagatgtcttttgaaaggtgtactgcaaggaacaaaatgtttgtaaattctccttttaccaaggtggataattactgtaccttcctcatggaaaaagttttatttaaagtgttatttctcattgaatactatcaaaaaggaacaaaaaaatgacctaaacttttgagatagatctggctctaggtaagtatttagttatatcactgggcatatctggggagaagaaataagagactatcatcagtacattcccatctactaagaaaaatttattgtaccccatggtcaagggattacttataactttccatttgatttactaatagctggaacccgtttaaatgcaggacctaatgcctccacaggaa

SEQ ID NO: 92162 - DNA, 598 bp, Homo Sapiens
catgaccatggttccaataaaactttatttacaaatcagacagtcggcccgtgggcgatagtttgccaatttgattattaaacccatcccattaagatattttttggattattgagtttttggatgcctcattaaatatgtgcatcacttgcttcaccatagtcctaacccagctgtcactgactgccagagccctgatggaggagcccatgttcttacaagggtctgcacctgctgtggtttgaatgtgttccccgtatttcatgtgttggaaactgaatgcccaacttagcagtattgaaagatggggcctttaagaggtgattggatcctaaggcctctgccctcatgaattgattaatccacgtgtggactaatagattaatgggttattatgagagcaggactggtggctttataagaggaagagagacctgagctagcacacccagcccccttgtcacatgatgccatgtgccgcctcaggtctctgtagagtccccaccttcaagaaggctgtgcccccaccagatgtgccccctcgaccttgtattcctccataacagtaagaaataaactccttttctttataaattaa

SEQ ID NO: 92163 - DNA, 1215 bp, Homo Sapiens
  misc_feature (1080)..(1110): n is a, c, g, or t
ttccttcagtttcctatatgagttatttaaggatttagatggttttatgagccacttagtatttacaacccttcttaattgtaccctcttcctcacaggggaacatttgcctaaatctttggaaggattttttatctatgaagaagaaggttctggagttccaggttctagtaggaaaggaaatgatgccatcgtagtagaacaatggactgttattgagggatgtgaaatcaaaacagattatggccctctgctgcacactctggctgaattcggatggcttctgacaagcgtgttgcccacacctgtattgagacatgacagtgaagggaatttggctacaaagcagatcgtattccttcagaggccagttatgtggaattcagctgctcaaacaccagataagaaagccagccgccacataaaaggtgaagacaagaataaagccactagtagaagcatcggattagacacaacctcgtcacaacctgcagagagcagacacctgcctgaggagtgccgcctttctccctcccgggaatgctggacaaaggagggaaggctggcacagcacaacagcttctctgggttcagcagcagtgacaacgtcctccgggaattagacgacggacagtttgatcaggaagatggagtgactcaggtcacttgtatgtgagccatgaggtgaagcaaaggaaggccctgtaaataattgttaaaatcattgccaactgaccttattgtattactttctctgcatttatgtaatatttttgaatttttccagacccagcctttcctctaatctatgtaaactttggcacaacctcccagaaaaggaagaataaccaacatatttatacatttagaatcatgtttacacttctctcaactaaaacatctggttaaacagatgttccattcggttattacacaataatctatttcagcttctcatgaatgtacaaagtagactttcttacaattcctggtaaggagactgaatatctcaatcagtattttacccaattagagagagttctcaggaagttacagtcttatttaagctgaaaaataacnnnnnnnnnnnnnnnnnnnnnnnnnnnnnnnatacacacacacagctaattagttgcaataaatatctatttcccaaatataatacttaatccacatttggtctttaactatagcatgtatatacaaagcaaggcc

SEQ ID NO: 92164 - DNA, 418 bp, Homo Sapiens
  misc_feature (124)..(278): n is a, c, g, or t
tctttagatgctgtggaatctgaaatactgtatctctgaacaactttctgagcaagaactctagcaactagcagcagagtatgctttcactctcagtttagagcaggaccccagagaatatgcnnnnnnnnnnnnnnnnnnnnnnnnnnnnnnnnnnnnnnnnnnnnnnnnnnnnnnnnnnnnnnnnnnnnnnnnnnnnnnnnnnnnnnnnnnnnnnnnnnnnnnnnnnnnnnnnnnnnnnnnnnnnnnnnnnnnnnnnnnnnnnnnnnnnnnnnnnntctggcttgtattttgttaatcgtagggaggatgttcccaacttctcatgtccagtagtccatttcctatgctttatgcacttcactctgtcaaggaggcctcctcctttctccaatcataataaaccagccttggtagc

SEQ ID NO: 92165 - DNA, 494 bp, Homo Sapiens
tgaggacagaggaggcccaggagcatcggggagagaggtggagggacaccgggagagccaggagcgtggacacagcagaactcatcaccagaggctggcgtccagtcccgggtcacgtgcagcaggaacaagcagccactctgggggcaccaggtggagaggcaagacgacaaagagggtgcccgtgttcttgcgaaagcggggctgctggccacgagtgctggacagaggcccccacgctctgctgcccccatcacgccgttccgtgactgtcacgcagaatccacagacaggaagggaggctcgagcgggactgcggccagcgcctgcctcggccgtcagggaggactcccgggctcactcgaaggaggtgccaccatttcagctttggtagcttttcttcttcttttaaattttctaaagctcattaattgtctttgatgtttcttttgtgatgacaataaaatatcctttttaagtcttgtaaaaaacaa

SEQ ID NO: 92166 - DNA, 822 bp, Homo Sapiens
aattgtgtcacaaacctatatgccacaattaaaagaaagaaattccagccaaccatgtcagtggctgtagtcagcatttaagacaaaactgactcctatcgatttagcagaagagagttctccctgccccgtgtctccttccatcctgccgctccctgccctctccagccttttgggcaagccttttcttcctgatgcattgcgaatgtgtgatgtacgctttctagcagatgcatttgaggttaggtcttcgcaaccatgaaaacacagttataaattgttctcggagctaacccactcaacatcttggcacttggttgtttttaacttttcaacaataggcactgttcactcccctccatctcagttctttattcagtgatcaggcaggacactgatgaaaggctagtcacggcttccccccatggtatcagtgtggtggcatgcgatgatccacatggggtgtgcttgatccgaagaagcccaaactctgcttatcctgcctttgatcagccatctgctccttgagctccaacaactgacccgacaactgtttgaccaaactcatgggcgattccaacttctcctgaaggctccgaatttcattgtgctcactgtcgccttcattgctaacgagggacatggctcgcatcccacgaaaccaatccaaattcttctccacaatcatttgagccacataactttcaggttcagtgtattctgtggggtctttaactttcaccaggactatgaagtacacatgatgccacatattgtgttctgacttaatgtgctcctcaaatgaaaccgtgttattatcaa

SEQ ID NO: 92167 - DNA, 381 bp, Homo Sapiens
agtcagccccccttctccactccctgccccaccggcagtgggcacagccctgcagacaggagcaaggacttcggggaatagacccactggggccgggagagggagaagctggattctgaccccaccactggcactcctgtgtccagccatgcctgacgcccaccccaccctcagacggcgggattaaaccaggcagtacagggttactcggggaagccagactgctgggatttcctgtcgctttagccagaataatccaggtatatggatatacagataatctgaaagagtttctcatttttatatttgtggaacatcgtgtaagaaaaactgaagagcaagtgcctgaaataaaatcccccacatgtatcagcctgaaaa

SEQ ID NO: 92168 - DNA, 566 bp, Homo Sapiens
  misc_feature (64)..(64): n is a, c, g, or t
  misc_feature (79)..(79): n is a, c, g, or t
agactcacccacacaaaagcacctctttttatagtcctttgaatcaatatggcaaactttgtcntggggtctcaccctnccagactctgagccactcagatattactctcctctttaatccagacatggtctttcattcgtgaagcagcaaataaggccatgcctctccctgttaacacctttttgtcctctgaacgtaactgtcttacaggcacagacgtgtttccagacaatccagatgatgcttctgctacagcgacatggcccagtcccaaggcgcaagggccacttgtgtcagcagtgtgcaccagcagcgtgcgccggcaagatagcagaagcatgaaaagggccggccagaagacacctactctggctggaagacacgtacccctgaagatcaagaaagaagctatctgggaacaatgtagcagttacgtcagaccaggacacttcctgtttacaggagactataaaacctttgtcctatcatcacttgatgtggacgccattttaggcctcagcccgcctgcacccaggcactgattaaaacagcatgttgctccaaa

SEQ ID NO: 92169 - DNA, 485 bp, Homo Sapiens
aacagagattggttgtaacgttcagaaggagagcaagaggagcccaaagtagtgatgggcagtggtaccttccagttcagtagaaacattgttgtgtcgctgggtggatacatgtcttcctttggaaccaagacctctgagccaacacagcataaggtcatgaggatgggaagcagaaatttttctagtggatcactaaagatcactcatcctgggagataccatcagccacgttatgagactactccagcagttctgtggtgaggaagcaactttccagcaacaactcattatctatgggattatgtcacctggaagtgaattttctagcctcagtcaagccttcagataattgcagcctcagctcacatctgactacaaactcatgagagatttcaatccagaaacactcaagccagaaacttccaaattcctgacccagagaaattgtaacagatagtaaattagattactattgttttaaa

SEQ ID NO: 92170 - DNA, 515 bp, Homo Sapiens
acaggctaagtccttcccctccctcagaatttcccagaaggctccggtcatcagcagttaaggagacacacttcatattctgattggtgatatggacccagaggaagggcagcaggcactgtggtctgcaaggcttcggaggcagtggctggttcggaccgcatgcaaattctgatgcccttctaataatctaatacccagatgtggatccaagatgcccattaatatctatgcctgctttttagtggtagggggcttgaaaaacaaaagcctctatctggtccagggtgaattcctctagcgggcagaggcagagccaaactgcatcttggagggcgcctgaattttctcatgattgatggcacatccctttcagtcaaaaaaatcaagggaagacagagcttcaagcacagttgtttctgaattacccctaattaatttgtcatcgttgtacagaataacttcagtatctgaattaggccacctattaaaatcctgctttatcagaaaaaaaa

SEQ ID NO: 92171 - DNA, 375 bp, Homo Sapiens
  misc_feature (266)..(266): n is a, c, g, or t
  misc_feature (297)..(297): n is a, c, g, or t
  misc_feature (311)..(311): n is a, c, g, or t
tcgcctactactactatacggctgcgagaagacgacagaaggggtggaccagatgttccagttcgcctccatcgatgtggcgggcaacctggactacaaggcgctcagctacgtgatcacccacggggaggagaaggaggagtgagacccagccgggtcaataaacctggacgcttggaccctgcctgcgagtctgccggggcgggagggcgcgtcggtggctgctgggccttgcgcacggggagtcgctcggtggcaggctgggngggggctcccgggcccttctgggtcctctancgaggcccccctcnccgtgcactccggagtcgccgtgctgggccccaggaccccagcccttcctgctcccccttggtc

SEQ ID NO: 92172 - DNA, 542 bp, Homo Sapiens
ttttaaaggagcaatgacatttcctagaagttactctaagaatttccctagagggtcgggtatcatctcagccagatctttctcatccttcaaggccctgtttggtacagcttgctaggaagctgttccagactgcagcagccctctctggggtctctctaccacttcccaggcactcagaacttgtgcctcagtagactgttttgtggcactgtcccattctctgattctccatgtgagctggttttatcccatccagcatggctgtgaaatcctaaaggttcaaaccccagccactcttcacctatatttcccccaaatggctagcacgggaaagggcccaaagtaggtgctcagtgctgatgagagagtagaatttaaataccccaggaagcattgtgagttactacggaggccatgaaatgctgccacctccccaagctgattaaagagtgatactaggaaaataggtagggaagggctaatcagaaatgcctctggttcagaagatgctgagttttaaagtccagagagccaaaaaa

SEQ ID NO: 92173 - DNA, 960 bp, Homo Sapiens
tgcggccgcctggggaccagctccgcgcctcggcctctccgccccctccccagcctttctctcgccctcttctcccacactcccggccggcgcctcggctttgtgcgaggagatggtgtagccccctggccgccgaaggaggagccggacacttgtctcccgtctccgagctgctccccacccctggaggagagacccccccctcggctcggcgccttctgcgtctcccggctggtggggaagcctctgcgccgccggcaccatgagtgaacagagtatctgtcaggcaagagctgctgtgatggtttatgatgatgccaataagaagtgggtgccagctggtggctcaactggattcagcagagttcatatctatcaccatacaggcaacaacacattcagagtggtgggcaggaagattcaggaccatcaggtcgtgataaactgtgccattcctaaagggttgaagtacaatcaagctacacagaccttccaccagtggcgagatgctagacaggtgtatggtctcaactttggcagcaaagaggatgccaatgtcttcgcaagtgccatgatgcatgccttagaagtgttaaattcacaggaaacagggccaacattgcctagacaaaactcacaactacctgctcaagttcaaaatggcccatcccaagaagaatggaaattcaaagaagacaactacaagaacagcaacggcaaaaggagctggagcgggaaaggctggagcgagaaagaatggaaagagaaaggttggagagagagaggttagaaagggaaaggctggagagggagcgactggaacaagaacagctggagagagagagacaagaacgggaacggcaggaacgcctggagcggcaggaacgcctggagcggcaggaacgcctggagcggcaggaacgcctgtatcgcgagaggcaagaaagacaagaacgagag

SEQ ID NO: 92174 - DNA, 670 bp, Homo Sapiens
ctgatgttggagccagcccggagagatgcagttcttgcccttgagtccattggcttaactctgaaaggcgacctggagcaacggtaccattcctcgggcaatcatctcctgcatcctgccctcctcacagaccctaggacactgcagatccctaggacactgcagatccctgaacaccttgggggccaccaacaagggaggaaatgacatgggaagaatgtcgatgcacatgttcgtccactgttcctcccacctccggtcctcatcacgcagagcggaccctgtggtccacgactggcatctgggctctgctttcccattgcagagacccctgtgagcacccgccacgcccaggccctgtgcagcactctgatgtgtaacaggaaaggcaggcagagtccctgctctcaaggactcacctttaaggactgcatgggagacagacaacaaaattaaaaatagagaacaaaatagatggcagagtgcaacgtgctgtgatgtccatgagcagagggaaggagaggcacagagagaaagggacagccgcttcgtcacaggcgaccagaagcattcgtgtgatgttccacagtttcttcaatcccatttcattttctttttcttccatcatatttaagcaaaattaaatttattatgttgtagttgaaaaaaa

SEQ ID NO: 92175 - DNA, 1227 bp, Homo Sapiens
  misc_feature (86)..(94): n is a, c, g, or t
tttctataaattaataaaatttattcagcctcacaattactttgtgaactggaaataacaatgagttgtcattttatccaaatctnnnnnnnnncatacatacagtatcaagttctggttaaagtagtagatgaactttacgtggtacataagagtatctatacagtttgtgggctgcatcttgctagaatatattacattataaaatgcaccatttatttactctgcgatcaaacccccaacttgccccaagtggaggaaccctcagacatttgcagagcagtcagtgtgctagtaagcagcattctttacaaatctatgaacatcaaggtctccttggaacagatgctctgtgaacaatttataaaactccctcctgttagacacttaggttgattccatttttaaatcaattactgaataaaacacactccatcgtgtggatgaaatgctaccttaatttgtcaaagctatcattttctaaacttttctttttaattcaaatcattaatattttgtggccagatcaatactgattcattgttttaagcttcaaatgcattatacagttgggcagaacacatttcctctcatcaatcttcttttccaggatttgtcagatattcctgacattaattcactactaatatgcacagtttctctaatcatggtcaacaagatctgacagtgcattgtccctaaacgacccatacttgcctcactgacaccatgtggcccacttcccatctataatctatgtctgggtgtgaagcccttcccatatgatcccccgaatggaacttcacaagttcgaattcactgggtcacagtgtgatagcgtgaagatgggaggacgttaagggaaggctatgggtgagttgggaaatgtgttaggcagggtcagagattaccacatcctaaaaacaacacttaaggcgggagatgacaaaacaatcaatgaataacatgactttttccagtgaaagtgccatatctaatccttttccatttttgttctctgagcttctttcttagggaagatccttcttgagaagcccctgctgagtattaggaaaatgcatttcaggacctctcatcaacacaccctctttctttaccacaaccacatatatgggggcataactcaacatgtgtaaaagacaatcttctgcttttcactgaacctccaggaattcaggacaataaacctctacatgcagaccaaaa

SEQ ID NO: 92176 - DNA, 447 bp, Homo Sapiens
ggaggctttgtgcactgcttgctgccacttgaaccctgtgcccatcaaaaaaaagcagtcacaagaccaagcgactcagatatccaaacgcgcattcttcaccaagacctgaggcacagacgcctggtgagtgaggcttcaagggagatgctctttgtcctgggagagagccctctcccctctcttccaccatctcctgctcggacagaaaccgtacctgcagcaaggcatacctcctgccaactcctggtgaaaagaacatgcctcaaaactactcttttgccactcgttaaccacttccgtttgtggggacctcctggtcatgagcagcatcatcccgaagccttcaaagtgttctggattcatcacaggaccctccagcctcagccagcaaggataccaccaggaatgaaagtgctttaataaagagacagggtgtgcattaaa

SEQ ID NO: 92177 - DNA, 918 bp, Homo Sapiens
  misc_feature (164)..(164): n is a, c, g, or t
  misc_feature (256)..(256): n is a, c, g, or t
  misc_feature (299)..(299): n is a, c, g, or t
  misc_feature (321)..(321): n is a, c, g, or t
  misc_feature (815)..(858): n is a, c, g, or t
aatcgaaacaagtgccaagctgccagtcccctgggtgttgaccaggtgaaaatgaacccactgtgacttgtaaagctgcgggaaatgctcatttgtacaaatatggaggacctgcgagagcagaccccataccaggcactatgagcttcacaggcgctgcaaantggaggaaatgggctttacagatgtgggcccagaaaaaccagccagtcagctacaggccaaatttgagcaccttaagagacttcaccaaganagagagaatgaagcttgaagaaaagagaagacttttggaaganagaaataattgctttctctaanaaagaaagctacctccgagatatttcacagccagtcctttctggcaacaggcagcaacctgaggaaggacaaggaccgtaagaagtaagaggcccagccaccctccctggcagccctgcccacacttgtcacattgccctgtcggatcttcctagcgcttcttacttctgcttccttatgctttgtcttccttctccaactaaatgtcagctcctggagaggagagaccttgtccctcttgttcactgctgtttccccagcatccagaacagcacctggcacatgttatgtgttcagtatttgccaaaatgaatgaatgaacaaaataaaaatacatcacagtgtgaaaaggatcagttagctgggggaaaatggctgctcttattgaatagcccagccgtggccctagtacacagctaatggctgctgacctaccatgagttattttgaatttcatgtctaaataaagctgtgccctttgttggggaattttnnnnnnnnnnnnnnnnnnnnnnnnnnnnnnnnnnnnnnnnnnnngaccgcgtatgcggccgcaagcttattccctttagttgagggttaattttagcttggcac

SEQ ID NO: 92178 - DNA, 350 bp, Homo Sapiens
tttaaatggcaaaacatttattgagtcatctacagcagtctgacatccttaaaatcctggacaagatagtgagcacagcattaatggcagcagcagtagcagtaaggtctgtggggcttacttagctttactgtgggagatgaaacccaggctggtccagctcccacaagtgaggcaggaaccatgtctgagatgccaggggctgcaccactccagccctgatagaggcaaagctacagaagacagacatcagacaagacacacatagccaagtgcagccatgcccctgggagtcaacttcaaggatctgggacattttggtgttaccattctgatgttggagcggccgc

SEQ ID NO: 92179 - DNA, 399 bp, Homo Sapiens
tttggtatgactatttaaacatgatactctcctttgcaaaacaaattagagtatttagcagtataattctgacttgcagtatcacttttcaaaatctgcttatctgtagtaggtctgtttccattatgactactatagagcccatctgccttcttcttctgaaataaggtgagtgctgtggtactggagtttccgttcagatgcaaaccgctgtcaaagaggggagaggaggccccactgctgtggtcgctggatggccctggggaccctaacggccgcttcagaaatgccggcgcttccctgagatactcaacggtgatggtaacttcatcgccagcatttctcagcagatgcacctcctgttgggaggcttcacgtgcctacttcctgttgggaggc

SEQ ID NO: 92180 - DNA, 494 bp, Homo Sapiens
aaggtgccgtgtggagagcactttcggattcggcagaacctaccagagcacacccaaggctggcttggggagcaaatggctctggcttttgtttgctgttgtgccgtttgtgatactgaagtgtcaaagagacagtgagaagaataaggagcagagtcctcctggccttcgaggcttcccatttcgcactccactaaagaaaaatcaaaatgcttctctttacaaagactgtgtattcaataccttaaacgaacttgaagtggagcttttgaaatttgtgtccgaagtgcaaaatcttaaaggtgccatggcaacaggcagtggcagtaacctcaagcttcgaaggtcagagatgcctgcagatccataccatgtcacaatctgtaaaatatggggagaagaaagctctagctgaatggatttgtgtgtcaggagagaaaaaagttgagtgttgacaaactgtatgcaaactaataaaactattctgaagaaaa

SEQ ID NO: 92181 - DNA, 718 bp, Homo Sapiens
  misc_feature (384)..(557): n is a, c, g, or t
  misc_feature (563)..(563): n is a, c, g, or t
  misc_feature (565)..(568): n is a, c, g, or t
  misc_feature (579)..(593): n is a, c, g, or t
  misc_feature (621)..(633): n is a, c, g, or t
tcaccctcacatcacagccccttaaatctaatcagcaaactataatttgtacgttgaaacctgcaacacattagaaacttatatttaaaaacagaattaatcacactgaccaacttttaaatggaaaatatgtaaataggaagtgtttgggttttgttttttctttaagaaaaagaaatgtacaccactcctcatgtgccattttgtcctcagagggcggctttacttttttggtaaaggaacaagctgctggccttgaccaggagttcatatataactgttattacagaggaattgttataactactaatgtttttaaaaaatttattaaacattattaaacttgatcaggtcaggccaaataaagttttattggaacacagnnnnnnnnnnnnnnnnnnnnnnnnnnnnnnnnnnnnnnnnnnnnnnnnnnnnnnnnnnnnnnnnnnnnnnnnnnnnnnnnnnnnnnnnnnnnnnnnnnnnnnnnnnnnnnnnnnnnnnnnnnnnnnnnnnnnnnnnnnnnnnnnnnnnnnnnnnnnnnnnnnnnnnnnnnnnnngggagngnnnncccgtgggcgnnnnnnnnnnnnnnntcaaaaaattttttaaacaccctttgtnnnnnnnnnnnnnccccaaagggagaagaaaaaagaggcacaattgtttttccccaaaaaaaccccggggaaaaaacaaggggggggtttttcccccc

SEQ ID NO: 92182 - DNA, 449 bp, Homo Sapiens
  misc_feature (259)..(287): n is a, c, g, or t
gcggccgccgcgctcccagggctactggcgcagcgcacggagaacccggttctcggcgcggtgcgtcgtgctgggcccccgcgccgggccacctgaagccagaggatttggggcgcactgaagggactgcgtctcccagctcgaacccggcttaagtggggccgggagcgaggtcgggaaagtctcacccgcccaaagcctcaccaccgagaggcacttaaaaaggaaagcgcagagggaccctgcccacgcgcgtgtnnnnnnnnnnnnnnnnnnnnnnnnnnnnnagcaaacacgagctccccgccacttcctccccagggtctcctcaaggccaaatattgctcccaatgacagccagtcaccccttggcgaacgcctgctaaggctccgaagagccgggccaccgatctagctcccggctgaaagcagccgaccttgtcacgcgc

SEQ ID NO: 92183 - DNA, 503 bp, Homo Sapiens
agtcatcgttcgctgtgagtttagtggccttattgtgacagtgccatcatgtcttattcttccctgtgaaaccaggattaatcgtggactcctggcagcttaacctagctcagttgcagtgctaagcatgccccgcccccattcagtgatacctgtttgggaagtatatacttccccaaaagtactcttggccctaagttttaggaactttccccgacctggatcccttgtcatacctgtgttactgtttaaagcacacccacccaacttacaagatcttaggctgctgtggtggtgaagcaccttgagtctgctgatattcgggagaacaaggatctgcagtttccccttttctcccctctgaagagtggttcttatgtgcaatctgcagtaaccttgaactccagagctgcactatagaggagaatgcatgccactatgacagcagtatgccaagctttgtgttcatctcctaataaacgttaagacctttggtgtaaaaa

SEQ ID NO: 92184 - DNA, 393 bp, Homo Sapiens
cagagcagcctttgaatagactatgtcctagtgaagacatcaacctccgccttaagctatgtatgtatggaggccagtcgcagctttattatgcagacacacaagtggtctggacatgagggtacagtttctgcctaccaagacactacttgcactggatcttacgcaaaaaagaaccagaacacacagtgtggacaactgcccatatattctatctagattaggagagggtcctggctaggattttagtggtaattcctagttacattcaacaagtataaagattatagagcttattttatgaactataaactataatttaatgcaaaatatccttttatgaatttcatgttaatattgtgaaatattaaaataattccccaatagttgaaa

SEQ ID NO: 92185 - DNA, 249 bp, Homo Sapiens
ttggatcctacatacttcctagcacaaactactcataataaacatttgctgatttcatccttaagcttcttgtccccaaagtcaacaatactctaaaataatcttacaaccaaataaaatgcaaaaatagagtatccagtttttatggatgtcacacacagacacaaaaactattataaagaaaattcactaatactattataacctataatttgccactaataccttccttaaataactggttaaagt

SEQ ID NO: 92186 - DNA, 533 bp, Homo Sapiens
ggctggagcaactgtcatataagctgttatgaagtgcagaaactacacagacatttgtgcgggttcagaccagcgcaattagagatgggcagagtgggatggggtaggggtaaggtgcttgaaatttgcctgggtgggaatttttgaagtataaaaaggacttctacctggggggctgcggcagtagagggaagagcacggtcggtacaaatgcatggcaggtgtgaaacagtttgatttgttcaaagaatgatgaatcacttagtgttgtataatggatgggaggagagaaacacagcgatcacaaagggccatgtttgccaagaaataaaatatacttggaaaagtacgtatgtgtatataccacaaaactcgggtgcattctctagggaccggcgaagccattctttcaggagatatgctcagcatttgccacgggccagctgctgttccaggtcgtgggttagggcccggcaccaggaagggcgcccctcccacagggccgacatcctaaccggcgtcgctgcggccgc

SEQ ID NO: 92187 - DNA, 542 bp, Homo Sapiens
cagtaatttggaaacgggctaaggaggtctctcttggcactgaactgtgacaccttgggggaaaaaaagtgcaggaccagaaaatctttctcttccagtcagtgtcattcatttatgaccagcggttgaatccagtcataaaatctgaagctcctgggtacctctacatcactgggcctatgatacactgtttcagaacgtacttacacatggggtgggacgattttcttaactaatacttgtgactactccacagcaaagctggaaacaaaagtattgggtgagctatcttccaaaatctggagatggtttcggagagagtttcattgccataaatttaaagggggattggatttactcaggaaaaattgcaagtgagcgtaggagataaactagtaaatgtcatatttggcccaccaggcacaaagaagggttataattggctcctttaagtcctatatgcagatatcaaatccctatacttgctctttattgcatagaataaatttacctcactccttactttgaaacatgaaatgaaa

SEQ ID NO: 92188 - DNA, 427 bp, Homo Sapiens
ccggcctggcccggcgaggccgaggacgcggccgagcggcccctccaggatgagccggcggcggcggcaggcccgggcaagggtcgcttcctcgtccgcatctgtttccagggagacgagggcgcctgcccgacccgggacttcgtggtaggagcgcttatcctgcgctccatcggcatggacccgagcgacatctacgcggtcatccagatcccgggcagccgcgaattcgacgtgagcttccgctcagcggagaagctggccctgttcctacgcgtctacgaggagaagcgggagcaggaggactgctgggagaactttggtggtgctggggcggagcaagtccagcttgaagacgctcttcatcctcttccggaacgagacggggggacgtggaggaccattgtgactttggctcaagcgccac

SEQ ID NO: 92189 - DNA, 1410 bp, Homo Sapiens
  misc_feature (806)..(834): n is a, c, g, or t
  misc_feature (982)..(1040): n is a, c, g, or t
  misc_feature (1046)..(1107): n is a, c, g, or t
  misc_feature (1266)..(1278): n is a, c, g, or t
ggggggaaggaggtaaaatggccaccggcggcggcgcggaggaagagaggaaacgggggcggccgcagcttctgccccccgcgcggcccgcggcccggggcgaggaggccgacggcggccgcgagaagatgggctgggcccaggtggtgaagaatctagccgacgtgagcttccgctcagcggagaagctggccctgttcctacgcgtctacgaggagaagcgggagcaggaggactgctgggagaactttgtggtgctggggcggagcaagtccagcttgaagacgctcttcatcctcttccggaacgatacggtggacgtggaggacattgtgacttggctcaagcgccactgcgacgtgctggccgtgccggtgaaagtgaccgacaggtttgggatctggaccggggagtacaaatgcgagatcgagctgcgccagggggagggcggggtcaggcacttgccaggggccttcttcctgggggccgagaggggctacagctggtacaaggcgcagcccaagacatgctttaaatgtggttcccggacccacatgagcggcagctgcacgcaggacaggtgccttcaagtgccgcggagggaggggcacctggagcccttactgccggaaagggcatcgtgggccaacctctgtggcaagcgcaggacaccccctttgcccagtgtcccaaagcagtgcacaattccgtggcagctcagctaaccggcgtggccgggcactaaacacccgcctgcctgccagggtgaacacacagccagcttacccctcttaagtgccaaaacnnnnnnnnnnnnnnnnnnnnnnnnnnnnngaaggagatctttttaaaacctacaagagacatctctctatgccttcttaaaccgagtttactccatttcagcctgttctgaattggtgactctgtcaccaataacgactgcggagaactgtaacgtgcagatgtgttgcccctcccnnnnnnnnnnnnnnnnnnnnnnnnnnnnnnnnnnnnnnnnnnnnnnnnnnnnnnnnnnntctctnnnnnnnnnnnnnnnnnnnnnnnnnnnnnnnnnnnnnnnnnnnnnnnnnnnnnnnnnnnnnnttggggctgccttggctcctctttatggcccacccactagggaccggggcccaaaacccggggtaaggccctcccattcagggtttgcctgaattgaaaaaacttggtgaactgtgggcttccatccacaaggggccaacccttttggccgacttcttnnnnnnnnnnnnnaatttaaattggcctggcgcttttaaactacacggggagcctgagagaattttgtgggaaacccattggggtggttaaaaaagagggataattaattctcgggagtcaaataaaagcgctcgtgaaatgggg

SEQ ID NO: 92190 - DNA, 518 bp, Homo Sapiens
tgttttaggttggcatgagacatcagtcaaatacattaaatacattggtttggtccaggaaggcgggacaacgcaaaggggtgagcgtgggggcttccaggctataggtaaatttaaatattttctagttgacaattggttgagtttgtctgaagacctgggattgatagaaaggaagtgttcaggttaagataaaagatagtggagactaaggttcttttgaagtcttatggtggctgctcttagagataatagatgacaaatgtttcctattcagatcttcaaaaggtgttagacttttagttaatccgtttaggattggggagggcctggaagaaaaacatctagctatgttaatagatgttctttacagatgcacattttaccccacaaaggatagcttttgggggaaaatgctgtcctttatggaagaaattgcaaaatagggcaaagaaacatgttttggggtaaaatattttgactttctttttgtcacgtaatgttatgccagagtcaga

SEQ ID NO: 92191 - DNA, 552 bp, Homo Sapiens
tttaatatttgaagggatttattctgaaccaaatatgagtgaccatggcccgtgacacagccctcaggaggtcctgagaacatgtgcccaaggtggtgggggagcagtttggttttatacattttaggaaggcatgagacatcaatcaaatacattcaagaaatacattagtttagtgcagaaaggcgggacaactcaaagcaggtgctctcaggctataggtaaatttaaacgttttctgattgacaattggtggagtttgtctaaagacctgagatcgatagaaatgaaatattcaggttagaataaaaaattgtggagatcagggttcttctgaagtcttatagtggctgcccttagacacaatagatgacaagtgtttcctatttagatgtttaaaaggtgctggagttttaattaatctcttcaggattgagaggacctggaagaaaaaaatctagctatgttaacagagattctttacagatgcaaaatttcccccagaaagaacatctttgccaggccatatcaagatatggcaaagaaacatgt

SEQ ID NO: 92192 - DNA, 450 bp, Homo Sapiens
gccaggagtgcaacggcagggtgggtccagccttgagcccctccacccccaaatccttcctctcctcccagtcccaccccttgccccacggagtcctggggacgcagtgccccagctgggaagagggcgggatcgggcactggttcctccttgtccccgctttcttgggggcttgctactttttgtcttctattgtgtggctttctgagtatttgaaccccagtcctgtgtcaccttcctttttccttctctgtcccctctctgcgggggggcgctgaggctgagggggagctgcgtcttgctagggcttcccccttctccccatcccggtctccagagacccagcttctgagagacagggtgtgggcatctccatgcccctataaagcgtgcctggggcttgtctggggctggggaggaataaaccatgtatataaaagagaaaaaaaa

SEQ ID NO: 92193 - DNA, 907 bp, Homo Sapiens
caagggaggccccagggccgggtaacccatggaaaacccatgaactccttcctggggtgagcgagcccctgtggcagtgggggcatgctggggttggctggcgtcagagggatgggacgctggacctggtcattgtagcccatcaaggcccgacggctgttcttggggcccaggaacctattcaccagcatggtccatccgagagagaaatggaactcaatgtcttcctggaagtcagcacacagcttgtcacagtttaggtcatagttgagggagaagcactggcgtgggaccagcatgtctatctgactccgcacagacacaggaaggaggggtttcaagccatctatcatgtcctgctgcatggtctgcagggagttggtgatggccgtggagcagcggtcagacatgtttcgacccagtccttcctctatgtggcggtgcagctcattcttataaaccttgaggactactggagaagggtggaagtccatctggtaatcgtccaccagtacagagaggcgcctgatctcctcggccattgcagtcgacacctgcctctccacttcctccgtaatctgcttaattcgcagcttatagtcttgagccaagagctccagctgtttgtcaataaatttcagtcggtcttgccgctcttcacgcatttcctcgcagtaaacctgctgctcccgagccgccatgtgcagggagtccatgatgagtcgaaccgcctctgcaatctgcttggcccggaccgtgtgctgctcaaacttggtcttcactgcagactgggagatgcactcctcaaatctcctctcaaaattctgaaactcaaacatcctcacttgaaagccttctgcgagagcgccccctccttcagcctcgtgccgaattcgccacccaggcc

SEQ ID NO: 92194 - DNA, 981 bp, Homo Sapiens
  misc_feature (522)..(530): n is a, c, g, or t
  misc_feature (897)..(910): n is a, c, g, or t
tccagcaaaacgtcattctttccaagagccatcatgcatttctgacaataaacaattaatagggtaagccttcgattctagcttctgaggcacacaggataggaattactctttacctgaagatgagccaaaataggatttggggcttctggcggtatgaccttgtacaaaaacactaccttttctctccagtgaacagcaataagcaatctattccccaacacaacctctatcccaaggaaattgtgatgcccagaattttaggtgaaagccaaagcaattattatataggattattaactttggctattgaagtttttcctcttcagaagtgttactaaaggggaaacagagcagttttctttgacttaaaattttaggactcatagactttgttccttcactaacagcagtgtccttcactaacagggagctggaatgaactgataaagcaaagcaagaaacaaaaagcaaggagccagagatgggccccaagggaaatgtaaggaaatggtagggacnnnnnnnnnggaaaagaaacaaattcacaagaaacaatcatctatctgtaatttagattctgaacaaccctcctcaccctctcaaaattcttaagtttcaacactgtaaaaatctcaaagagcatactagttaccatgaacctaacattcttccctaaaaaggcttccaaaaaagcactaggctattgtagtgattttgttagtgctgaggaccagctttctttaaaagccactggagagctatgatttcagaggctggctgtgcttcttcaaccctatgtcttgccttcaaagtacctgttatggaagggatcccatgtcaaaataatctaatctctctctcccagccccacaaaatatagcaacaaagactccnnnnnnnnnnnnnntcagacttcctgttaataaataaggaatctcaggttccacaacaaaaaaacacacatgttcaaagtgcacc

SEQ ID NO: 92195 - DNA, 538 bp, Homo Sapiens
actgcttcaagggagggtctgggagaggagtgaatgggaagatgcccctaaacacctggaggtgattcagcctcaccctcccagaacatatggcacctacctccccttcccaagcacctcacacctctgctgaggcggttcccttggtctggaatgccactctccactctgcccagatgacgaacacctgtgcctctttcaggacttggcttgggatctttcctcggaagattttccagaactgtcctgagatagtgtttccatttctccccatgctcccactggaccctctatgtatttccatcatagcacatataccttctgctccaggattgcaaattccccaaggcaaagatggccttgtctttctttttagactcagtacctggaatggcaaatgagatagatactacccaggtagagcttatgatcaggtgggatttttataaagatatctgaataaggaattaagccttcagtgaggagctttaaatgcatgatattttaccaattacactaccaggactttagcacctaa

SEQ ID NO: 92196 - DNA, 414 bp, Homo Sapiens
ctccaaatacgcaccagataaactattgtatctattcagtatgactgttctaactctggctttgagctgtcgaggtggcttctaccttaggtctagtttttggaaaggtgaagcaggagtggaagctctctaagggatacgaaatctgattttatccaaagaaatcacagcagcctttgaaagacacattcagattttcaaacaaacaacagacatttcaaaaccaggcgctctgcttattcactgaaaccgtaagctgctgaaactcagggaaaagcttaagaaactggtcttaaagcttcaggccaaacaatgcttcaaatcacatttgaagtaatcacttaaaaacagtagaaaaatcagttatcaattacctaaaacacttatacccaataaaatattcccatgatgaaa

SEQ ID NO: 92197 - DNA, 419 bp, Homo Sapiens
tttcttagcatttccttggcacctaccatgtgccagacactgggctatgagccatgggttattacagtgatgatacaataggttgctgtcactgctagacctttgccatcagagggcttcctgtgctcaggggacagcactctccagatcctggctcgctgccacagttgtcactctgagtggaggagaacggacgcggccctcagaaggcaagctgctgcccgaaggacctgagtctgccggactccacctggagccagaaccacgatcctcttcataacatgaggccttttatggctctatctgctccccactgtctgggcccagtggtagcagaggggttgacaaggactccacatgcatggcactgaacttctccatcagagtagcccctccaaaaccaaacacacaccgcacaa

SEQ ID NO: 92198 - DNA, 431 bp, Homo Sapiens
  misc_feature (419)..(419): n is a, c, g, or t
gaggatggaagactgagtagaggtatgggtggagagcagggtggtgggaacctgaagacaacctcatctcatttgttcaggtccttcccggcatttgaggaccagatcaaagaatttcagcttcacaaatgctaatccttgagggttagaggtgaaggggttgagtccctgtgtacccttagggtgtcctttgccaccctaggcctcagtttccccatcaatagggaatacccaagacccataatctggagttccaggtttctttcaaacgccaggagggagggttggggggaccccatgttcctttggttccccttcccatttgccacctgcccccaaggccagctcacctgttctgggagctgtgcagtcctcagcagctgcagggtctccaggtgggagtgaaagagggggctggnctgcaggcggcc

SEQ ID NO: 92199 - DNA, 1045 bp, Homo Sapiens
tttccatttgtaaccaatgtttggtgttgcaaaacagggctgcagagtagtgagatgcggggtggcacacagtgcagatgagctccttgccaagctctgtctctaaaaggcaatgaattcatttgatgggttttgatttttatgccaatctggttttcaaaccaaagctattgcctatgctgatatctagaaaaactatttttccaaggagcatacagccttaaacaaggtgaggagtattttaattttgttttattttagttacttaaggcagtaagcaaacttaatctgcattaccagacataaaaacgcgttttatacttccatgcgttaaatgagtcttctcaaagtccatggaattaaaagtacatttaaatcacaataaactaagtttataaaattaagtttttcccagtagagaatgactaagaaaatctgattaattcatacacttgactcaatggaattgtaatgctctttttgctgagcgttaaataaggcctggccttgacattccacatcccaaatagggatttagttcctgctataaacttgagactattgcccagcactaatgctgttttaatgcctagtatttctatttgaaattatccatgacctcttctctgcctctagggtggtataccttgactcagatggacgacatgctatgcaatgtaacttaacttctaaaggaggtatttcctggtggaaatctccacaggaaagcatcctgttttataactaatgagactcaaagacgggaaggttagttataaccattcgaaagtcatatgtcagctaattatcagatcttaatgacttgcccatgaaattgggagtgcatattgctttaatgagaccctttatttattccccagcctccttccctaactttaatctgtttctttttttattaaacaaagtgaatagaaattcttgacctccaaatatagaatgtagtgaaagaaatgattaggaaaggccccatggtaaataaagacttcagactatctccacaggagtctcccagcccctagttcat

SEQ ID NO: 92200 - DNA, 844 bp, Homo Sapiens
tgcggccgccagtggattctccgaggccctgatgttgaaacttccccattgggtgcaccaagagcagcctcacatggtgtgggctgacatcaagagctgccagatccatgatcgagatggccaatctttcctaagctgctcaccttacaagaaaacgaatcgtactgctaagaattcaaacttcagcagtcatggggagccttggaaggagcccgaatcactgatggaattggacagtgcatggagatggttcagcaggacaagggtaagtgcaggggcaagtccaggtcatactgagagacaacgagtggcgctgacagagacagacaaagataaaatcaaaagtttgtgcttcatcttcaaaaactcaaactaataacaaacttggccttatgagaaataataagtatttttctatttacatgagaatttaatctcaaaacaggaatcagaaacatattaagtccagggcataaaacctaaaccactgctcatatttattctttctaaatagagcaaagtgtaaaatcttctccataaaatgcacattgtgcttatgaaaaggccagtcttagtgagaatcattggtattccatagaagagtgaattaaacacagccaagggaagacccaagtctcatacttctcttgtatattccagagttccaggggaattccaggtgatagaggtgatctcccatactgttaaagcaaggttgcagacacttgggaattttggtcccagtactctaggaggtcacacctctgtcctggaaaatactacaggaatgtatactcttcctatgactcattctggtcattcttccagcatcacaaaaaccaaa

SEQ ID NO: 92201 - DNA, 233 bp, Homo Sapiens
ccgttggggctgcaatgtgctcgcggtcccagcttgtgctttgtaagaagagggaatataactagactgttattttaggttaaaatagccaagagacagacgccttcgcctcaaaaatattctgagacacataaaagtagaaggaaacaagtctcttcagtcacaaaatgtcgtacatcccgcatatactagattcaattaatttaataaaatagaatatacatagagaaaaa

SEQ ID NO: 92202 - DNA, 432 bp, Homo Sapiens
tcccacgtttataaagatgctactggagttccacgaggggtaccagataaatttaaggcccgaaatcaaacagcttcaggatttgaatctgtgctgttttggtggtcaactgtaaataaaaatgtagattggataaactacatttattacaaccaacaaaggtttgttaactacacaagacatgccattaagggaacagcctcccaattaggtcccattaactaaatagtctgggaaaacaggatagccctagatacgatgctagcagaaaaaggtggtgtctgtgtcttgattggagtccaatgatgtacttttattcctaataacacagcccctgacggaacagtaacaaaagctttgcaggacctaacctccttatccaatgagttagcaagcaattctggaataaatgatccatttacaagtttaaaa

SEQ ID NO: 92203 - DNA, 623 bp, Homo Sapiens
cgaggcaacaaggaaccatttctccatcggattgtgacgtgcgatgaaaagtggattttatacgacaactggcgacgactagttcagtggttggatcgagaagaagctccaaagcacttcccaaagccaaacttgtaccaaaaaaaggtcatattcgctgtttggtggtctgcagcttgtctgattcactgtagctttcagaatacccgtgaaaccattacatctgagaagtatgctcagcaactcaatgagatacatcgaaaactgcaatgcctgcagccagcattggttaacaggaagggcccaattcttcacaacaacgttgactcgactgcacgtcgcacaaataacgcttctgaagttgagcgaattgggctacgaagattttcctaatccatcatattcatctgacctctcaccaatcgactaccacttcttcaaacatctccacaactttttgcaggtaaaacgcttccacaacgaggggatgcaagcattttctgtccaatcccgaagcacagatttttaccctccaggaataaacaaacttatttcttgttggcaaaaatgtgttgattgtaatggttcctattttgattaataaagatgtgtttgagcctaaa

SEQ ID NO: 92204 - DNA, 762 bp, Homo Sapiens
  misc_feature (380)..(393): n is a, c, g, or t
gggctactgcggctgcgcaagctcgacgcgcgcactcttgtctgcttacgagggctcctcccttcagctttggtccctcggggcgtctgggcagcctacgctttccggataaaaatggcagaatgaaagaatgatgagtggaactagagaataggaaagacatgaaccaacgcccaaaatgagaaagaaggacatataaagaaaaagacaaatacaagtgaaaaaaatagactaatggattaacgtccctgtcgtgtgacattttctggtatgacagctgaagatgttgaaccgtatggtgcagttttgcaaatagtgtatgaagtgggttgtaagttttaccagtaattgtctatagatacaaaaaggagccaacctcnnnnnnnnnnnnnnagtgtgatgttccttgttctatcttcgaactctcaaaggtagcctttacacagatgttcaaactaattctaccaggtgtcatatgtctaccaatctcattacttcccttgtatgtacttctagagcaaagagctcattacagtaagaatgatggtaaattttactgaggcaaacaaagatttctgaacgcgagcagtgtgtgtgaaatgcttatgcactagctgatagcataactctggtcacagaaattcggtcacttaaatattataatcgaatttagcccctaaagtagctgttcttaacctggaatctgaagaacagcctgtggtggggctcccagggaatttgttgaaccactgaaattcatat

SEQ ID NO: 92205 - DNA, 491 bp, Homo Sapiens
tttttaggctcaaacacatctttattaatcaaaataggaaccattacaatcaacacttttttgccaacgagaaataaatttgtttattcctgcagcataaacatccatgcttctggattcaacaaactcttggaaagcatttttctgcatcctgctggtgtggaagcatttcacctgcaaaaagctgtcaagatgcttcaagaagtgaagcatccaatggctggccactgtgttcctcatattcaaggctctagtctgctttgcaaaacttcttgaatcacagctgccctgtatgttcgttagtagttcctgggccaaatgcgctgttcatgtttcaagttatctctgctgcgttatgacccattttgaactcaaataagaaaaccacttgaagttgctttatgtctaatatcatttccatagtcagaaaatgtcacacgacagggacgttaatccattagtctatttttttcacttgtatttgtcttttt

SEQ ID NO: 92206 - DNA, 369 bp, Homo Sapiens
aggtgacccttctccccgtgcaccttccagagattaacacgtaaacaaagaaataaacacagattccaactgtgatgcatgtggtgaagaaagaactggggcccagtatttgttgacctttcagtgttctgcactcccaagggagggccacgtggtggggatggaacacaggcatggacagtacgtaccttcctcctttagcaaacagggatgatgggcgcctgtgattagtccacacaaaagcattcgggagggtataacactcaaatgtaatattagtggcgtggcaagattcttccccattgatgaccattagtgtgctatttttgttttctctatgaagaagaaaattaaaatttttttcattgc

SEQ ID NO: 92207 - DNA, 869 bp, Homo Sapiens
tcagaggaatttcaacgagagcctcacccgattactgatgagtctctggaagtaacgagagaatccctggtttagccattgagtcctcaggatgcgggaatcaggaccatcactatgctgatggaacaaaggaaccaactaaaccgcatagaagaaggctggacccaattaaataaggacatgagagagacagagaagactttaacagaactcaacaaatgctgtggcctttgtgtctgcccatgtaatagaacaaagaactttgagtctggcaaggcttataagacaacatggggagatggtggagaaaactcaccttgcaatgtagtatctaaacagccaggcccggtgacaaatggtcagcttcagcaaccaacaacaggagcagccagtggtggatacattaaacgcataactaatgatgccagagaagatgaaatggaagagaacctgactcaagtgggcagtatcctgggaaatctaaaagacatggccctgaacataggcaatgagattgatgctcaaaatccacaaataaaacgaatcacagacaagcaagcagacagatctgggaatcactgaggatgctctggggaagcatgctgagctcaagacaattctcttccaggcgaagaattttaaggcgtggacagcaagatatcttcactgagatctgagatatctattgaaaaaccacaaaagaataacaggaaaaagcaaaagcactatactggttacttttagtacattaaaacaaaacaaaaatctttacttgactatttgttctagttttcccctcttttaccacctccattttctcactgcctactcactccagaagcctctgttatctagcttctgttactacg

SEQ ID NO: 92208 - DNA, 1155 bp, Homo Sapiens
  misc_feature (45)..(79): n is a, c, g, or t
  misc_feature (981)..(981): n is a, c, g, or t
  misc_feature (1039)..(1039): n is a, c, g, or t
  misc_feature (1090)..(1090): n is a, c, g, or t
  misc_feature (1139)..(1139): n is a, c, g, or t
ccgaacgacgagcgcagcgaagtcatgtgagcgaggaagcggcgnnnnnnnnnnnnnnnnnnnnnnnnnnnnnnnnnnncagtcgacggtaccggacatatgcccgggaattcggccattacggccggggggtgttggggtgtccgagttgccgccggagaggagtggcctcgcccgcttgagttttgattcatcatggataatctgtcatcagaagaaattcaacagagagctcaccagattactgatgagtctctggaaagtacgaggagaatcctgggtttagccattgagtctcaggatgcaggaatcaagaccatcactatgctggatgaacaaaaggaacaactaaaccgcatagaagaaggcttggaccaaataaataaggacatgagagagacagagaagactttaacagaactcaacaaatgctgtggcctttgtgtctgcccatgtaatagaacaaagaactttgagtctggcaaggcttataagacaacatggggagatggtggagaaaactcaccttgcaatgtagtatctaaacagccaggcccggtgacaaatggtcagcttcagcaaccaacaacgggagcagccagtggtggatacattaaacgcataactaatgatgccagagaagatgaaatggaagagaacctgactcaagtgggcagtatcctgggaaatctaaaagacatggccctgaacataggcaatgagattgatgctcaaaatccacaaataaaacgaatcacagacaaggctgacaccaacagagatcgtattgatattgccaatgccagagcaaagaaactcattgacagctaaagctactgctggtcttctttatcatttattcacttccgtagctcctccttgaaagttattaccttttcagagtttaagttttcggttccacgctcttctaattgggagataatatgggaagagggcccagagcaggtacagcccctcctntcttttttggttttctgttgaaggggccgactggctggctctggcctttctttctaanaattttcttttctcaaattcatacggcttaagaattgggttttcctatggncatggtttaaggggttttcattcctccttcatataactttcaccaaggntcctttttggcctttc

SEQ ID NO: 92209 - DNA, 873 bp, Homo Sapiens
  misc_feature (96)..(96): n is a, c, g, or t
  misc_feature (117)..(117): n is a, c, g, or t
ctgggcctgcggtaggtccgcagctacagcagcatgacttcactcccaagatcttctcgctgggctactgccccactgggaagtggctggctgtgngcatggagagcagcaacgtgnaggtgctgcaccacaccaagcctgacaagtaccagctgcacctgcacgagagctgcgtgctctcccttcaagttcgcctactgcgggcaagtggttcgtgagcactgggaaagataaccttctcaacgcctggaggacgccttatggagccagcatattccagtctaaagaatcctcgtctgtcttgagttgtgacatttcagcggatgacaaatacattgtaacaggctctggtgacaagaaggccacagtttatgaggtcatctactaaacaagaactccagcagggctgtcaaactctgggagaaaccgactcggctctgacagggagacccccaggcgaggggccccgaggatggcggaggatgggccgcaggcagccgagcgttcagggctgcgctccggccggctgagagggcacgtgccccgtcacagtctggactcctgggcctggattgatgtgtctcacagactcggaagggttctgctcctcctcctccccctgaacaatgctggcagttgctacaaatagatttattggaggcttatggctccggttcccccacagacccgctcatgagtctctgtttgttcttcccttttcttttgccctgtccctcaccttgggtcgggggtgctggagtggaccacaatgttgtgctgggggatgggggggtctctctttgccgattgtgcagtgcacaagatttgtgaaaaatgtaaataacagactcctattgcggcgttggatgcagt

SEQ ID NO: 92210 - DNA, 443 bp, Homo Sapiens
caggtgaccaatgaaacagcaactgtgaatgagaaaagagaaaagactgtgtaacattcagcctgcgacagcaatatattaaagacaataaagattcccaaaggaaaaacatgccaacctactttccaactcctccaaacctgaaaaatttgtctttccgggatgctcaagtactcagagttacaaacccactttttgtggaatatgcttggataagagatgctgtatccctaataagtctaaaatgattactatccaatttgattgcccaaatgaggggtcatttaaatggaagatgctgtggattacatcttgtgtgtgtcagagaaactgcagagaacctggagatatattttctgagctcaagattctgtaaaaccaagcaaatgggggaaaagttagtcaatcctgtcatataataaaaaaattagtgagtataaaaa

SEQ ID NO: 92211 - DNA, 365 bp, Homo Sapiens
aagagaaataatagtaacgataatagctagtatctacttgagtgcacactctgtcaggaatcatgctaagtaggtctcattcaatcctcaccacagtctacggggttgggtatatggagagaaggggattctgattaagcccccgtgactctacaaaggggtctcctgcaatgggcacctgaaaaagcctcgactagtaaaggaagaagctgtttaaagacgaaacaaggaacccaaatttctcaggcagtgtgagcctacacacggaaagaagtctcaggcctgaagcacaggcacctttctattctcctgacagcccacccgagggacatcaagagccacagatgtcatgataggtgtgtgag

SEQ ID NO: 92212 - DNA, 593 bp, Homo Sapiens
  misc_feature (43)..(43): n is a, c, g, or t
tgcagcttctgctggtgggaaggccgatggcagagcccagggnaagttatgtaacgggcccagctaatgagtggcagaggccagagggcttggcctgcagaactgtctaaggccagaggccgtccatacactctttccacatacgaacgtctcctgaaggggaagcgggctcttctcagatgcacagggacaatgtgaaaatcctgtcctcagattgagaggctgtttcgtgggcaccgaattcggggtcaggaaagcagcctgcatccacgagtatcctcgggttactaagtggggccagtggctccaggtgtaacccatttaagtttgccagacagccgggatgttctggtgaaggatctgaagtgtatggccacaccagtcccagaagagcctgggagaagggaagatggtgaacacagtggagttctgctgcaaagccgaagatggttctggcacgtggcatgacccacatgactcaacatcaggagatctgacttcataaaagtgaactatcacaatgctgctttgcaagctgtgtgtgagtgtaaaagcgttgaaacttcctcaataaatgaaaagatatctttaaa

SEQ ID NO: 92213 - DNA, 531 bp, Homo Sapiens
atttcatgttccgggtcaaaccaaatgtctggacacatgaatcaaaccgcagggttaccatgaggaggatttctggccttcgaggaaatgctccaaggctggaattttctacgacttcagtgattactgaatgtctgataagttcaaggaaatgccacactcaggataaatttatttaccatttggctccagttgaaaaatcacatggcagactgcaaaacagaacatcaagatcacaaaagaaaaaatccaagtcacctgagagaagtaaatactgtataaatgcaaaaaactacgaacagcctacaatttcttcaaaatcacactctccatctccctacacaaaaagacgcatgtgtgagctatctgaagacaccaggcggcggctggcccatttaaatctgggaccctatgagttcaaaaaagaaacagataaacctccatttgtgattagacatgttgatcccccaagtcccagggctgatactttattgggatcttctggaagagactgtgaaagagatggatggt

SEQ ID NO: 92214 - DNA, 567 bp, Homo Sapiens
gagagctgggcttttctgaactacttcagtacaccttgctgtgccttggcctgccgtgtttcatccccatggctgtcctcagtgatgtgcatggtcactgctcccttcaccactgagaagacgggcacaggacagtcaggggatgtgtccaaggtcccacagcaggaagggctggagccagaatgtggtctgagaggctggatatacaaagagacaatggcatgaccatctgtacaaatggaactatggcccacaacctgcagcagccagcccaggaagccaacccgtcacctgcagcagccaggatggatgctggcctgccctcactgatactcaaatcattagtcttatagggaaatccaaacacctccaacatgtaagctcttaaagcactctatggaatgactgaaaaaacagctatattacagaccacaacattgaacccaacatccccctaagtaggttgtactcacatcattggtcttatggggaaattttaagacctaccacttgtaaggttttatagccctctatggaatattgaagaaagagtaaaatgcatccaaa

SEQ ID NO: 92215 - DNA, 509 bp, Homo Sapiens
  misc_feature (122)..(149): n is a, c, g, or t
gcggccgcttgggccgcgggagcctgacgtctccgcctgccgcagccaatccccgcgccgctcggcccgcgccgctgccgcctcccgccagcggccggggcgctgcctgaggcggcgagggnnnnnnnnnnnnnnnnnnnnnnnnnnnncagtagcctcgggggctccctcagcctgggtcagaggaagcgagaagaaagtctaaaaatccgaaggtttagtcgcacgcacgtttataataatagcaaaaggcgggcgtccccgcgccgcaggttgcttaggaggaggactgggtttcctgggcgttcctgggcgccggggcgctgagaagatgctacccgcggcgggcgggtgcggagagcacgaaaacgactccagtcggcccgcggcttcctctctgagggaacttaatcgtcccctccccgaactgcctccccgaccgtccccaggcgttctctgggctctgtgacgttcctacaggacgctctctgggctctgtgacgttccta

SEQ ID NO: 92216 - DNA, 331 bp, Homo Sapiens
  misc_feature (60)..(114): n is a, c, g, or t
  misc_feature (137)..(152): n is a, c, g, or t
attacaccaaattatgttcacacaaaacctttgtaatcagggggaattaaagagccttcnnnnnnnnnnnnnnnnnnnnnnnnnnnnnnnnnnnnnnnnnnnnnnnnnnnnnnngaatagagtgagatcctgcctcnnnnnnnnnnnnnnnnttctttattttctccataaactacagtttatataagcaaaagtttcagtactaagcaattttagtctctgcagtctcttgtcttgaattaaaacaacttttgttaattctcttatgaagttaatcttcctgcttgtatgtgaattaaatatatgtcaaactttttttgtacaaaagaaa

SEQ ID NO: 92217 - DNA, 520 bp, Homo Sapiens
caatgatatccaccttttttcaatatttgcctaaggccaccctggccctgccattcaaaatcaccttttctgtcattttggcgtttgtggtacattgcagaaccctgacttaggccaggaggccatttaggaaattattcctgacattttgttttaaattaataaaatacataaaatagggttccttgtaatagatctcacacatcaagcataagtagatcgcattatttatttttaaatgacatatgctgtagctcagttttgtagaattcaagaatatacttcatcttttgtgtaggtaatttcattcaatttcccagtcccctctttcattttggagaaataaaatttgtgttttatgtctatatatactctccaatggggcaattcaaaaataaaagtgcatccttaacactgcatttctttgcttttggcctgcactagaacttttccctcatttcaatgtagcttttgtatgggtgaatgcaataaaaaaggtaataaacttaataaatggttc

SEQ ID NO: 92218 - DNA, 243 bp, Homo Sapiens
acaggggagagttacctgttgctgtgggagcaatgaggagttatggaggaaaggagaggtaccaagaccagaccaaatccctgatggctggtgtggccaggcatgtagtggaggctggccctggagagaagaggaacagaaactgattttaatctcaaggggctgaagctggagctccacatgtgacccccagaagcacgggaccccatccgggacgccgctgtgcatgcagctgtcacatct

SEQ ID NO: 92219 - DNA, 459 bp, Homo Sapiens
agagaaacaacgaaaaaactcctatataaaacatagatttacaactaagaaagaatcctcctagataactacaatcttcagctgtgactgtgcatccgtggtgagcagggattttgaatcaagactgcgttaggaagaggctcaagggggcagacagtgccacctccagagaagccactgctcctactcctgcctctcctgctactgccgccacggtcctctgctcctgcagcccccactgggcgccggattccttcttggagtgcggaggtcctgttccttcaggaacgacagacagcttttctccccgtctcctcgtttgctcagccggcaggtgcaggactggagatctgaggtggtcctgcgtctcgaggagccgggcgcccgactgtgagaaggaggaggcaagctatggggagagggggcgacaggaatgccaggctcatgaggccggcggcc

SEQ ID NO: 92220 - DNA, 567 bp, Homo Sapiens
  misc_feature (374)..(386): n is a, c, g, or t
tcaaatgttttgctccatttagagatgtgcctaaacagatgatgcaaatgtttgggcttggtgcgatcagccttatcctggtatgtctgcccatttattgccgctctcttttctggaggagcgaaccggccgatgatttacaaaggcaggacaacagagttgtaacgggtttgaagaaacaaagaaggaagcgaaagaggaagtctgaaatgttacagaaagcagcaagaggacgtgaggaacatggtgacgagtagcaagagaccaaagtgtttgcttgagcaagtcctttaactttcttgggcttcatttcaccaatcttcagaatgagaaggttgatttgatgaataggagaagtgatttatctcagaagnnnnnnnnnnnnntctttatataagcattattttcccctcaagacaacagaaaccattcagagcagaggggactgtctcagccatgcaaacctcatggagcattttggaaagttaaaaattgattcttatttttgtcatgtttactttcaaacatgaaataaaattgagttctgttttcatgcatcaaaaaaaa

SEQ ID NO: 92221 - DNA, 445 bp, Homo Sapiens
  misc_feature (283)..(295): n is a, c, g, or t
tttgtaggctgaaaatcacaagatctgtattcaaaagacccagaggagatgctggtgtcttcagttgagtctgaaatccttggaaccaggaacatactgtggctttagttccagaaaaagtctgtttagccaagggtgtaagttccagtctgaaagccagcaagttctagacccaagaagagcttgtgtttctacttgagtccaaaggcaagaaaagataaatgttccacttcaaagcagtcaggcaggaagagttttctcctactagagggagagtcaatcnnnnnnnnnnnnncctcaagctttaaactgattggaagatggctccccagaatctctgatctaggacaagatactaaattgatcatggcctctcttccactaagaagaaaaaaatataggaagtaagctgctaattgcatactattatattccagtcattatt

SEQ ID NO: 92222 - DNA, 520 bp, Homo Sapiens
aagggaaattattgcttaatgtcgaaaaggagatagattgttatatgttgtgtagaaagttctcacaccaggtaggcaagttggccaccagcaaggccctcctatgagcatgacagcttaaaagtgcaggcaggccctcagctcaactattggtatatggaaaatgagaaatgttctgtgagataagaaatgttttgtcatttttctcagatttgctcccagtcccccatcagctgcttttcccttgtataaaagagatcaaaggaatacacaggatctattcacaggtcccacaaggaaggtggttggaagagtcacagataagggtgttgggtgagaagagctggactgagtccagagattgaaattacaggaagccccattagtccaaagcactgaactcggtgtcctgtttctgccttccagcctcctcctcatcttcacctttccccctcaccagtgttgcttggctaaaccagtatttcttgtgtactaaagaaactgaaaagataaccacaaa

SEQ ID NO: 92223 - DNA, 958 bp, Homo Sapiens
aatttgcccattattctatctcagttatcatattagtatttccccttccgcagtcccacataaccttagaggactaatatcctccttcaccaggtggtcaaccaaaattctacctgaaccctagccgttactcacatctcggaacagtccttccctccccccacgaacaatcccagacaacagttcaaggcatttgtggctattactaaagaaaactcttttttaagcaatttgatttgttcacatacaaaaaggtaaagccagactccagcagttcacaagccataataaagctaatcgtgtgggaagttcaatttacagcctgtgaaatataaaggcatttattcctcaagattcacccaaaacaacccgtacgctacatacatagagagcagagattggtaggcgaggcgagaccagaccgcatttctagaccatgaacacagcgaatactagcaagaaaaaaagcttctccccgccaaggggaggcttccaaccacgagacaaacgcgtacagcttttctcccttgtacagaaagagactgactcctgttgcgccatgggggaggcggagggacacaacgtaaaagtgggggttccaaaaggagtcaaaaggagagtatggggttaccgtcacgccacaccgagagaagcggagacgacactttcacccggtgggggcgggggcgaggctcccccagcgcggactcgggttcggggcgtgcagggcgcactctctttgtgggtctccaagcgaaggcacagttcgggggccggggtggagggcgcgctctagcaggccgggcgcacgggcacctgcaggaggatcacctgtctgttttcggatgggtggcacttgttgatgtgccgcgtaaggccgggcgagctgtagaaggtgccgggcagtacttgcagcctcgtgccgattcaacaccaggcctcgtactagctaaggttt

SEQ ID NO: 92224 - DNA, 432 bp, Homo Sapiens
ttttgactttgaaaatttttatttgaatagtaaatagttatacagttgaaacagttctattgaagctttctataaatagctaacaattaagaaaataatgtatgtagaaaagagattgcatttaaaagtaagagctgtcggttgtacaagggccctggggaccctcgaagcagaataaatgataggttgtctgtaattcactcagataggtataaaagttaaaactttaagcagatccctttagaaaaaggctctcttctaaaacgcacagtggaatgtcaagagtggcagggtggggagggggcagcgcgccaaaaaaatctgcaatcaaataatatcataatcttcataattaatataaataaataaagaataaataacaattactcataaatcaacatatacatttagagggaacggatagtccgacct

SEQ ID NO: 92225 - DNA, 689 bp, Homo Sapiens
  misc_feature (309)..(309): n is a, c, g, or t
  misc_feature (312)..(315): n is a, c, g, or t
  misc_feature (318)..(318): n is a, c, g, or t
  misc_feature (322)..(324): n is a, c, g, or t
  misc_feature (326)..(327): n is a, c, g, or t
  misc_feature (336)..(336): n is a, c, g, or t
  misc_feature (475)..(475): n is a, c, g, or t
ttcgctgtgttcatggtctagaaatgcggtctggtctcgcctcgcctaccaatctctgctctctatgtatgtagcgtacgggttgttttgggtgaatcttgaggaataaatgcctttatatttcacaggctgtaaattgaacttcccacacgattagctttattatggcttgtgaactgctggagtctggctttacctttttgtatgtgaacaaatcaaattgcttaaaaaagagttttctttagtatagccacaaatgccttgaactgttgtctgggattgttttgtggggggagggaagggagtgtnccnnnnatnctgnnntnnctgcctcantgtttcacgtcatactctctggtttgatatctttgttgaggtaggactatcagttccctctaaatgtatatgtagatctatgagtaatggttatatattctttatttatgtatatgaagtatgaagagatgatataatngatagcagattattaggcgcgaggccacttccgaccgagccatctagacatccactgtcgtgtagaagaagcattttcaaaagggactgcataaatgttacgttaatgctactgatgattaagacagccgacatgatgctactggaagatccgagggccgtgacagcagagatctactgtaatgcatgatttctgcgtacgtattgcatacagc

SEQ ID NO: 92226 - DNA, 469 bp, Homo Sapiens
  misc_feature (17)..(17): n is a, c, g, or t
  misc_feature (90)..(145): n is a, c, g, or t
ttcacgtaaaggctttntggttgatcatcgttgttgaggtaggactatccagttccctctaaatgtatatgttgatgtatgagtaagtgnnnnnnnnnnnnnnnnnnnnnnnnnnnnnnnnnnnnnnnnnnnnnnnnnnnnnnnncagatttttttggcgcgctgccccctccccaccctgccactcttgacattccactgtgcgttttagaagagagcctttttctaaagggatctgcttaaagttttaacttttatacctatctgagtgaattacagacaacctatcatttattctgcttcgagggtccccagggcccttgtacaaccgacagctcttacttttaaatgcaatctcttttctacatacattattttcttaattgttagctatttatagaaagcttcaatagaactgtttcaactgtataactatttactattcaaataaaatattttcaaagtcaaa

SEQ ID NO: 92227 - DNA, 450 bp, Homo Sapiens
  misc_feature (329)..(384): n is a, c, g, or t
ttttttttgactttgtaaatattttatttgaatagtaaataggtatacagttgaaacagttctattgaagctttctataaatagctaacaattaagaaaataatgtatgtagaaaagagattgcatttaaaagtaagagctgtcggttgtacaagggccctggggaccctcgaagcagaataaatgataggttgtctgtaattcactcagataggtataaaagttaaaactttaagcagatccctttagaaaaaggctctcttctaaaacgcacagtggaatgtcaagagtggcagggtggggagggggcagcgcgccaaaaaaactgnnnnnnnnnnnnnnnnnnnnnnnnnnnnnnnnnnnnnnnnnnnnnnnnnnnnnnnncaattactcataaatcaacatatacatttagagggaactgatagtcctacctcaacaaagatgatc

SEQ ID NO: 92228 - DNA, 727 bp, Homo Sapiens
  misc_feature (338)..(384): n is a, c, g, or t
  misc_feature (703)..(703): n is a, c, g, or t
tttgactttgaaaatattttatttgaatagtaaatagttatacagttgaaacagttctattgaagctttctataaatagctaacaattaagaaaataatgtatgtagaaaagagattgcatttaaaagtaagagctgtcggttgtacaagggccctggggaccctcgaagcagaataaatgataggttgtctgtaattcactcagataggtataaaagttaaaactttaagcagatccctttagaaaaaggctctcttctaaaacgcacagtggaatgtcaagagtggcagggtggggagggggcagcgcgccaaaaaaatctgcaatcaaataatannnnnnnnnnnnnnnnnnnnnnnnnnnnnnnnnnnnnnnnnnnnnnntactcataaatcaacatatacatttagagggaactgatagtcctacctcaacaaagatgatcaaaccaaaaagtcttacgtgaaacactgaggcagttactacagcatcttcggaacactcccttccctccccccacaaaacaatcccagacaacagttcaaggcatttgtggctatactaaagaaaactcttttttaagcaatttgatttgttcacatacaaaaaggtaaagccagactccagcagttcacaagccataataaagctaatcgtgtgggaagtcatttacagccctgtgaatataaaggcatttattcnctcagattcacccaaaacaccccg

SEQ ID NO: 92229 - DNA, 445 bp, Homo Sapiens
  misc_feature (321)..(376): n is a, c, g, or t
actttgaaaatattttatttgaatagtaaatagttatacagttgaaacagttctattgaagctttctataaatagctaacaattaagaaaataatgtatgtagaaaagagattgcatttaaaagtaagagctgtcggttgtacaagggccctggggaccctcgaagcagaataaatgataggttgtctgtaattcactcagataggtataaaagttaaaactttaagcagatccctttagaaaaaggctctcttctaaaacgcacagtggaatgtcaagagtggcagggtggggagggggcagcgcgccaaaaaaatctgnnnnnnnnnnnnnnnnnnnnnnnnnnnnnnnnnnnnnnnnnnnnnnnnnnnnnnnncaattactcataaatcaacatatacatttagagggaactgatagtcctacctcaacaaagatgatcaaa

SEQ ID NO: 92230 - DNA, 435 bp, Homo Sapiens
  misc_feature (54)..(115): n is a, c, g, or t
gaggtaggactatcagttccctctaaatgtatatgttgatttatgagtaattgnnnnnnnnnnnnnnnnnnnnnnnnnnnnnnnnnnnnnnnnnnnnnnnnnnnnnnnnnnnnnntttttggcgcgctgccccctccccaccctgccactcttgacattccactgtgcgttttagaagagagcctttttctaaagggatctgcttaaagttttaacttttatacctatctgagtgaattacagacaacctatcatttattctgcttcgagggtccccagggcccttgtacaaccgacagctcttacttttaaatgcaatctcttttctacatacattattttcttaattgttagctatttatagaaagcttcaatagaactgtttcaactgtataactatttactattcaaataaaatattttcaaagtcaaaaa

SEQ ID NO: 92231 - DNA, 1413 bp, Homo Sapiens
  misc_feature (830)..(1008): n is a, c, g, or t
  misc_feature (1017)..(1030): n is a, c, g, or t
  misc_feature (1055)..(1065): n is a, c, g, or t
  misc_feature (1070)..(1225): n is a, c, g, or t
  misc_feature (1249)..(1266): n is a, c, g, or t
  misc_feature (1313)..(1321): n is a, c, g, or t
ggcaagaaagcaataaggcttttgtaggccacaatcaggagaaagcttgttgggccaaaaggttcagtgaacctgcacggttttccaaacacagccggtgtctcccagcccccaccaggaagggggcaataaagcatcccccacccccgttggtggacccagatgcacctcggtccctcacacttggcgcacttggactccttccaagttggctcacccccaagactaccatggtgttactggcagctcttccaggacaccagttgcaccgggcgcactacgacctgtcccacaccctcctgggtgtggtctcattggggtcaacctcaggagaagtgtcgcacccccggaaaacacgcacagtggtgcagcctagtgttggtgctgctgctgggccagtggttcctccatgtccggggaggatcagacacttcaaggtctaggctagacatggcagagatgaggaggtttggcacagaaaacatagccaccattttgtccaagcctgggcatgggtggggggccttgtctgctggccacgcaagtgtcacatgcgatctacattaatatcaagtcttgactccctacttcccgtcattcctcacaggacagaagcagagtgggtggtggttatgtttgacagaaggcattaggttgacaacttgtcatgattttgacggtaagccaccatgattgtgttctctgcctctggttgaccttacaaaaaccattggaactgtgactttgaaaggtgctcttgctaagcttatatgtgcctgttaatgaaagtgcctgaaagaccttccttaataaagaaggttctaagctgnnnnnnnnnnnnnnnnnnnnnnnnnnnnnnnnnnnnnnnnnnnnnnnnnnnnnnnnnnnnnnnnnnnnnnnnnnnnnnnnnnnnnnnnnnnnnnnnnnnnnnnnnnnnnnnnnnnnnnnnnnnnnnnnnnnnnnnnnnnnnnnnnnnnnnnnnnnnnnnnnnnnnnnnnnnnnnnnnnnttttggggnnnnnnnnnnnnnnaaaaaaatttttaaaaccttttttnnnnnnnnnnnccccnnnnnnnnnnnnnnnnnnnnnnnnnnnnnnnnnnnnnnnnnnnnnnnnnnnnnnnnnnnnnnnnnnnnnnnnnnnnnnnnnnnnnnnnnnnnnnnnnnnnnnnnnnnnnnnnnnnnnnnnnnnnnnnnnnnnnnnnnnnnnnnnnnnnnnnnnnnnccccaggcgttttttatttaattnnnnnnnnnnnnnnnnnnattagaggggaggggggaatttttttaacctttcccgccgaggggannnnnnnnnaacgggggtgtgaatcctttattccccggggggacacccccccttggcccgcggggagaaaaatttttccccccgtggaaaaaacggggggg

SEQ ID NO: 92232 - DNA, 553 bp, Homo Sapiens
ttaaattaatacatgtcaagtgcttagagtaatgcatggcaaagatagcaagggcttttgagtattgaccgcatctatccaacagaactatttctcaaggagcacatagacaacaagcctgggtcataacgtcattttcattcacattgcacctgaagtgagtttttatgtcttttaggtaccagggtatgatgcaaggagctgggctttagttataaacacttgaatccaagtccaaattgccaaatttgccgtttcactttaggcaaatatgtcacctctctgtgcctcaaattttctaacctgtaaagttggaataatatctacttcacagggctatttaggccaaaaattacacagttaaactctcagcatcatgcctggttcatagtagacacaccataaattttaattccttttcacttcttcccataaggcaaacaattacagctttacaacattgccttagagcccaaccatgactagaatgtgcaaaattaatttcatttttaaatctcaaatcccacaaaatgagtttacttaaaatgaaact

SEQ ID NO: 92233 - DNA, 453 bp, Homo Sapiens
cctttggtccagagcctgggatgttgccttttgcccactggaattcccatcttggaagagtaagcgcaggggattgtccagacagccaggaggccagcgaagccaagtccttcagtacagcctgggagcctccaggaagctgttaggagttgccatgatgggtgcatttggactcacagaatctgccttccaatctcagtgctgcttctactcctttgctaccttagaatcttaggtctttgaagacaggtccataccttgtgtgtttgtatttggacaaccacagacattgccaagaaatgtatctgttctacttgcacaccttcaccacctggatgctgcttgaggacacagatctggtccatcagatttctctctgtactcctctctatatttcgccatatttgatatagacccatcaatggctccctagaataaaatctcaactcttcc

SEQ ID NO: 92234 - DNA, 503 bp, Homo Sapiens
gatctgccttaactccaacttacatgttttggtcactattacaaactgtcatcccagaatgatgctgcagaggctagggctaggacacagaccagtgtttccatgtgggaattccctcccagtatttcttaggaaatgtatgttttttgaatccataatccctagaaaaatcagttgaggaaatgagaagtattgtaattattctgtgaatagtaacacttaccattatggagacatcactagtttgaaagaatccaacttcatcaaatattaacgtaccgagttgaaggctacaagaactgagacaggagcatagcagagagaaacggtcaccatctcattagccctatttttggttgttgtgatgccattacatctgtatatctggccatatcagctgctaatggtgagttcttgcaaacaaaatgatttgataaacaacctaccatactttatacaaatcttatggtgttccgagaaataaactttggaagcaaaataaa

SEQ ID NO: 92235 - DNA, 842 bp, Homo Sapiens
  misc_feature (187)..(187): n is a, c, g, or t
tgcttacctgcaggaactgaaaacatcagccatggccaggcccccagaagacaaaagaagggaccagggaactggtgacctaagcaacccactgcttaagaaacctgcgttccagccagagttggcctcagaatgacctgctctggctcagggatccctggtggatggggaaaagcactttcctggngatggaaaaacgttctcagctttaagacacccccattaggcagacactgggttctgtgacagcagagcatgaccttaagggttacagggaggctgcacacagcagtcccaggccctgtgaggggcttcagactccagctacagcgagcctgccccttttcttcaagggactgtcttgagggctccaaagtatagctaactagtcacctgggtgctgtgctgaaagtcccatgggagaactcaaagcgtgcattatcacagcctgaggggaatgtggaagggatgttttgtaagaactaccaacagttttgcacgaacaatgtcttttaaattaaaataaaaccttgaaaaaagtcagctttctttcctgagtcttccttacctacaaacactcaggagggggatggagctcaggcccttgtcttctgggtagttttgttactactgttgcttttaagaagcaaatgtcacaaggctttcttcaatgggatgttcaattgagtacttccagtcaacagtgcttcccaaagtgggtggtgtgaaggaagaggaggtacattaagagctattttatttgaggtagtcatttttataaccttgtttacttggatttataaaagcagactcacctaataaaatcaacattcattgtaaaa

SEQ ID NO: 92236 - DNA, 419 bp, Homo Sapiens
gagcagtaccttggcactgatgaattaccaaagaatgacttgataacctacctgcagaagaatgcagacgctgctttcctgcgccactggaaattaactggcactaataaaagtattaggaaaaacagaaattgttctcagctcatagctgcatataaggatttttgtgagcatggaacaaagtctgggttaaaccagggggccatttctactcttcaaagtagtgatattcttaatttaacaaaagaacaacctcaggccaaagcaggcaatggacagaactcttgtggagtagaagatgtccttcagcttctgcgtattctgtatatagttgcaagtgacccttattcaagaatatcccaggaagatggtgatgaacagctcttcagtttacttttccactagatgaattcactagc

SEQ ID NO: 92237 - DNA, 405 bp, Homo Sapiens
caatgccccaggggcttaggcaatttccgcttcagcttcctggaggtccccagcccaaggctcaaaaaactgcacactatccggcccaccccgggtcgcgcaagactttcggggggagggggaaacccagcgaccctgcaaatggcttcaccttggaaaccggtataaggaagcaagtaataccgtgttaaaagaaggtcaaatgtcagttacaaacagaaacgtaaaacataaagtcgctagagaaagccattttaacgaggacatttgacccaaaagcttaagtaaagcaagtattaacaaaacaagaaaatggatgtaaagcaaacagtaaacattaaaaactccctttcaacccagtcttttttgtttagatcttggagttgggccgggcatggtggctca

SEQ ID NO: 92238 - DNA, 1196 bp, Homo Sapiens
gggacagtcgcgtgctagactccggacccgccagtggtatggctgagccgactagtgatttcgagactcctatcgggtggcatgcgtctcccgagctgactcccacgttagggcccctgagcgacactgccccgccgcgggacaggtggatgttctgggcaatgctgccgccaccgccaccaccacttacgtcctcgcttcccgcagccgggtcaaagccttcctctgagtcgcagccccccatggaggcccagtctctccccggggctccgccccccttcgacgcccagattcttcccggggcgcaaccccccttcgacgcccagtctccccttgattctcagcctcaacccagcggccagccttggaatttccatgcttccacatcgtggtattggagacagtcttctgataggtttcctcggcatcagaagtccttcaaccctgcagttaaaaattcttattatccacgaaagtatgatgcaaaattcacagacttcagcttacctcccagtagaaaacagaaaaaagagaaaagacaggaaccagttgtttcacttttttttgtgatacctgtgatcgggggtacgaacccccgaaaaaagataacaaatcccagtcggatcatgccaccccgccccgcacccgcatagccccccgatatggcgacacgcggaagtagagcagacagccggttagtaaaatgagagacaggccagggcggattgtcgacgcggtgatgggagaagaactcgacaggtcagcggccgtgcacggacggcgaggcggaagaaaggacacctagcggcggcgggttgggccccgggcgggcggcagtgtacagagccgatgtatggccaccctaaccggcggcctgagagaaagcaagagagagcgcagatgggcgggggggaatagacgtttaagccctggggcatgggcccgcggctagaagataaaagaaacgattcgttcaacggccaaccaatgcatctccggctttacccaccatataccaccccccttcatagccgcgggatctgcgtcacccgcgtggcgtgccacgctcctggccgcagtcgcgcggcaccaccacccgtcccgataccgcaccgcattccttccagaacatagtgtgatgccacaagcaggagagcacccgcggaccgtggcaatagacgccgccccgtccctcg

SEQ ID NO: 92239 - DNA, 519 bp, Homo Sapiens
gagataagaacttgtgtctgggctttgtaatgggaggtagattataggaagcagaagggaggggacaggccatgtgggacagggaaggaagaaaataaagagtatgttactgaggctgagtattgtcatcagcaacgggggttcaatcctgctggagaccctctaagaaactgtggaatgcaccttggaattatctctcccgatgctgggaggctgggacatgtaatggatttccatcctctactagttgaaggtttcctctaggaatgttaactgcccccttcctgggctgcctagcacctttgataggtaggaatacttggtccctgatgtattattctctgcttttttagggcctcagccaaaacggagacacaaaatgcatcatgctaacattgttgaatgtatgtgtatgactacataatattctatcattttgttttatataatctatgaaccaacatcttatatttactgtagttctatttttattaaaacgtatatgaaaatttaaaaaaa

SEQ ID NO: 92240 - DNA, 411 bp, Homo Sapiens
  misc_feature (242)..(293): n is a, c, g, or t
agcaagaccctgtttccaaaagaaaacaagaaaagcctaacactgaaaaaaaatttgaagttgcaatataaccaagcaattcatagctaaggaggtaatcagcaaaagaagcaactaagaagagtttgaagtggttacctctagaaatacaaaacaagagaaagaaacatgcagggcacccctagtttttgttaggatacgcagaccaagacttttaaaccatgtgcatatatataactgannnnnnnnnnnnnnnnnnnnnnnnnnnnnnnnnnnnnnnnnnnnnnnnnnnngaaacaggtttctcatagaagaaattacttataaggaacataaagctatagacaacagaaaatgttttaaagttaaaaaataaagaaaaattggtgtatgaaacaataaaggttattc

SEQ ID NO: 92241 - DNA, 573 bp, Homo Sapiens
  misc_feature (48)..(153): n is a, c, g, or t
gggtcatggcgtagttgtacattgaggaaaggctatgtcatgtcagtnnnnnnnnnnnnnnnnnnnnnnnnnnnnnnnnnnnnnnnnnnnnnnnnnnnnnnnnnnnnnnnnnnnnnnnnnnnnnnnnnnnnnnnnnnnnnnnnnnnnnnnnnnatgagccaccgtgcccagccagtcttattcattttcgaaatttctagcagactattatgtgcatgacagacattcaaacactatcatatttgtgtcatgtattgttcatgtaagagccacatgaatagaaaccatagtaaggactttaggaactaaagaaagatcaagagaccagaattagactaatgataaaaatataattactaagtgcttgtatatgctaggcactgatcctcagtgtttaataaacatctcatttcattctcattataccagatggcatcaccttagcagcagatggaaaacagaaatatatagttaataaaatccaaagtcacacaaccatgacttgaacttggctgtgactccaaagccaaagcactgaactgctactgagctgtagtgaaatcaagatagcta

SEQ ID NO: 92242 - DNA, 1324 bp, Homo Sapiens
caatgcatagtgacactatagaaccacgtgtgtaacaaaagcagctggtaccggtccggaattcccgggatatcgtcgacccacgcagtcgactactgcccccaggagaaatagcactcttctcccttccccacagatggcatggactctgtgcctccctacacctcataccctgcctcctccaggaggaatctccggggccccgttcctgactctccccaccttcgaccacttgtctctaggctatgtggacaatcatcccattcaccacttgacatccttgacatccattgacatttcattcccccaacctccagcaggttggacccaatcctcttcacctctgtgttatcttctagaagatgcattttgggtctgagaggagcattaatcctggaaggccatctatttaaggcccctgcttgctgtcatagtgcagagcagaaacttgcacactatttagagagctcccttcccacctctctgcccagcctatgtaacctcacttcatgctctggccatggctgtgaagggcccagccagctccctgttaatgatgtactgtgcaacagctccggggtcttgtgactggagatcctcaacaggccctggagccaggactggagtcttggcagctgatgagcagcaccttgccggccaggaggagctgatgctgacgatctccccaacatctgaaggcttaaagaacattgtcgttcttcagccctccttgcttctctcaatacaataagacattgcagaagcaaaagggtggcctctgctccaggcaaggcagctggctctgtctggggcatcggcctggggcttgggtgccacgtgctgagattgcatagtcaaaacagccatttttgccaacaatagcttgtggctccccacattttcctaccctgcactcaagggccagaccactctctgcatggaccagaccatcttcccaaacccatggtgctttttccccaactcaacctagactccaaggtggggagggatgggtcagaggccatagtggcccctggataatcctgacgtggggtggagtggggtgaggcagagggagcagccccaacacctgcactgggccatctatgggaaagaacacgggtcgagtgcagtcgagttgtctggccatctgtatttggatctataactgtactttgcctggcgctgtgcgcaaggtcagaaaacttactgctagtacctagaaacacacaaggctgcccagccaaatcttaatgtaaagtagctagagccatggaagtacagtatgaattaaaaagaaaaaagtattgaactacaataaaaa

SEQ ID NO: 92243 - DNA, 1271 bp, Homo Sapiens
  misc_feature (69)..(77): n is a, c, g, or t
  misc_feature (1228)..(1228): n is a, c, g, or t
  misc_feature (1230)..(1230): n is a, c, g, or t
  misc_feature (1253)..(1253): n is a, c, g, or t
caggccccgacccgcccccccagaccaagaagccccaagcttcccctttgccctgggaggccaggaggnnnnnnnnnttttgggcttccggccaaagttcctttattggtcattggaggcgaacgcaaaggaggggctggaagacacccccaaatgtttcttttaagccctttcaggatgttgggggagatttgttccagccatcaggctcctcctgggccggcaaaggtgcttgctcatcagcttgccaagactcccagtcctgggctccagggcctgtggaggatctccagtcccaagaccccggagctgttccccagaacatcaaaacagggagctggctgggcccttcacagccatggccagagcagaagtgaggtaacaaggctgggcagagaggtgggaagggagctctctaaatagtgtgcaagtttctgctctgcactatgacaccaagcaggggccttaaaagatggccttccaggaaaatgctcctctcagacccaaaatgcatctgtctagaaggaaaacacaagaggtgaagaggattggggccaacctgctggagcttgggggaatgaaactcaaggatgtcaaggatgtcaagtggtgaatgggatgattgtcccatagcctagagacaagtggcgaaggtggggagagtcaggaaggggccccggagattcctcctggaggaggcaggcagggtatgaggtgtagggaggccagagccctgccatctgggggaagggagaagagtgctatttctcctgggggcagtaggagaaaagggctggctttggctgccctgaagagcttaaagaagtggcatggtatgacacagaaagtacccttctgggaccacaagcatccagaaagatacttccccctagtcctttctccaggatctcatcttagggatactgcctggaaatgtaataggtatagttcaagtttgggtgggggggcagggacacggagagaatccacttctcacaaagcattcctcttgagctctctttgtcctccccatgtcattccaggttcttagtgtcagtgttctaaggcaaacccaaggcttttagccaaagcttcatactaaatccaaaccctatctgaacaaaagagaagtgctagaaccagaagtggctactctccactgtttccgacgcgtgggtcgacgatatcccgggaatatccggaccgtaccagccctgcatgtgtctantntcacacccagcgtgggttctacntagtgtcactagatgccc

SEQ ID NO: 92244 - DNA, 1146 bp, Homo Sapiens
gcacctttaaagggtgactcgtcccacttgtgttctctctcctggtgcagagttgcaaggcaagtttatcggagtatcgccatgaagttcgtcccctgcctcctgctggtgaccttgtcctgcctggggacttgggtcaggccccgaggcaaaagcaaggaagcactggggaggaattccatttccagactggagggagagattcctgcactatgcgtcccagcagcttggggcaaggtgctggagaagtctggcttcgcgtcgactgccgcaacacagaccagacctactggtgtgagtacagggggcagcccagcatgtgccaggctttcgctgctgaccccaaatcttactggaatcaagccctgcaggagctgaggcgccttcaccatgcgtgccaggggccccggtgcttaggccatccgtgtgcagggaggcttggaccccaggcccatatgcagcaggtgacttccagcctcaagggcagcccagagcccaaccagcagcctgaggctgggacgccatctctgaggcccaaggccacagtgaaactcacagaagcaacacagctgggaaaggactcgatggaagagctgggaaaagccaaacccaacacccgacccacagccaaacctacccagcctggacccaggcccggagggaatgaggaagcaaagaagaaggcctgggaacattgttggaaacccttccaggccctgtgcgcctttctcatcagcttcttccgagggtgacaggtgaaagacccctacagatctgacctctccctgacagacaaccatctctttttatattatgccgctttcaatccaacgttctcacactggaagaagagagtttctaatcagatgcaacggcccaaattcttgatctgcagcttctctgaagtttggaaaagaaaccttcctttctggagtttgcagagttcagcaatatgatagggaacaggtgctgatgggcccaagagtgacaagcatacacaactacttattatctgtagaagttttgctttgttgatctgagccttctatgaaagtttaaatatgtaacgcattcatgaatttccagtgttcagtaaatagcagctatgtgtgtgcaaaataaaagaatgatttcagaaatacgaaa

SEQ ID NO: 92245 - DNA, 531 bp, Homo Sapiens
tccaatttcagagaccacaaggtcgggagcgcctgcggaggcttctgaactgggaggagtttgacgaacagagagactcccggaggagcatcctgctggacaccctctacgagagcatcatctttgcagtgggcaaaggcttcccatgggtggaggtggcccaggtggtcaagttcacagaagagctgctaagggaaaccaaagtgacaaagagaaaggaatactcttacagggaagaagctgacagctgcctccttagtcaaatgatccaagtggacattgtcagtaaaaggccacacacagaatcccgtgtgcctggtcagacgcagtgagcagccagcattctcctgtgatggttccaacaaagactcatggcccgaatctaatcaagagaaaacagcaaagtaggaccatggctcaaagtagccctcctgccagcttcaaatactcgaaggccataagagcccagcaaagactgataaacctttccaaactgaaagaggcgaagggatgtcttcacacgtgaaaaaa

SEQ ID NO: 92246 - DNA, 480 bp, Homo Sapiens
cacctttgaattgaaccttgacacctcctcggtctgtggatagccttcctcggttaaggaggttttcaccaagtcaagttcctattcaaactaggtcatttgtatgttttggggatgatggagaacctcagttaaaggaatccaaacctaaagaggaagttaaaaaggaggaattggaatccaaagggactttggaacagcgtggacataatccagaagaaaaggaaatcaaaccttttgagtcaacagtctctgaagtcctatcactgcctgtcacagagactgtatgtctgacaccaaatgaggaccaattgaatcaacccacagaaccccctcctaaacccgttttcccacccactgctccaaaaaatgttaatctgattgaagtttccctctcagatttgaaaccccctgaaaaggctgatgtacctgttgaaaaatatgatggagaaagtgataaagaacaatttgatgatgaaa

SEQ ID NO: 92247 - DNA, 526 bp, Homo Sapiens
tgatttttctttgattatatgggggttccacagtgccaatgaacagaacttgtggacacccttttcaggcttgcaattgccccagtgggcctctgagacactctctcaaccttatctgaacccgtgagaggccagttcgaagtgtgagaacactgctccaccttggagttgcctttgtcttggttcctgccttctcagagagccgtgctgagaacaggagtccctgcgaggcccgggatgaagatcttctctctggatccggaagaatcataatatttatcaactctgtaaactctcgggaaagcacttgtgctagcaaggtaacctggcctttgtgaattcatgcactagtctccatttctgggaagagcttcagcaccagcagcacataccactgtgagggcaagtgaaaaagtatcactttgggtagatggatataatcctcccgtaaagcttcatttgcaagaaaaccactatcacccttttccacctgtggaataaagatccttcttacatgtccaagaaa

SEQ ID NO: 92248 - DNA, 763 bp, Homo Sapiens
ggttttgggctgtttattttcccatcagagcagtttcccggcccgcgagacagaggggacacaaacgcagcaagggcggccgcagaagggcaccgctggcacggggtggccccaatgaccgagtccaggaaagctcgatccgcacggaaggcagcacccgtgctccccgctggaggcggtatgtgtccctgaaatccacggtcaggcttgtgcggaagaaatcgaggcccggaagtccaggaggggcgccccacggccgggagcgggaagggtccggaggcaggagggcggcgcctacgtgtcggggtccagccagcggcactgctcctccagcaccccgcggaacacctggaagcggtggttgaggtcgggccgtgcgtggatgcggaagcgggtgcccagggcgccgtcgggcgagggcgcaccgtagaagacgcgcaggatgcgtgcgtgcaccagggccatggcgcacatggcgcagggctcgcgggtcacgtacaggtcgtagccagtgcacaggtaggggaggccgtcctcgtctgcgtccagtttacgcacggcgcctgcgcggacggcctggggggcagcggccggggcgaaggagcaggcggggaagggtctgaagtcgtaggtgccgcggccctggccgcgcgccacgaggtccacgcacaccatgacggcgtgcaggaggggggtagtccgcagcagctgcagtcgtggccggttggccagcacgcggtccagaggccagggtccactacca

SEQ ID NO: 92249 - DNA, 167 bp, Homo Sapiens
tttaaaataaattatccactgaaatgtattaatatgatataaacttggaaactgatgtttaaaaattttaaactcttaagtccagacttacttttacatggcacatttgttatttggctataaacattttgattttctttgccaataatgaaaataacatgaaaatg

SEQ ID NO: 92250 - DNA, 537 bp, Homo Sapiens
tgcggccgcgcgaattcgcacaggtgacctcaaagcagaagctctgaattcacctctcatctgacgactgacagctgctgccaccgccagcctctgtcccttgcccaggcctgtcacacggctgcctctcagcaggggcagtagaatgaaagagggcatgtctaataacagcaccactagcatctcccaagccaggaaagctgtggagcagctaaagatggaagcctgtatggacagggtcaaggtctcccaggcagccgcggacctcctggcctactgtgaagctcacgtgcgggaagatcctctcatcattccagtgcctgcatcagaaaacccctttcgcgagaagaagttcttttgtaccattctctaactccgtgtgtgatgaaaacgcctccttttctgaccttcaaagtcccctgtagagaccatgcatgctctaagccttagggagtgagaccaacacccatccctgcccagccaacagtggccggggcttgtcttatgtttccatctgttttcttcgtggcattcaat

SEQ ID NO: 92251 - DNA, 431 bp, Homo Sapiens
gcggccgccagtgctctggtcccgcgtggacaaggaggctgcactgctgccctcggggctgcccctggaggagactccggacgggaagctgcggctggagcgagtgagccgagacatgagcgggacctaccgctgccagacggcccgctataatggcttcaacgtgcgcccccgtgaggcccaggtgcagctgaacgtgcagtgtgagtccaccacgccacccggactaccttcccagctttccttctggctcccagccggcctgtcccctcttcatcctctcacccaccccagtccaaccaaaccccaccagctactcctgatacccctaatgctccttgacagccccatgctgtaggacacggaggtctgtgttctttgctccatttcatcaagtatctcccatcttcattttcagggacccggtgaac

SEQ ID NO: 92252 - DNA, 450 bp, Homo Sapiens
tttaactaaccaagacagaatacaacgtggtgtgaaggtattcacaaaagcaaaagaaaagccttcggcgaatacttacagattctcatatagaagagagaaaggcaataggaaaaaaataacatttattgaatatttaatgaggtgatgtccacagggctcagtacactggcgcaaccaaggcacgttagctggtccaaggcaagaaagatagttctagtatccgagagaccacgtgtagcctctaagctcacattcatatttcattttgtatatacgcatgtttcggcttttattctcctgttgtctctccaaagattcttaccacttgctgactgcaaaacaaacaactgtcaacaacttttctattatttatacactaaaacatgcctttcaaatttttaaaatttgaacttgaattagaaaagaatttttaacattggttttatc

SEQ ID NO: 92253 - DNA, 501 bp, Homo Sapiens
ctccaaaaaaggaaccacataagcacacaagaaaagagtgctatgatgttcttagcatttgctatcatgcctatttttatctagatttttaaatgtagcttgtcataacaaaattttaattacaattggcttgtatgagaagaaaaagtatttttattgttttgagtgatgacgcagagactcaatgaacttgaaaatagcattgcttcgtgcactttgaataccaatcaggtgttttctgtgctactagttgtcacgttgcattcatgttcacctcctgatttaagtatctcgggtgtgcccagccactaaagcactctggactaatcgctaaagagaagcaacgtggggggtggggttgcgagggatgtgttcacatgtacccatcatttgatcatagcactgtgattgcttttgatgtgtgtctctagtggtgtgttgtctgttggcatgcttaaagcacatgtccattaaaattcattttgttccttttaaaaaaaa

SEQ ID NO: 92254 - DNA, 1774 bp, Homo Sapiens
gtctaggtagcgaggcctgggtggcgatttcggcacgaggcggtggcctagagatgctgctgccgcggttgcagttgtcgcgcacgcctctgcccgccagcccgctccaccgccgtagcgcccgagtgtcggggggcgcacccgagtcgggccatgaggccgggaaccgcgctacaggccgtgctgctggccgtgctgctggtggggctgcgggccgcgacgggtcgcctgctgagtgggcagccagtctgccggggagggacacagaggccttgttataaagtcatttacttccatgatacttctcgaagactgaactttgaggaagccaaagaagcctgcaggagggatggaggccagctagtcagcatcgagtctgaagatgaacagaaactgatagaaaagttcattgaaaacctcttgccatctgatggtgacttctggattgggctcaggaggcgtgaggagaaacaaagcaatagcacagcctgccaggacctttatgcttggactgatggcagcatatcacaatttaggaactggtatgtggatgagccgtcctgcggcagcgaggtctgcgtggtcatgtaccatcagccatcggcacccgctggcatcggaggcccctacatgttccagtggaatgatgaccggtgcaacatgaagaacaatttcatttgcaaatattctgatgagaaaccagcagttccttctagagaagctgaaggtgaggaaacagagctgacaacacctgtacttccagaagaaacacaggaagaagatgccaaaaaaacatttaaagaaagtagagaagctgccttgaatctggcctacatcctaatccccagcattccccttctcctcctccttgtggtcaccacagttgtatgttgggtttggatctgtagaaaaagaaaacgggagcagccagaccctagcacaaagaagcaacacaccatctggccctctcctcaccagggaaacagcccggacctagaggtctacaatgtcataagaaaacaaagcgaagctgacttagctgagacccggccagacctgaagaatatttcattccgagtgtgttcgggagaagccactcccgatgacatgtcttgtgactatgacaacatggctgtgaacccatcagaaagtgggtttgtgactctggtgagcgtggagagtggatttgtgaccaatgacatttatgagttctccccagaccaaatggggaggagtaaggagtctggatgggtggaaaatgaaatatatggttattaggacatataaaaaactgaaactgacaacaatggaaaagaaatgataagcaaaatcctcttattttctataaggaaaatacacagaaggtctatgaacaagcttagatcaggtcctgtggatgagcatgtggtccccacgacctcctgttggacccccacgttttggctgtatcctttatcccagccagtcatccagctcgaccttatgagaaggtaccttgcccaggtctggcacatagtagagtctcaataaatgtcacttggttggttgtatctaactttgaagggacagagctttacctggcagtgataaagatgggctgtggagcttggaaaaccacctctgttttccgtgctctaaacaaaagcacatattatcatacagacagaaaatccagaatcttttcaaagcccacatatggtagcaaaggctggcctgtgcatcggcaattctcatatctgtttttttcaaagaataaaatcaaataaagagcagg

SEQ ID NO: 92255 - DNA, 897 bp, Homo Sapiens
cttacagatcccaaaccccaccataccaactgtggtgaccacaagggaggaggagaagggggatggctggggattaggatgtaggcccagattcaaggcagcttctctactttctttaaaatgtttttttggcatcttcttcctgtgtttcttctggaagtacaggtgttgtcagctctgtttcctcaccttcagcttctctagaaggaactgctggtttctcatcagaatatttgcaaatgaaattgttcttcatgttgcaccggtcatcattccactggaacatgtaggggcctccgatgccagcgggtgccgatggctgatggtacatgaccacgcagacctcgctgccgcaggacggctcatccacataccagttcctaaattgtgatatgctgccatcagtccaagcataaaggtcctggcaggctgtgctattgctttgtttctcctcacgcctcctgagcccaatccagaagtcaccatcagatggcaagaggttttcaatgaacttttctatcagtttctgttcatcttcagactcgatgctgactagctggcctccatccctcctgcaggcttctttggcttcctcaaagttcagtcttcgagaagtatcatggaagtaaatgactttataacaaggcctctgtgtccctccccggcagactggctgcccactcagcaggcgacccgtcgcggcccgcagccccaccagcagcacggccagcagcacggcctgtagcgcggttcccggcctcatggcccgactcgggtgcgccccccgacactcgggcgctacggcggtggagcgggctggcgggcagaggcgtgcgcgacaactacaaccgcggcagcagcctcgtgccgaaatcgccacccaggcctcgctacctt

SEQ ID NO: 92256 - DNA, 976 bp, Homo Sapiens
  misc_feature (193)..(201): n is a, c, g, or t
  misc_feature (506)..(533): n is a, c, g, or t
tacgctagtacgaggcctggtttgaatccggccgaggctgattagaatggtgccattttgcggtacggaagctacacagcaacacgtataggagactctccccgagatcttctagggagtgacccatctatttttgtttgggaagaggaaactccgaaatgggatcgcggaagacttaaagggccaggctgannnnnnnnncctactgcaggtctctgaggctgtggttgctacagggtcaccacgagcttggcttacttgtctcatccttcccttgcctggtatcattttctcagttctcccaaaagccatgtcccggcccttgctcatcaccttcaccccagccactgaccccagcgacctctggaaggatgggcagcagcagccacagcccgagaagccagagtccaccctggatggggctgcagcccgagctttctatgaggccctgattggggatgagagcagcgctcctgactcccagagatctcagactgaacctgccnnnnnnnnnnnnnnnnnnnnnnnnnnnntaatgaaggcaccagcagcagaagcagtggcagaaggagcatcaggaagacatggacaagggagatcccttgaggctgaggataagatgactcaccggatactgagggcagcccaggagggggacctgccagaacttaggagactgctggaaccgcatgaggcaggaggagctggggggaatatcaacgcccgggatgccttctggtggaccccactgatgtgtgctgctcgagcgggccagggggcagctgtgagctatctcctgggcgtgggggctgctgggtggggtctgtgagttgagtggcggtgcggtcaagtcggctgagaactggttcctggagtacccgtgtcgggactgggagaaagggcccggaaacggttctatcctcctgtttggggaagtggccccttcgatttcccggttccggtctcggcttgcggg

SEQ ID NO: 92257 - DNA, 495 bp, Homo Sapiens
cgtacaaaccccaattgaccccttaatttacaagacactaagggctcctcacccaaccccctttcgtaaggagttggcctgggtaaacagatcctcagcatttcaaaggagcctaattaactgataaggtacgaacaccaacaatatatgaagttcccaggaattttctccaagagataacaacataaaaccttgagttcgtgtctggcgtagaccctatatctaattataatgaaagatttagaatcttgcacctggtactgttgctcttcttgtaaccatttgtcttttaagttgtttatcactctgtaaccattttgattcttttgattcttgcatgttttgacttctgtagaattattacatttaagtccccctccccttcctaaacctaagtataaaagttaatcgagccccttcctcgtggccgaaagaattttgagcattagctgtctctttggccgccggcttaataaaggactcttaattcgtctc

SEQ ID NO: 92258 - DNA, 811 bp, Homo Sapiens
  misc_feature (365)..(375): n is a, c, g, or t
  misc_feature (586)..(693): n is a, c, g, or t
ggagactgagttgggcaaaagcttgggtaggacaagaacttccatacaaatttgagatagatctcgcctgtcttaaagctgccatttgctcattctacccactctggctgccgttgtcctgtcctgcttctgcgccagagtgtttaataagcactcccttcctgctgtgttacagaactgtaggggaggccatggaaatgactctaaagatacaaaattttgaagaggtttgtcagacaataggatagatgttaggaggagacacacctcttgtctgagaacctaggccccaggtatcactgcactttaagaaactggaggctgcaacaggagggaaaggcagaatgatatcacagcagtactannnnnnnnnnncagaacatttgttttgatggctgttagtccccctctcttggagcattttggggcactaatcttgttctcttgtgtcccagcttttagacctcttacttccactgctagtagctagcacttactgagcacctgcaatgaggtaaagactcagctaagggttttacaggaagtagattaattgatcccggcaccaaccatatgaagtaggcannnnnnnnnnnnnnnnnnnnnnnnnnnnnnnnnnnnnnnnnnnnnnnnnnnnnnnnnnnnnnnnnnnnnnnnnnnnnnnnnnnnnnnnnnnnnnnnnnnnnnnnnnnntccaccttcaaaatctattctctttaccattatgctcgatggtttgtttgttttataatttatgtatatgtattatcctctcaactagattgtaagcacttggaggtgtgacttacag

SEQ ID NO: 92259 - DNA, 708 bp, Homo Sapiens
atgagacaagaatgtctactatcatcacttctgttcaaccgtgtactggaagtcctagccagtatcacaggcaaaacagaataagaaagataaggattaaaagggaagaaatagaatttccattactcattgccaatataattaataggtagaaaaaatatgaatctatacactggttattatattattttatttcagttaatgagcaaatttatcagagctgcttgacacatgatcaatttaatataattctatgttcaaaaattgtatttctgtattttgccacaaacaattataaaatgaaaataaagatatgatttgcaatgataaaaaaaagtaaacatttaggagtaactagtgaaacaagtttataatttttaaacagaaaactacaaaacaattttgacaaaatttaaagaaaaacctaaataaatggagagatatattatgttttgtagtttcaatatgctttcagttctcaccaatttgagctatatattcaatgcaatcccaatcaaaagtctagcataattttatagaaactgacaatctgattttaaatatgagaataaatgcaaagggccaaaatagccagggcaaagttgaagaagacaaagttgtaaaactcacgttactttacatcaagatttataacaaagttataaagttgcaacaaaggtaccactgcaatggagcacggaaaggatg

SEQ ID NO: 92260 - DNA, 553 bp, Homo Sapiens
tatgcgtgagttgcacgcatgagtgcctctatgggttttgtggctcgtggcttttatgaagggaccagaatgttaggaactctggagttgggaattgctgcaggagaaccgtgttccgcatttcgttcttctagagcagaggttggtaaagcacggcccatgggtcaaatctggtccaccatctgcctctgtcagactttcccgggcataggcagttggtttacatactggctgtggctgctttcacaccaccacagcagcgagtggttgcgacagacgtcgtaaaacccgtaaagcccgagatatctgccactgggctctttacagaaaatgtttgccgacccctgttcggagcaagctttgtctaaaggactttatttcatttagtgacagtgagataatttattgctgcaaagaacttatagccaaatatgttctattttgtctggtgaaacagaatggcaagagctttttagatactttgaggtttgggaacagcaccgttgagggtgagaagttggttttgatggacttattccatgatgatgctgga

SEQ ID NO: 92261 - DNA, 444 bp, Homo Sapiens
  misc_feature (349)..(404): n is a, c, g, or t
cagcgcctggtgccgcgcacgccccgggaagcccaccggccgctgccgctgctggcgcgcgtcaagcagactttctcttgcctcccccggtgtctgtcccgcaagggcggcaagtgaggatgcagtccagccgtggctccccacttccgactggctcccttcgggggctgtctgcgccttccacgccccccaggacgggcccagaggctgggggagccccgcggcggcctgaaccctgcctcccgcgcccgccctgctcgtccgcgtctgcagtcagcgtccccaacctgtgcgtctctgtgtccgggccggcctgctgcagccacctggtgccttagtccttgggctnnnnnnnnnnnnnnnnnnnnnnnnnnnnnnnnnnnnnnnnnnnnnnnnnnnnnnnntttgacgggcctggagggtattaaagagacacagaagaaa

SEQ ID NO: 92262 - DNA, 528 bp, Homo Sapiens
  misc_feature (24)..(24): n is a, c, g, or t
ctcatacagagagaaacaccgagnagattcactgaaaaactgacatgggatcctgaggggccactcttgaagacttatctctgcacctttctgggcactgtgcatacagcaatgatcagcatgattccagtgctcagagagctccaaggattagttgagaccagacaagaatatcaaggaggcatgcagaagttacaatgggaaatcaaaaagaagacaaaggagcgacacctaattcagaacgatgggtttgttggataggagagaaaaggagacgaatgggcaggtatcatcaaagattcctaagaagaagttcctaacttctgtttttgtgccattgactctttggcagtgtggagaaacccagggacccattttcagaacagtgtttttaaatgcataaaatattttggattaaaaggaaactctgagtattgaaatacctaacaaaatattttaaaagcaaatttgtaatacagtaatgtatatgcttctttattaactaattaaagaacaagatatagcaaa

SEQ ID NO: 92263 - DNA, 529 bp, Homo Sapiens
ggtctctgaaaagcccagactctaaaagctacatgtctaagattaaaaatcttagcttttcaaatctcaagctgtgtgatttaggtcaggttaacctctctgtgcttcaatttcttgaaaaaattgtgagaattaaataagtatagaaaaatgcttagaccagaaccaggcatggaataaccactatattaaaatgggtatataccatcatcatcattactgtctgtaatgggatgtaagggcggggtacagttcatcttcaagtgtagggtaacatgggtctgcacagagcagttaaggcaaagaaaagcagatgatgcttactgcatgtgcccagcctgcacccctcactcctctgaaaattctccccagttagtctctgttgggcacgtcatatgaattgtgggagaggggccatcttctaaaaatgcaagaagtaaagacagctgatttacaggaaaagaggatgaagctgatccacaaaccaaaacagagaggaaggcagaaaggaagagaaaaaattgcggcc

SEQ ID NO: 92264 - DNA, 487 bp, Homo Sapiens
  misc_feature (61)..(71): n is a, c, g, or t
gaggcatttggtgagatggaaacaaggatgtgtaaaaatgagacgaccacctctcggattnnnnnnnnnnngtgccagagttctagggttctaagtgatgtccaggaaggaggaggaataatatttatggagcatatattatggaacacattatagctgaggtggtaccagtttaagaagtgagaacttcttcactgactgaaatttgcatatcaatccaaatcattgtgcttatttactatttttgtagacgtcattcttcaaaagtgctgcatcttcaatagtcaaggaggacaaagacatctttcctgcaggtggtgaccatgtggataataggatcatagacaaatggtggttccatctacagcatcaccgaaatgctgttgttactgcttctttctgggatcttcttgcatctttgcttctaaaggggcacaccttttatagaagtacgtccaggaatagaagtgacctgctttttcgcaaa

SEQ ID NO: 92265 - DNA, 927 bp, Homo Sapiens
  misc_feature (285)..(285): n is a, c, g, or t
  misc_feature (406)..(416): n is a, c, g, or t
cagtcgacggtaccggacatatgcccgggaattcggccattacggccgggggttcatgatgacacaggaccttgtctgaacataatgatttcaaaatttgagcttaaaaatgacactctgaaatccagtcagtgtgcctcactagacttttcgatttcaagattttctgcagaaaatgttttgaaaactttgaatacttaaaaatggcaggtgtagtattgcactttgctagttgctcagatacccttttttatttgtatagatattctgagttccttttttttnctacatgttgtacgttgtcgaaagctaaaaggaaacttatccttggatcacggaaggcagaggcattatggtgagatggaaacaaggatgtgtaaaaatgagacgaccacctctcggattnnnnnnnnnnngtgccagagttctagggttctaagtgaagtccaggaaggaggaggaaaaatatttatggagcatatattatggaacacagtgagtatagtacctgccttaaaatgaatactgttggctttttaggaccgatgctttttctttctgtataagtcacactgcgtgcaagaacgtcacttacggagtagcgaccacgccaaaccccgacgcgatacaaaactacacaatcaataaaccctataagaccaacccgccaatctccccccttaccgacgacgcaacaccccgttttattacacgaattattgccgcctataaaaccaagctatgccccatagatagcccgtgcagtgcgacccgggaaggagatcgtaaatcacaatttccacaagcccaccataggccagatggtcaataatcgcaatagtggactgcatccccacccgaccatatctccttaaccacgacattcagctctgaataactcgcgcatatatgtacccgacctatatt

SEQ ID NO: 92266 - DNA, 646 bp, Homo Sapiens
taaaaaatacataagctattttaaaatatatatgattcttttttgaaatagacttaccaagcactttcacaacaatggtatattcctttttaccacagctgttctccagggttaagatatattttcctgcatcatatttgttcacattttcacagcgcaagaaagtgtcaaagtcagttgactttatgtccagtccaatcctgtctcttagattgacatttggtttagaccaagtaatctttggaggtgggcgtccttttactggtacatatagtctcatagtaactccagcacgtaatatgagtgtcttccttaagtccgcatcaagttctccctcaggtggaactgtttaattttgggtgaagaagttaaataaaaatttaatagtcaaatgtatttccagggactggccttgtcactcctaaaatacatttattttctagagctgatttcttgttctttaaaacttccttaatacaatcctcaaaatcatttttctgttctgtactaattgttgatctttccattttccactatgctttaggcttaaccaggttttccccccggaggatctgtacctcctctttcatgagccttatgtactctgaaatgctacatatattaaaaggaaagtagacgattgaaa

SEQ ID NO: 92267 - DNA, 500 bp, Homo Sapiens
aattgagtgttagagtttatggtctctgttatgatacttttcaagacctgggaaatatttgtatcctttagtgaaaaggggaagaatcaattactgaaagccataagcttacagtaacggagccaattaatcctttgtcatctttgttgagtttagttttcttctgttcttagcacgtcagctagtagatctttgatgaactgttgctcctctttaaatgtttcttttattatattgatgatgtgcactcattcagtattcttattttaagctgcagtaatcactgtacatttgattgccatctgtacttcccttgaagcagctttgcttattacagccacacctgcatctgttttgactagcccacataacctacacatttttcatccaaagctatcccattaccttatttatgtccatttattttcatatatagtatctgccaaaatagtagcaaaagttttatcaatgtgtagatttcaatcagaaaaacctaaaca

SEQ ID NO: 92268 - DNA, 754 bp, Homo Sapiens
taggctaggtagcgaggctgggtggtgaatcggcacgagggcgagcgggaacagctcttgaggagtgagactgcaggagatgtgggccgtgccaaagagatggatgagactgttgctgagttcatcaagaggaccatcttgaaaatccccatgaatgaactgacaacaatcctgaaggcctgggattttttgtctgaaaatcaactgcagactgtaaatttccgacagagaaaggaatctgtagttcagcacttgatccatctgtgtgaggaaaagcgtgcaagtatcagtgatgctgccctgttagacatcatttatatgcaatttcatcagcaccagaaagtttgggatgtttttcagatgagtaaaggaccaggtgaagatgttgacctttttgatatgaaacaatttaaaaattcgttcaagaaaattcttcagagagcattaaaaaatgtgacagtcagcttcagagaaactgaggagaatgcagtctggattcgaattgcctggggaacacagtacacaaagccaaaccagtacaaacctacctacgtggtgtactactcccagactccgtacgccttcacgtcctcctccatgctgaggcgcaatacaccgcttctgggtcaggagttagaagctactgggaaaatctacctccgacaagaggagatcattttagatattaccgaaatgaagaaagcttgcaattagtgaacatgaaaggaaaataaaaattcctcacagtcaaaaa

SEQ ID NO: 92269 - DNA, 406 bp, Homo Sapiens
  misc_feature (115)..(240): n is a, c, g, or t
ttcacactgatctgggttaaaacctggcactatatcctaactgtaggactctttgagcatgctacttaatctatatgtttccttgggtgtagggattttaaaaagttacttaggnnnnnnnnnnnnnnnnnnnnnnnnnnnnnnnnnnnnnnnnnnnnnnnnnnnnnnnnnnnnnnnnnnnnnnnnnnnnnnnnnnnnnnnnnnnnnnnnnnnnnnnnnnnnnnnnnnnnnnnnnnnnnnattctggtcccttatctgaaatgcttgggtcagaagtgtttttggatgttggattttttcagactttggaatatttgcatatatttaatatctttgggatcagacccaaatctaaacacagaaatcatttatgtttcctatacaccttatacacatggcctgaaga

SEQ ID NO: 92270 - DNA, 691 bp, Homo Sapiens
  misc_feature (105)..(105): n is a, c, g, or t
  misc_feature (154)..(154): n is a, c, g, or t
gaatcggcacgagaagctcccacacccccagggaaggggctgccccagaatccagtctaatcaccttcgaggcagctcccccgacgctgtaactccagaccaccntgagtgtgcaccctccccttcccaaaaagccccttgacatcctctcagntactccagggcacctgactgctctgaggagagggaagaaggcctgctggggctttccatggccttctgctgtttctcgccaacactacccaggactcttgctacctggttccaactccagacaaccactatgccaggcccggagcctctgaggcatcggccagtccaggccctcatctgaggtaagaatgtacatcagctggcagccccaagcaagtggctgcagggacactgatgccacagctcctgggccggccctcacatctgaaactggttgccgagagccctgagccaaggcaaggatttgccaaaaatgttctgggggcccagcaaatgcaggagccgacctggggctgcacatccctgcccatccccagaaagactgttcctgtcaggatttgtttccctctgctgtggcggtgactgcttctggaccagaacagctccagctcccaggtattttctacaggaccacttgagtgggcagccaagcccaggctcgcagtatcaataaagcagttctctgaggaatgacaaa

SEQ ID NO: 92271 - DNA, 749 bp, Homo Sapiens
  misc_feature (99)..(156): n is a, c, g, or t
aaagaatggacctggttgtccatgaaactctgccactaattagtttccccactccctttctagttcacagctctgaattcttgtggcgtgccagggacnnnnnnnnnnnnnnnnnnnnnnnnnnnnnnnnnnnnnnnnnnnnnnnnnnnnnnnnnntaatgaactgtaatgacaagagtgatgaactttcctgaaggggaagttcaggccactgtgaggctctgacagagggatttcacctgtcctcaggaattagggaaggctttcctggggagtgacatttgaatgtgaagatagaaagataagtagatgttaattaagggaaggaggattttatgtcccccagccacacccatctgtgccatatcaggctttggagagatgagaaaaaccagataggggtagaagcaaagttggaacattgtttttatcattaaaacaaagatgacagaatcaaaaccattcaaattgtgttgccccaaacccctgcgcctggtcctggggtcagccttaagggaaccaggacccagcagtaaggggtatgtggagaagggattgtgaagattttatacagtttaagggaatcaagaagcttgttgggtaaaggagttccttcttggcccccatgcctttgcttatgcctttttgcctctccctagaacacacagtcatattcctccctcttgaaaactctatttgaagcatgggctctggagtcagacgtccacgttgattcctggcgccaccct

SEQ ID NO: 92272 - DNA, 1137 bp, Homo Sapiens
gcggccgccgtggctcctgcgtctcccatcgtgccgtgcgtcccgcgccgcgttcgagttctcggaggggagggggcgttagccccgcgcagccgccggcgtcgccgccatggacctaggacccttgaacatctgtgaagaaatgactattctgcatggaggcttcttgctggccgagcagctgttccaccctaaggcactggcagaattaacaaagtctgactgggaacgtgttggacggcccatcgtggaggccttaagggagatctcctcggctgcagcacactcccagccctttgcctggaagaagaaagccctgatcatcatctgggccaaggttctgcagccgcaccccgtgaccccgtccgacacagagacacggtggcaggaagacctgttcttctcggtgggcaacatgatccccaccatcaaccacaccatcctcttcgagctgctcaaatccctggaagcttctggactctttatccagctcctgatggccctgcccaccaccatctgccatgcagaactagagcgctttctggaacatgtgaccgttgacacttctgccgaagacgtggccttcttcctggacgtctggtgggaggtgatgaagcacaagggtcacccgcaggaccccctgctctcccagtttagtgcaatggcccataagtacctgcctgccttagatgagttacccccatcctccaaagaggcgttaggtcagacccagacgcgtgccccaccatgcccctgttggccatgctgctccgcgggctgacacagatccagagtcggatcctgggcccgggggaggaagtgctgtgcgctgggcaacctgggctgacatgctggactgtgtttggcgcggacagaggacgaaccccaggaggtgtctgcaaccgtgtatctggacaaaactggacaggtgaatctctgtgtggactcggacacccaaaatcctacaacagagggcgcttgcgaaggtgacggaggagacaggaagacggcgacctctggcaatcccggagacattcgtggagagtcggaacacttaaggaagggaaaatagcagcccacaacagggcaacaacgacggggaacagacaagaacaaggaagaacaccagcaaagaac

SEQ ID NO: 92273 - DNA, 401 bp, Homo Sapiens
  misc_feature (111)..(111): n is a, c, g, or t
cagatggcatcggggacacaggggaaacctgacccttagaggaaatggaaaagttggagagacactggagcactgatacgaaataattctcttgctgaaatacacgaaagngagtcccagcagccatattagtatttccacgtcctgtgtcagccccaagtagagagaacttggaatgggaggggaaatggcagccatcaggaaatgaaatgctggcccagagaattctaagcaagtcaatcaccagtccaaaggaaaggccatgtgaggacataaggaggagacagccatctataagccaagaagaaagccctcactagaaaccaactctaatggcaccctgatcttggatttctagcccctggacaatgagaaaataaatgtctgttgtttaaaaaaaa

SEQ ID NO: 92274 - DNA, 537 bp, Homo Sapiens
aaagcctttatcatacagaaaaggtgtacctaaaagaacacatgttctcatatgtttccaaaatacaagaagatcttgcttttatagtcttgtaatattcatactgtgagcctgtgtttttgaataaaaatgctttctaatctccctccttcttactttcccttgatagcaaaaagggtgtatagtgtggttgtggattatatataaatcaattttaattgactataattcatatactgtatatgatcatctgatttgaaaatccagtttaatttgggtagaaatttgaagtatatgttggggttatgttcaaatggtgagattaatgatttaatttatgccctgtgaatatttattaagaaaaggttaatgtatagaatatcaatactaattgtaatacatacctgacttagcctcttcagcatttcagctccaatacctaggccttttaaatagacaatgcaaagtgaaaactgcaaatttcacttaacttgttatttgctttagtttaaaataaataatatctaaaactctgaa

SEQ ID NO: 92275 - DNA, 379 bp, Homo Sapiens
tttttggtatggcatgtcctagggcatgtagggagaaatggatacgtttgtcctcaagggtcccacccagtgctgctgccaaccccatgcacatctttcaggccagagtctgtcctcgcctgcaggtgactcctgggaatagaggctggatccagggctggctttgggcatgcccagccagagaaatgtcacttcattttagactttggatcagaagatattttgatgaatctgttcattttcagtttattgctttaggcaaaaattttgttcatcactgatacatgctattaagtatgagttgtttgggggaaatcttgtggtacagtttattatttagttagaaaaaattatatgctctggaatttattcagatttt

SEQ ID NO: 92276 - DNA, 418 bp, Homo Sapiens
gaaagtttgctttgagcttggttcttctttgaacatgccagcttcaaatcaatgtctgtctgctcataagttcaaccaaaccagggactgccactggctgctaaagggaagaaaaggctccatgaagaattccagcgtacctcctgccctggcagccattctgctgtttctatggaaacattcaccagatagcagcatgctatactgtgcaagtgaagaagaaggcatcttcctttcatcaccacatctagagtgtgaccacttcacagaatgaaagaatgtggtgaacacagttctttattctgacagataaatcgttcaagagaaaggggccagatgccagtgacattttcttggacttcccagcctttagaaccatgatccaaataaacttgtattgtttataaattaaaaaaaa

SEQ ID NO: 92277 - DNA, 628 bp, Homo Sapiens
ttttgggaaaaaatcaaggatttaatacaagggcaaatttcaaacatggcacaaagggctaaagtggctctctctactaaagccttggaagtgcctaattgctaatcaaacttcagctaacaccatcgtgtgtcctatttgggcagtgcatcttttaaagctctaaatttaggtgggaagcggggagggggacataacaaataaaaacattaaaagatggagcttctaaagttctagaactacccagctggaatcaggacataggctgagtctattctgcatgtgccactaacaaccaagaactaagggaagggaagttggcttgggagcagaagaaactgataatttctcatcccctatggggtggaatatcttctcagatggtagctgtagatcttgatgcaatgatcccaacagtccaagaccagcagctgccccttaggagttagggctatgcccaccggacaggtaagtccctctcgaataaggacactatagcccccacccttaggaaaatggagaatttccttgcgactactgtcagccacgatgagatcaccacgagcatccacacacatgccagcaatgcagcggaaatcctcattctccgcgatctaatcgtgaggcc

SEQ ID NO: 92278 - DNA, 544 bp, Homo Sapiens
gggggctgggaagaccttctcttcacactcgaggatgcacacctgcaaagatacgggtgagaggaggggagaaggaacaaggacctctgttaatccagggcgagggaggagatctggcccactgcaccagtgcaagtgcttctgaagcatctaagttatcaagtaacgtggagcagttttacacaggttttaggttcgtagaatttcagaattggaaacaaaccagagaatcatctgacccaggctccatcattttacaaagaaaccagggctcagagaggtgagcgtaacttaccctctggtgtcacagcacgttaacataggaagttaacacaggataaatgcgcccaacacctgcaccttgttacatctttagtcgggtttttggagccaagcacagctcatgactgtcacccataaagaattttattttgttctctcttcaggcttgtgggaggtcacatgggttaaagaaattggggatgtgaaagtatgtagtcaaatctgcaggtttattttaaggtcaccatgtaaagatctaaaa

SEQ ID NO: 92279 - DNA, 406 bp, Homo Sapiens
agtggaggttggattcagaggacatggggatcagtgtgggctgtgctggtcaaggagggcttccagggagaggcaactgagggattcactgcaattgttccttgagaagatgaggatcaggtcgggaattggaaacatctgagggctcaattcaacctggcttctaaaacgaacatggtgaacatagatcaactactgaacttcttttaacctctggcatcctatctgtgaattgtggggaggaaacagggtccacccgctgctgcacaagaggggtgtgtgcagaccgtcaccttgtgtctgctgtagcaggagacccctggccatgcgggactgaacccatgattgcagctgatcttactctgtctcttctctgtgtgagtaaagtgttgttccatctaaaaaa

SEQ ID NO: 92280 - DNA, 559 bp, Homo Sapiens
  misc_feature (431)..(443): n is a, c, g, or t
gagaaaatgtatttaataattattaaaaataaaaacagcaacctgaagatgtatatatagttgcactggtgattcttgaaataaagtctagaactggcagaggatgggacccgtcaatttaaaaagcactgcttctccagaacaccctcagaggggaagcgaggcaaacctggaactagagcacccaaggtgccacagggcactgtacccaagggagacagggaccacccctggggcagggcgttaaaacacaggtgaaggaagcacaccttcaaagcagctgatgactctgaaatcctgagaaacacccctgctctctgaactacacaagggactctgcaacttcttggatgccatacagaggaaccatgggaatgaagctttctgggtggtacagccttcaattagtgcaagcaaagctgcctcttgcnnnnnnnnnnnnnctttcctactagagcaaaccattcagaaaatgagtaccaaaggcattcattatgtaccaaatatggaagaaagtactaatatacattgtgcctctgtggacatcacactatgatca

SEQ ID NO: 92281 - DNA, 262 bp, Homo Sapiens
tcttctccccagcagcttatctctgcgtagccaggtcccatttcccacacacctttttttaaagtgtgttgcactgctctgggtgcaggactgtagcagtgaccagggcagctccagatgaagcttctgctcacaggaaccttttctactgaaacagatgatacctaaactctcagctgtgtgactttaagcaacttgcacaacctctctgtacttcagttgcctccatcttcaaatggggattaaaaagtgttgacatcaa

SEQ ID NO: 92282 - DNA, 443 bp, Homo Sapiens
aaacttcttgtaacagtcatagcggccccctggtgtttggtccttttggcttcatgtacggcctgaccttccctgctgcttccagcaaattgcagaagccacacaatgtcacctgtacatgctccatatgcgtctctaacggatagggagatccacaggggctaggccatcctcagggactggggagaaggccggaagcctgggtcacttcctccttccctccccagctctgttgaaaggagcaattccaggcaaggcggtcagctttgcagccttgaccctctctttcaaggtctatgcacgttccttagcttccagatccaatctacattcttttgaagatttttcaatcctaaagctagcacttccattccagctcatccctcagcttggatccaagaacaggggtatgaaagaaattgctacaactaaaacccccaact

SEQ ID NO: 92283 - DNA, 404 bp, Homo Sapiens
cattcccccagatcacctcaacaagaatgtttactaggttttttcctctccctccaagattcagcaaacactggtttccagcagaggcgtttccaacaatgtatgacagcgacatctgcgtgggcctggaggcgctgcgccacgagggggctttcgtgcagccagacacatttcctactctggagctgattctgtcatgggggcctccagatttgtcaggcgcccttggcgagcgcaggggagcccctctgttcctgcttctagggcatcagtgaacatctcttttggccagagggacactgcggggtgctggggtgccacggtgaccaaggcagaccccatcacaccctcaccgagctcctggtttggacaacaaaatgcagagacaaattaatctataaaaa

SEQ ID NO: 92284 - DNA, 512 bp, Homo Sapiens
  misc_feature (168)..(169): n is a, c, g, or t
cagaaggaaaaaagccgccctggcccccgcgcaagcgttaagcttgaaaaacaagggcccgattcaatggatgggagccccctacgccccacatgtttgagatgtcaagctggcgagagcacctttgccaacaacaaagtcctcaagtgcccactgccggacaatcannccaccacaacaaccccggcggcgggtacatgctcagcaagtcgctctaccctgaccgggtcacgcaaaaccctttcatccccacttttggggacgaccagtgcttgctccatggcagcaaatcctacttcttcaggcagcccacggtggcgggggcgtcgaaagccaggccggacttccgggcccttgtcaccaacaagccggtggtctcggcccttcatggggccgtgccagcccgtttccagaaggacatctgtatagggaaccagtccaacccctgtgtgcctaacaacaaaaaccccagggctttcaatggctccagcaatgggcatgtttatgagaaa

SEQ ID NO: 92285 - DNA, 598 bp, Homo Sapiens
ctgatctctttgaatctggtaaggatctagccttgtcttatttataccagcaagcagtgttgtcacttaatgctctcatttttcatgtaaatgactgacattttcccaagtcttcacaagtgatttctgaagatgttgctgcattgagcagagactatgtcattgtaattgcagaagttttaaaattaaatatgtttaataaaattttagagttctgtttatctggaacacataacacataatggtgtaatgtgtatttaaccataaattagcttcacaaaaagtttgtgtacataaaagtgtttatatccaaagaaattcttatttactgctcagtaatctcttgtgtagaagaaaatatgtaacatagtttgctgagtctttgataataaccctcatgtaaaataaagccgtaaagataaaatgagagttgatactcgatgaaactgatgtgagtgaatagaaactatgaaactgtgtctatgggagagaggaggacatggggctgctgttgtgaagaaggaatttgtacaagttagtccattttctgtaacttttatattctaataaaggaaaaccatattcttcatatttataa

SEQ ID NO: 92286 - DNA, 326 bp, Homo Sapiens
tacgggccttgggctaaccctccccccatcacacaactcaacagcaacgcccaagccacaacttctctggacctcaggttccctacctgcaaaacagtggcaacaggggtctggagtttcccggtcctctgggatcccgagtgggccagatgtctcggacggcaacacactcacccagcctagagtgccttccacccagggccagtcctaatggcctgggtgaagaaaagagactcctggggcctgggtcccacccgagccaccccctagcccaggccacacctccacccgcccaggccgccaataaaacaggccgggcagaaccc

SEQ ID NO: 92287 - DNA, 473 bp, Homo Sapiens
tttacttgtatgtgaaaacaatacccgaaggtaataggaaaagtctgaattaagtgtttttaattcagtcagtgaattcagaataagtacattcatgtataacatagggacagttctgctgctgttatttatatgcaattcttctggtaaatagcaatagaataaaacatatttcaatgtttgtgtataggttttatattattattccactaggaatggcataagaatttatagataaattcttgtaacattaaaggattaaaatgtttttacattgtttttgggtgtctccttcttgtgcccatatctgataagctttatggattattgcatttaattccttttatttggagggttttacttccttgttaacatataaagttataaatgaaggacaaggaggagatggaaaatgtgtatttattgttaattcttaaaatagtgtgtaaataaaataacatcagtgtgcttta

SEQ ID NO: 92288 - DNA, 460 bp, Homo Sapiens
aaactgggtgaggttctgccgtccaggggttttgtcctgagaacttggcttttagaacattctctatggttttttgcttgggggtgggggtctggtgcagggtgctgggtctgtgtttggaggaggccagcccgtaggccgggggcctgagacactgtgcactggcgtgatgcgtctgccgcccatcaccagcttgcaggggcatccacggctgaatcctctgctcttccaggaaagacttatgcttctcatggtcctagttctcatgctgatctttctacttggcaaaattcaccaagggtgacttgggtttttggtggcaactctgggaacatttggcttgaaaaattgttcatttaagagattctttagagaagaaaatgagtaagattccctaggcctaaatgcagaggcctccaaatgaatttctgaataaaaaagtatttcgctaagaaaaaaa

SEQ ID NO: 92289 - DNA, 889 bp, Homo Sapiens
caacaagggaaatcattgtgagtggtttgggttcccggggaaaggagccaatttatgaaattaaataaagtccacaaagggagtgagaaattcgggctcaggcaccccaccccggctgggcccagcactgctggagcacagcgcaccaggcacccccactgtctcacccctctcaagagggggcttaaataggccaggccccagcctggaggccgggggtcccggggcctagggcggacagaagtcggagaagtaggggtgctgcagggcctcttctgctgagatacgctggacagggttacacttcagaaggttctgcagcagatccctccctgtggcattgagtttgggcacgacgttcaccagggatgttgtggccgggtacatcggatagggcttatagtctggcagcttggtcatagagggccactgctcctcggtgggcgtccccagcagtcggaagatcctcttcaactggtcatcgacatcattgccgggaaaaagaggccgcccagcattggccagctctgcaaagatgcagccggctgaccacatgtcgatggacgtggagtacagcttggccccaaagaggacatccggtgggcggtaccacagtgtgaccacctggaggagaccccccccgaaagggacctcagctgagtaacagcggacgggaatcccaaaggctcgagccaggccaaaatcagccaatttcagctccccattctttacaatctcaggatcgaggtcaccattgcaactgtcaaaatacttcttcaggtcctggtcacagaattcaaaaaccaaagtcagcttcttgtcgctgtgcaggacgtcatgaagcctgacgatgttcttgtgcttcagctccttgagtaggcagatctcc

SEQ ID NO: 92290 - DNA, 936 bp, Homo Sapiens
  misc_feature (63)..(63): n is a, c, g, or t
cagaagtcggagaagtaggggtgctgcaggccctcttctgctgagatacgctggacagggtancacttcagaaggttctgcagcagatccctccctgtggcattgagtttgggcacgacgttcaccagggatgttgtggccgggtacatcggatagggcttatagtctggccagcttggtcatagaggggccactgctcctcggggggcgtccccagcagtcggaagatcctcttcaactggtcatcgacatcattgccgggaaaaagaggccgcccagcattggccagctctgcaaagatgcagccggctgaccacatgtcgatggacgtggagtacagcttggccccaaagaggacatccggtgggcggtaccacagtgtgaccacctcagctgagtaacagcggacgggaatcccaaaggctcgagccaggccaaaatcagccaatttcagctccccattcctgtttattagcaggttctggggcttcaggtccctgtgtagcacattgcggctatgacagaatcccagcccttttagtagctggaagaggaatgactttacaatctcaggatcgaggtcaccattgcaactgtcaaaatacttcttcaggtcctggtcacagaattcaaaaaccaaagtcagcttcttgtcgctgtgcaggacgtcatgaagcctgacgatgttcttgtgcttcagctccttgagtaggcagatctcccggagggcggaactcggcacaccctcatcatcgtcatccagcctcacccgtttcagagccacgatctcatgagtctcccggtttttggccttgaacacagttccgtaggtgccttccccaatcttttccagtttctcgtatttctgcatcgcggcggccgcggggacccctgcgggccctcggttttaagactctggccccggcgttgcagagg

SEQ ID NO: 92291 - DNA, 1019 bp, Homo Sapiens
accccctggctgccaccactgccatgtcacagctgctttctctggctggagtgtaggctgtaccccatttccttggctcccattaaaaatcaacaacattctaatgattagggaacaacagaaggggaacagtcataggatatacgagcagtataaagatacgtttgcaatcagtgactactcagggtgacacccttgccctaaagcaggagtcccccctacctggggtccatggactccctgaaattgtatgcaaaatgttgtttgtacatgtgtgtctgtatgtctctgtggggaggttttatggcttttgtcagattttcaaggccttaacaaagttaaaggaccactgccctgaggttactgcactgaggccaagttaggatggcatcactctgtggcagctctccctggacttgccctgcctggaacagggtgatttgctggaatggagttaccactgagatgccaaaggttgctgggtctggaagactgttgtggcctctcagttctctttgagtctgactgactgtggccagtccctggactggtagctgctggaggccttcttgtttctccagtccctggaagctgagctctatgtgtatttgatgacattgtcagctcttaccaaacgtcaagacctcttcctgcttgaccactcgcacatggctctaggcttctcctgctgagtcctggtcttggcctgtgaatgtgcctcgttcatccctggtgcttgagcccctcaagctccagtcaatgatccagtccttcccctttgaagttttctgctctactttccttggcagcagcctgtgaactactcaaaagagtccccttgggtttggaattatcagtggctttgccactagtaaatgtgtgatcttcggcaagtaacctaacctagggacatcagtttactcatctgcgaagtggggataataaaacctacctcagggttgcttcaaggattaaatgagaaaatatgtcaacaataaagacctgtctgtaccaaaaaa

SEQ ID NO: 92292 - DNA, 723 bp, Homo Sapiens
  misc_feature (569)..(626): n is a, c, g, or t
gcggccgctcctgctgctgctactgccgccgccgcagcggctgctcgggctgagcacgccccggaacaggccgccgcgcgctgcgcgccggacccgctgcccctgccggcccggccgggtcgggcggcccagggcggcaccttcctacttctgcccagccacagccctcccctcacagttgagcacctgtttgcctgaagttaatttccagaagcaggagtccccagagccaggcagggggatgaaccgcgagggagctcccgggaagagtccggaggagatgtacattcagcagaaggtccgagtgctgctcatgctgcggaagatgggatcaaacctgacagccagcgaggaggagttcctgcgcacctatgcaggggtggtcaacagccagctcagccagctgcctccgcactccatcgaccagggtgcagaggacgtggtgatggcgttttccaggtcggagacggaagaccggaggcagtagctgcaaagcccttggaacaccctggatgctgttgagggccaagagatctgtgtggctcctgggccggctgagtggcagcagnnnnnnnnnnnnnnnnnnnnnnnnnnnnnnnnnnnnnnnnnnnnnnnnnnnnnnnnnncacagctactcagtggggctggcatcaagggagacaccagtggtgcgtttataattggcttaaagggatggacttgtgattggctgcaggaagaaac

SEQ ID NO: 92293 - DNA, 430 bp, Homo Sapiens
tgctcaatatttctttttgctcatagccaacaaaccagttatattatcattttgtgaagtattgctatcaaaaggtatgtttctcttgcactttccctgcctagactggacactgtgaagttgctgtggctgcatttctcaggtctggctgttccgctctcacttggtccagggagtgggggggattttccaaataaacagcacaatggattcaacagcagcagtaaatgttaggaggaatatgtaggtgacagaagctctcgtcgcacctgacttctcaatgaaaccagtgatgaacccttccagtacaaaaactaagtgaactacacctccagctgttgagccctcctagttctcaccccactccagctcttcccctctctcagttgtcccaattgtaactcaaaagatggaatatcaaagtcttaaa

SEQ ID NO: 92294 - DNA, 410 bp, Homo Sapiens
ctgcaggtcagtaaaaggatttaagttgcactgacaaaaataccaaaataaaagtgtatttttaagttcccatttgaaattgctggcgctgctggccggatgcatttttgagtttgtattagttgataaattaacagtaataacaagattgtatgaaccgcatggtgcttgcagttttaaatattgtggatatttgtcctgcatcagaaacgagctttggtttttacagattcaactgtgttgaaatcaaacctgccgcaacagaaattgtttttatttcatgtaaaataagggatcaatttcaaaccctgcttatgatatgaaaatattaaaacctagtctattgtagttttattcagactggtttctgttttttggttattaaaatggtttcctattttgcttattaa

SEQ ID NO: 92295 - DNA, 924 bp, Homo Sapiens
  misc_feature (83)..(117): n is a, c, g, or t
aaaaacttggtatactatagggcgctagtgcgtatatcgaacgaccgagcgcagcgagtcaggtgatgcgaggaagcggccgnnnnnnnnnnnnnnnnnnnnnnnnnnnnnnnnnnncagtcgacggtaccggacatatgcccgggaattcggccattacggccgggggggaccgcgccaggcggaagcccggctccgggccagcatccgagagcccggactggagatttctgagagagcagacaccatcttatttctgttgaattgtatttagtaactcaaaaggcatataccaagctgtcagaagcagcttcatttaaaagaaataaaatttctagtcctgcctgaagtttaagctagcccatgactacacaagtgcaactgtatttcccaggtagatgccggtagattgggcccagtaagtttgggccgttgggatgtgaaaggaagagatgcgggcaactttttgggtcatcttcttaaagaaaaagccatttgtcctggatgccctcttttcttttttctctttggctgggaaatgacaagaattaaagcagcagccttggatccagagatggacgccaattgatgaagacagcagaactgactggctagtctgggttccctggagcagagctgtctctccaccctaggttatccacttacttttgtactgttatgtgagagagaaataaacttctagtcttctctaagaaagacggaaatgcagctgcgagaacgcatgaaaaacagccttttgtggcgcccgccctaggggcccgtggagagagtttgttagaccccaactttgttgtgtaggcacacggggccccacacagtggggagagggcagaaagtggggaacggacgtgttcccacaagagatccggtgacaagagacagcggcgggagatctaccgaaag

SEQ ID NO: 92296 - DNA, 552 bp, Homo Sapiens; identical to SEQ ID NO: 7022

SEQ ID NO: 92297 - DNA, 503 bp, Homo Sapiens
tttacaagtaatgggccaaaatggcaggaaattactgcttctgaaagcagactgagtttgggaataatgtcctctatgacaacaccagcacaccttcatgtagatacggctgatgacagttcttgggaacaaaatgacgatggacaaattgtgaataatggcggtcctccactgctgtcaatgatttcacaggtcagatgcacattaaactaactgtaatcagaaaatgcaatgaagccgtgccgtgatgactcatggggtgggggagttacagcctcggctctctggcaggctcatggggtgagtgcaggttgcacgcctttggccgtaactgcatggaattacagccagcacagatgatacggattttcatagacagaacttccatgcttcttcccaggaaaacagcaaaacatcacttgttgacaatagtttagtctgcaggtagctatcttgccctttctgattcttggtgctggttaacattaagacaaagaaaacag

SEQ ID NO: 92298 - DNA, 461 bp, Homo Sapiens
caacagagttagaatcatccccttaggggtgatggggaagcaggcatattcttcttcagggctggaaaaatgtccttctgagctagacttcttcaggccaactgagactaatctatcagattaaacttactaaacattccaacaaaatcaaacctactatacttcccatgcctatacatacagggaaatataaaatgcctcccccagggacaatgcctaattcattccatactaagcacccaaatccaggtcttatcattttgttcttcaagcaaaaagaaaacaaatgcaaagctggagctccccatagtctgcatggagacataagaggaaaactggggccaggcacagtggctgacacctgcaataccagcacttggagaggttgagatggtagaattgcttgagccaaggagtttgaaaccagcctgagcagcacggcaagaccccatctaaacaaa

SEQ ID NO: 92299 - DNA, 827 bp, Homo Sapiens
acgagccaccaggcccagcctgagtggtattttctttagggaccaggtagactttaaaacgagggtaagagaaaagccagtgtctttctgaggtaaataatttctgccaggaaacttcccagccccaccagcagccaccctaaaaaaaatcactcgtgtccccagggacttctaaagcttggggctccaggaaatcatccagtagagttggagattcagagatttcttgaagccagggacatgctcctaactcctttcccattaaaggtgttagaatagaccagagggtgtcccttttccacagtaatgggatcggctggtgtgccttcagggaggaagagggaggtggtcaagcttgaaaaactggctttaggatggttctgactttgttctccctccccaagtgttctcaacctccattctgcagtgttcagagttttagggaaagggtttgggtgccccagcatccaggtgttgtgtggcttagcgcatgtgaagtgaaaaccttctggggttgtttggaagcagctttctggttcttgtgattgtatcctgaggtcccagaaccctattctcccacgaggatcctcagtgaccatggtggccacacgcctggccagcctgctggctcctgggtgagctgaagaaccttgcctgtggcacttttcgagggtgagctggaaccgagagaacatggtccccgtgctgggactcatgcgggtcatttcctgccggcctggtttcgcctggtcgtgtctttatgagcaccatgtaagcctccttgtattgagataattgggcattaaacattaaactgcagctctggg

SEQ ID NO: 92300 - DNA, 387 bp, Homo Sapiens
gatgggggtgagggggtcatctgcctgacccacagacagtggatggaggtggccaccttctcctaggatctccggatgggcgcacctgctgctcagggcagggttgctgagcaagaccacctccctaggccttgcctggcatgggtgccactctctctggcatccacctgtctggggctagtctctggccctcactgctcacggccgggtgaccactctggcctgcgtactcctcactcagaaacaagaacagcgacagcccttctcgagcagatgacacgagctagtccacgttgacagcttaagacagtgctagctctgccctggctctcctagaaggtggaggacagacacaggagaaataaaaaaagatgatgctgcaggaaa

SEQ ID NO: 92301 - DNA, 227 bp, Homo Sapiens
tttcaatttgtgaatctatgattttttgaaagtaaaaatattttttaaagttctaataaggaatcaggaggtaagacctccataaaaagctttattattgaatgatacctgatctcacaaaaaacaaacaactaagcagaaaatattcttgaactaacccagaccctttcttcccatttgatgacctagtattgctggtaactcaacataaaattacatccctaggg

SEQ ID NO: 92302 - DNA, 367 bp, Homo Sapiens
  misc_feature (143)..(143): n is a, c, g, or t
caaggacatccaaagtggggaagcagatgtgattctcgagtgcctgggcttcaaatgggagctccatcagccccagctttttcagtctgagaccttggccaagctctacctgaaagtccctggcgcagggcaccacatcaccnccctgagggagctggaggagcttctgcgagctcaatcacctaagaagaccaaagaaaaatcccctgcaaagaggatcatcatttccttgaagatcaatgacccactggtcactaaagtcggtatgtatatacccgtctatattctgagaatgccattgaacaaatggtcctcccagatttaaaaatgcacaagcaacaacaaagcaaaacaaaccaacagtaaa

SEQ ID NO: 92303 - DNA, 575 bp, Homo Sapiens
  misc_feature (200)..(212): n is a, c, g, or t
ggctacaaaaaagcactgtgcatagtagccctgtttccccatggtgttggactgtggtaaagtatgttgtgacatactggaattctaataatcctgttgtaagtatgtacagaatctatgtaacttattgttgacatacagaggtttgggaagtagtctaatggacattccttacaatagaatggctgggaagggaaagnnnnnnnnnnnnnctacctaactccaatcttaatgttgtagttttatagcaaacaaaaattgtcagctttttgtattgaaaggtcagtggtggtaagacaaggtgtcttgtaaattaagattttaagaagtgcattaaaatgttttagaattactctgggaattctgtatatcacactaaaatttttatatcattatgttaataaaagttattgactttgtaattctgcattttgaaatgtgtgaaaagggtctttaaattaccccgaataggttgtatcttattttgctttttttctgactataaaagcagttatgcttatagcataaaatctagaaagcacattaaagtataaagaaaattaaaatttcttata

SEQ ID NO: 92304 - DNA, 374 bp, Homo Sapiens
tttgacttttataaaaaggtaaggaacttttattggcaaaatcaatcaagaaagatggtaaaaatgtagatttaataagaaaaaatgtgacagtattctatccaatactaaaatgggagttacatattttaactataagtatttgcctataagcccattcaagggcttacagtgctcatggaagtgatcacccttctttcttcatttctacctgaatagtagagcattagagtcattctttctctaccagaccatgtgaattgacatttcctgttttagattgtactgaaactaaaagaaacaactgtacaaccaaagatcaaggtataacccttaaccaaaattatatctctggacattttataaaaccatgg

SEQ ID NO: 92305 - DNA, 469 bp, Homo Sapiens
tttaaatacatcaaatgggataataactgttctacttaacaggattttgtgaggctccaacatgacaatgtgagcgaattggctttgaaaagcatttccaaggtgtataaacacaagggtttctatatagggcaaagtccccctggctcagtggttctatgaagctgtgtgcacagcccatgatcccctgtggaattgaggattgtggaattaattgcctttggaagctcaatttgctgtgtgagcacacagtcaagaggaatgggggagcctggcctttgccttttacggcagtctgggaacttgaaatactcaaacccatcattctcaaaaagctttttataagagtccttcagaagcttacgtctctgcagctccacatatcacaggtatgccactagacggagcttgttaaatcatgagcaaatgcaggggctaattgaatgcttctgacacttgttaccatctg

SEQ ID NO: 92306 - DNA, 500 bp, Homo Sapiens
tttcaaggtgcaggtaagtgggtagatatcgtgggagctggtacagtttctcttttgattggatctttttctcaatggatcaggaaaaagggccatgagccaaggaggtgtgaagagagaggaagaataacagaccttttgaggtggattttcctgaactggaaatgaaagatgatggcaggactgtgttttttcctttggtcacattttgtggcttagggcagagcaaagagtttagatttaatgagggttttggtttaggcacagataggtaagaaaaggaatggggaaaaacttagtgaaggtatctgcatgggagtgattatgacgattgaccgtggaatttagttaagtagtgaagtgaggacacagggtgtgggggtccaggccagggaaaggatatgagactaatggactgtaggtgcagtgagttagattttcaaaggacttttggagttttgtgaccagacaaagtgagctggaatatgagaagtggtgtt

SEQ ID NO: 92307 - DNA, 552 bp, Homo Sapiens
aaataatcatgaaagtcagggaggagcttttcccagagtaactgacagtatcaaatagcaagagagttaggatgaggactgaacagaagacatcagatttgaaaattagaaaatcagtgctgctataggaagaatagtccccaaagatacccaggtcctaattcctggaacctgtcacttatatgcataaaggactttgcagatttaagttaaggatcttgagatgggaaaattatattgcattatctaagcaggtcctaatgtaatcacaggtgtctctataagagggagtcagaaggagatttgactagggaaaagagagtaggaaattcgacaatggaagcaaaaggttggagtgatacaagaaagcagccatgagccaaggaatgtgaatggcctccagaagctaagaaaagaaaaagaaaacagattatcccctatagcctcccgaaggagcaagccctgctgacacgtttactttagttctgtgaaactgatttctgacttctggcctatagaactatgagagaataaatttgtgttgttttaaaa

SEQ ID NO: 92308 - DNA, 508 bp, Homo Sapiens
gttagagggcaacatccacatcatcactacactcaaatgaaataacggaagtgaaaactcatcaattatggagctggcactgattggaagaaattgccatgattccagtactttagcttggaaagtgagtgtatctgtgttcagtgtggggacgggaaaggcatttgaaagtgtttcattaatgtataatttcataaatattcatctttgataccttcaaacaatataattaatttgtgtaaagcacaattagaacacatatatatttggccaggcgaagctctgcccccactattttcttacaatactacgtcacctccaagggtaggggaggcttctatagcccctctcctataaaaagtgtgatgcagtgtatatgacccaagggatagagtgatttcagcaaaactatcctttaataaagcaacaacacaaaatttccccagaagcctccaccccaggccttgctctgacctggctcagaagcaggggtcagagccaggcttta

SEQ ID NO: 92309 - DNA, 846 bp, Homo Sapiens
  misc_feature (32)..(32): n is a, c, g, or t
  misc_feature (105)..(105): n is a, c, g, or t
ccaggctgttcaatgtgccctccaagtctttncagccagcccactcagtaaatcaagagccactatcataaaatctttatctggagcttcatatgatctgggtgnagcattgtttagcatggcttgtgcaagagtcttctgtactaggtttacacaacgctgatacacaggttcacagtacggaaggaatccagactgcagtgctgtgccaactgaagataggcactcaagtaaagggaagagatctttatcttcatcctttaacatgttccatttctggatcagtggaggcattagcatctgaatatattctggtttgtttaaatgatgtcctactgaatctgctaatgttcctatggcatcgtaaagaatgagcaggttcttatgctgggtatttactaaatgcaaagaccagggtatcaagtatataagcaaggtaaggaacaagttctgtacaagcctcctcttctagggtagcaaaggcactgcaggcagcttcttgtactctcttgttgctatccaggatgcgctttagcaattctgtcattaatggcttcaggtacgtgtctggcggctggctgaccacccagtgtgcatagcggctaagagtccagcatgttatggaacgcacaagagcctttttatcagagaggcactgaataaggtgaggaataagctcgtcaggtttccactcatactccatcttggtttgctgcctgaggtgccccgaaggaagtcacggacagtgaaacccggcggaactgctcctggcagcccggccgccaacgtctgctgctgctgccgccgcggccgccgagcgcaaggagccgaccagactgagtcccc

SEQ ID NO: 92310 - DNA, 387 bp, Homo Sapiens
  misc_feature (282)..(294): n is a, c, g, or t
gagctgttacacaatgtatacaataaccaacagaggcattcggagaggcctggagctctgtttatttaacactctagagggatttttgtgcttattcggtcctggctgcccggctttcaatattgctttgacaaccattctgcccttctcattaattttaaacagttaaaacacaagaaaaagaggaaaaagttttcataattaaagtgctttactttttaataacagaggattctgtccgccaggggaaagggcatcctcgctaatttcacattcatattnnnnnnnnnnnnncacacagggaaggtgacagttgcgctgctgaggtggcttaacgaaaggagggcagcaaaaaaaagtttgcatttcacatcagttaagagggta

SEQ ID NO: 92311 - DNA, 473 bp, Homo Sapiens
ttactccgttgcccacactgcctagcaatccttgaaccaggatgccttcaaagcattccttgggagattccagaaccattccacctcgttaccctcccccaagaaggggatgttttatataaagaaaaaaaacaatttttgtgttgcccatcctccctacctcaatgacttcctagagggcaacagaatggccaggtgagagctgctgtggggttagaactggaaagaatcagatctaatttaacatccttgttttcagatcatggaacccgaggtccagagaggtcaaggggcagctacttgatcccccacttagtctgtgtttccaccacaccacattgggacatagcccatgagcctgtccacagggaaccccagtcagagcttcatccccagtcagggacaaagacttggaacattccggtcctggccccctctacagctaataaaaacctttgggcaactcctttaaa

SEQ ID NO: 92312 - DNA, 541 bp, Homo Sapiens
gactacacagcttggggcccgaggatgaaggcgtgtaccactgtgcccccagcgcctgggtgcagcatgccgactacagctggtaccaggcgggcagtgcccgctcagggcctgttacagtctacccctacatgcatgccctggacaccctatttgtgcctctgctggtgggtacaggggtggccctagtcactggtgccactgtccttggtaccatcacttgctgcttcatgaagaggcttcgaaaacggtgatcccttactccccaggtcttgcaggtgtcgactgtcttccggcccagctccaagccctcctctggttgcctggacaccctctccctctgtccactcttcctttaatttatttgacctcccactacccagaatgggagacgtgcctccccttccccactccttccctcccaagcccctccctctggccttctgttcttgatctcttagggatcctatagggaggccatttcctgtcctggaattagtttttctaaaatgtgaataaacttgttttataaaaagcaaaa

SEQ ID NO: 92313 - DNA, 614 bp, Homo Sapiens
ccgtatttcatcaaatatgagctgccactgcaggtgaggagcatcctgattccagagacattaaaatggaaaggaggtgtgtttctccagtttgataaaaagagaaagtggcctggactccttttgactcccacatccaactaacacctccttcagctttctgcacagccatgtaattatcttcccagctatcctagccctctccctctccctccaggttggcatcggctcctagttctctaaacagaaggatgtcctgcctcaggccttcgtacatgctgttccttccatctgcacaccattcctgagccccacatgactccctctctcccattgtcctggtctctgttcaaatgtcacctaagggccaccgagctgcacaacctctggagtgccgtgcccatcacccttcaccccctgcctcagctggacccattcctcacaagccagaggaattttactctaatggtggaatttcaggccaagtagaaaatatattttgtgtgtacgaagaaaggggaaaaagaacccttctctgagacctcaagttattatttaattgattaatttttagtcattgattaaattattaaataacaaatgaaatcaaaaaa

SEQ ID NO: 92314 - DNA, 395 bp, Homo Sapiens
tttcatcttctatctagaccaactaaactttcttcataacagcagcaagattgtttagctttttatcattcatgtgttcactggagcagtactttaaatttctttccagaacacttcgtttgcattcacaacttggctaagtgtttgttgcatgaaggctagctactggcctgtcttgcttacagcatgccctcctcactaaacttaattatttcttccttttgggttaaagtgacagacatgcaactcttctttcatgaacatatagaggctattgtagggttattaattggccacattttaatattaataaaaagaagcctgagaaaaagagaaagagaaatggcccgttggttgggcagtcagaacaaacgcatttgtcaattgtttgctgt

SEQ ID NO: 92315 - DNA, 1506 bp, Homo Sapiens
ggcctgggtggcgaattccgcacgaggtcctgccccaccaccgctgctcctcagcaggcgcctcaccagcctccacaccccttgcgcccgcagaaacgcgcctggccctgagctgtcaccaccgacactctccaggctccggacacgatgcaggccatcaagtgtgtggtggtgggagatggggccgtgggcaagacctgccttctcatcagctacaccaccaacgcctttcccggagagtacatccccaccgtgtttgacaactattcagccaatgtgatggtggacagcaagccagtgaacctggggctgtgggacactgctgggcaggaggactacgaccgtctccggccgctctcctatccacagacggacgtcttcctcatctgcttctccctcgtcagcccagcctcttatgagaacgtccgcgccaagtggttcccagaagtgcggcaccactgccccagcacacccatcatcctggtgggcaccaagctggacctgcgggacgacaaggacaccatcgagaaactgaaggagaagaagctggctcccatcacctacccgcagggcctggcactggccaaggagattgactcggtgaaatacctggagtgctcagctctcacccagagaggcctgaaaaccgtgttcgacgaggccatccgggccgtgctgtgccctcagcccacgcggcagcagaagcgcgcctgcagcctcctctaggggttgcaccccagcgctcccacctagatgggtctgatcctccaggatccccacccaaagcctgatggcaccccggctggccatgctgtcccctccctgtggcgtttcttagcagatggctgcagagcttcgttgatggtcttttctgtactggaggcctcctgaggccaggaacgtgcaaatttgcaggtgctgcatcccaagcccctcatgctcctgccttcctgagggccagaggggagccccaggacccattaagccacccccgtgttcctgccgtcagtgccaactgccgcatgtggaagcatctacccgttcactccagtcccaccccacgcctgactcccctctggaaactgcaggccagatggttgctgccacaacttgtgtaccttcagggatggggctcttactccctcctgaggccagctgctctaatatcgatggtcctgcttgccagagagttcctctacccagcaaaaatgagtgtctcagaagtgtgctcctctggcctcagttctcctcttttggaacaacataaaacaaatttaattttctacgcctctggggatatctgctcagccaatggaaaatctgggttcaaccagcccctgccatttcttaagactttctgctccactcacaggatcctgagctgcacttacctgtgagagtcttcaaacttttaaaccttgccagtcaggacttttgctattgcaaatagaaaacccaactcaacctgcttaagcagaaaataaatttattgattcaagtttggag

SEQ ID NO: 92316 - DNA, 407 bp, Homo Sapiens
  misc_feature (197)..(197): n is a, c, g, or t
ggctgtggctcttcacaaggtgtcttctatgctttatttgggagccattgccttgagcgttatttcccagatggttttctaatgtcaccaactgaagaaaagacccatgcacacaggacacagcatgatgtgatgctcacagcgttttccttcctctctgaaaacggactcagcgatttctggcaagcggtacttanctctgagatcacccgtttgctaaggaaaaatcttagtactgagaaaggtgacactttcctccctgcttttgctggagagacactttggttatgagttatttctagcataacacagtttatttcagaagtccagctcaatagcagaccaaggcatgaacaacacatgaaaatttatgttgggaaaatatatattgtatgtctgcttgaaaa

SEQ ID NO: 92317 - DNA, 512 bp, Homo Sapiens
gtattacacctccgttgccctccaagactgacaattatatgtatgcaaaaatgccaggggaaggtttgcaagagaagtgataatggatgataatggaattgatactgtatttaggatcctttgtttgttatcagttttgtttgttaactataaaatattttccattggaaaggggtacctataaatgtcttctgctgctaatatttatctcagcacttttctaaacccaaaagtgctacctaagaagaaatttagccaaaaaatacccagctaaggtagccatagccaagtgtatttaagtatgttatagaatatatttgaaagcttcctttcagtttgagctttgtatctgctgtggaactgttatggttgattgggtagttatttttcattcttataaggttcaaagtaacagctgaggatttagaaaacaagaataccaaatagaatacgaaataataaagataaaccaaaagaataccaaataataaagatttttaagaaatggaaaa

SEQ ID NO: 92318 - DNA, 606 bp, Homo Sapiens
  misc_feature (472)..(480): n is a, c, g, or t
tttgtgggtggggctcgcgggccccccggtgtgagcccggctctgggtctgcggtgccccgggcccagggacccggccccctgggtagaggaggtgctcggcggccccgccagctccccacactcgggagcgacagaattggaagcgcgagcgagggcgggcgcgggactcttctctccagtctcacggaatcccagtggttgtaggtgttggaaactttacttaagatgtttcagctctgcctgtgcctcctcaaaaggaaaggacgagcttagggcgagtgcgggcgagaccgtgacacttcctggctcaggaagttgaatttcattaagcctttgtggtttggggctctgctgtgctttgacagctctgatctcctcccttccggctgggctgtctggggcgctctaaaatgagtgttgatttaatgcactgccttcgcacccgtgctggtgataacttctaatgtgannnnnnnnncggtcattcattacttgtctaccgaccgaggcagtgcctccctcttagggaattatctgtcaaagagcgcattctccttgtttggcaggtagtcccaaagggcggttgtcaccagcgtctcagcgc

SEQ ID NO: 92319 - DNA, 434 bp, Homo Sapiens
tttttaagaaaccctgaatagtttattacaggtatataaagtagaatactattaatatgtaacaggtatttggacagtaaacaataaaaaagtcaattaaactgggtagtgatgtttctaaaattttgtgattctctagatcaaagagtgtagacatttggtattacaaaaagattccaacaaaatacgttgtgtagccagctttttagattcaaaagttatggataatcgtaattcataacaactctaagtattccacattagaactacataaacaaggtctagtcaatcacctgtctgtatggatagtgtattcaggttttacatctaacaatacgtgggaagaaaaaaattccaatgggctctattgtttaataaacatactatttacatcacactcagagtctcttattaaccggtccatcacctcgtgc

SEQ ID NO: 92320 - DNA, 417 bp, Homo Sapiens
gcggccgcgggctccgggggctcggctcagtggcagaagtgccgcctgctcctgcgcagggctgtggccgaggaacgcttccgcctggagttcttcgtgccgcccaaagcctccaggcccaaggtcagcatcccactgtcagccatcattgaggtccgcaccaccatgcccctggaaatgccagagaaggataacacattcgtcctcaaggtagagaacggagccgaatacatcttggagaccatcgactctctgcagaagcactcgtgggtagctgacatccagggctgcgtggaccccggtgacagtgaggaagacaccgagctctcctgtacccgaggaggctgtctgcccagccgcgtggcctcctgcagctgtgagctcctgactgatgcagtcgacctgccccgccccccg

SEQ ID NO: 92321 - DNA, 481 bp, Homo Sapiens
agacgcaatccaccaccacgaactcttcatccgatcagcacgagccattcatgtgctgaaacaccaagatctgtggaagaaatcctcagaggagcccgagtcccagtggcacccgactcgctctcctctccctcaccgacgcccctgagtcgaaataatctgctaccacctattggcacagctgaagtggaacatgtgagcactgtggggccacaaagacagatgaaaccccatggcgactctagtcgagctcaaagtgcggtggtggatgaacctaactatcagcagccacaagaaaggctccttttgcccgactttttccccaggcccaacacaactcaatcatttttggtagagtgacgtacttcctagaatggtcttgatagttggggaaagaaaaggtggggggaataatagtttggcagacttaagattttatctagaggcttaacccagaataaaagttgagtttccaacaata

SEQ ID NO: 92322 - DNA, 524 bp, Homo Sapiens
ctattgagggtatatgcatatgtgatttttaattcacataggctattaaaatgtgattaaaactaataaaggtcagaagtcaaatattcatatttcactttagaataaaattttaaagcttctactctgttagttcctctctgtgtctgcagtagctcctcaataaacgatacatgtgaaaatgtgcattaaagtgatctcgactggtagtacccagaaaccactgcagaaaggtaagccaaatgcagcctgggtccaacacacaggtgtgatctctgtcacagctgaagcagagccacgctgcagcaagtgaacgtgaaaggatgacaaaaagccacgaggtccgcttgctccaggaccaaagctgtcccatgtgtgaatcagagggccctccccatgcagttcttggccgtgctggctgccgcagaagccaaagctcgcaggaggtacatacggcaggtgtaaacgtctctgtacgccatgtgctcataatcagggagaattttcacaaaacgtcccgactt

SEQ ID NO: 92323 - DNA, 464 bp, Homo Sapiens
  misc_feature (129)..(129): n is a, c, g, or t
gctggccgcgtgccattctccaatcagcagagttacattgcagccatcagcgctcgttttgtgcagcttcagcacaatgacattgacaaacgggttgaagtaaagccatatgtgctggaatgatcagantgtgtgatgagtgccagggacacacgacatgtggtgggaagtttgccccgttcttctgtgccaacgtcacctgtctgcagtattactgtgaatactgctgggcgagcatacattcccgagccgggcgggagttccacaaaccgctggtgaaggagggaggcgaccgccctcgtcacgtcccgttccgctggagctgagccacgggccgacccagccacaagtactggagtagataacaaggagggaaaagagaggccactgcctcagggcttacagtgttctggaaatctgtgcattcgttctcgatttttaaagaagaattgggtctttttaaa

SEQ ID NO: 92324 - DNA, 476 bp, Homo Sapiens
gcggccgcgagcggggcgggggctgccggtgccctccgcaggccgggcctcctgggcgcccctcggtgctgcaggctggggggccttgggtacctgcagagccttttctctgaattccttatgtccggtgggccagaagcccgtcctcctatgctggtggaaggcggaggaccggagtccctgcagaaggccccgtgcactcgggggcctccctcacatcccgtgccccctgcgctggccttcacagtaggtaatggctccggcccgggtgttcgctgtccacggaacatggcagaggggcaccccggcccggaaagacgccagagccagcaggggctgtttcgggccgcgtggctccccgggtcttcggccgtctcccctcttctgcgtctgttccgtgacttcgcctgggtgggatgtaccgcaggtgcatcgcgtcgaggtggggcacggccgccggcaagaaacccaccctg

SEQ ID NO: 92325 - DNA, 829 bp, Homo Sapiens
cggctaagacactactcctgccaaataccctgcagtagcgcaccgcgctatgtctccctccagggatctgtaccactcccaatcctgtttcgtgctgggattgtagtcttgtaaacctacaactaacacctgggtgcggataagagactacagctcccatcattcccagcaaagggccgttctgcaccgagctctttcaggattccagtgcagttccgccatgcggagggaagcttggctgttcacaaacctctcctgcactcgaggagacagcttggccggggcagctgatctcaccttgtcattgtgacacggtgtctccccaacgtgccgacttcatgacttgtcgtgcccaaagtttactttctcgcagaaccggtagaggccaagagcttctcagagcttccgccgcagggttgccatgattaactcttaagtactccacgcttctgaaacgggcgtaggcacagcgtcagttctgtacagtgcggacgcagcaggacagaatctccctgggcatctttctggagcatcagttttactgcaagattttaagaaacaaatttaattgatttccaagttaagaaattaaaccttgaaaactagactaaaaagtcatctgcacctgacgtaacagactttctgcaggaagaaaactctaaggagagcatattgtccattattataaatagtgaaaatgagaaatcatagcaagtcccttgaaaaccctgccctgccagtcttctaatagggccttggtatggttttatgtgtattttctttttgaagtgtgctcaccttttgaatatacaaatttggggttttgacc

SEQ ID NO: 92326 - DNA, 374 bp, Homo Sapiens
gatgtgagcgtttcctccagaagagctatcggaagctggagaagaacccagagaaggaggaggagcactgggcccggcttcagaggtactccttgtcgctccagagagagaacttcaagaagtgaggctgccaccgccctgggatctctgaaaaggaggtttcagccacgaggcagctgctcccaggacactgaggccaagagaaatgtaacagagccacagctccacaggcctgcactcggagtctggggcctctgcagagccagcaaggggaaaagtataatctgggggaccttcaaccactaagcctcttgtcagagccctcaggcaggcagatgtgtcacccaaataaacagtgatattgtctccagaaa

SEQ ID NO: 92327 - DNA, 1446 bp, Homo Sapiens
gggaagatctgagttcatgtagctggtgttggcttagggtctgggaggaaggcttttgggaagatgtaaataagaacaaaatctgcagccacctgggaagcctggcctcagtgtggaagagaaggcagcaggattattacagaaccttgtgaagccaacgcgggcagccgccaggagctgcagaccgagaggatctcgtcctttcttgcggcccagggagaccaggcctttcattctgggctcgagaccaacaattcgaattccgaactccccctgcgtgtgggactcaaggttgcccagggctcacctctgatgggcgggcaggtgagcgcttccaacagcttctcgaggctgcactgcagaaatgccaacgaggactggatgtcggcactgtgtccccggctctgggatgtgcccctccaccacctctccatcccagggagccacgacacgatgacgtactgcctgaacaagaagtcccccatttcgcacgaggagtcccggctgctgcagctgctgaacaaggccttgccctgcatcacgcgccctgtcgtgctgaaatggtccgtcacccaggcactggacgtcacagagcagctggatgccggggtgcggtacctggatctgcggatagcccacatgctggagggctcggagaagaacctgcactttgtccatatggtgtacacaacggcgctggtggaggacacactcacggaaatctcggagtggctggagcggcatccacgcgaggtggtcatcctggcctgcagaaacttcgaggggctgagcgaggacctgcacgagtacctggtcgcctgtatcaagaacatcttcggggacatgctgtgtcctcgtggggaggtgccgacactgcggcagctgtggtcccggggccaacaggtcatcgtctcctatgaagacgagagctccttgcgccggcaccacgagctgtggccaggagtcccctactggtggggggaaacagggtgaagaccgaggccctcatccgatacctggagaccatgaagagctgcggccgcccaggagggttgttcgtggccggcatcaacctcacggagaacctgcagtacgttctggcgcacccgtccgagtccctggagaagatgacgctgcccaaccttccgcggctgagcgcgtgggtccgagagcagtgcccggggccgggttcacggtgcaccaacatcatcgcgggggacttcatcggcgcagacggcttcgtcagtgacgtcatcgcgctcaatcagaagctgctgtggtgctgacgggacccttctgaagttcgggacgcggcggctgcagtttcacccccgaatttccaagtattgtgactttgtttgggccaaatgttggtgatcataggaccgatgataatacgttttcattttctttaaaatagagatggggtggctgggcgtggtgact

SEQ ID NO: 92328 - DNA, 501 bp, Homo Sapiens
agaattcaaatccagattggtcttaatagtgagctctcatgtgtgatagaaattagataccactttgaggactttgggagccagtggtgaatgtacttactttaggctctaaatactctgtgtaatttcttggtcattttgttcttagagaggtggtgatcttaataaagttttgactttattaagtaattaaaagtttttacttatgttacaactaaaacaattctttaaaactttcataacttgaagttttaaatcctaaaattagttgaaaaagatgtaattgccagtgtatcataaatactggtattttaaaataaagctgctttatcacttttaaggaaagcccttgtaatttagtgcattgtaatagtgtattgagctgatgtccaccatgatccatgtaaacataggtgaactatgcaaatacaagtttttcttcttgaaaatgttacatttcctctacaacactttatgctaataaatgtttatgaacctcaa

SEQ ID NO: 92329 - DNA, 475 bp, Homo Sapiens
acagagaaggtacagaataaaaggaaatgcaaatacaatttttagctaaggaagctatagttcatgtgacttcactccttaagctgaaacaaacccacccaccctcttagacatcagggaactatagaatttgctgctactactgctgctgctgctacaagcctgcaaggggtgtgcaaaagagagtagataagggctccaacagaacccctgccatggtctatggtccttcctgccacgtcctacaggagcccaggagctctggctatgcctgtcaacccggccatgcaggtgactgaaacaacagcctgccatgatgtaagtggtcctggctaaaaggggctggagagagggctttagagaagcatgttgggttcaaaagcctagagtgctgaacaagtcacagcaaacaaataaaaccctaaaacccaggaccaactgaagggggatctatcccccagccaccactccaaaa

SEQ ID NO: 92330 - DNA, 514 bp, Homo Sapiens
tgaatgaccacaaggagatttgattatacatgtgaacacctcagaaggcacagcccacccagaaggcagacaggtcaggctgctttttcttcattgcttggattcaatcctccgggcggctcaggctcaaacataacttaagcatgattaaactttagaagaagctgccaggaagactgtgaaatcttcatgcccaaggatccctaaaattaggagcaacaaccacttggctcagacggtttatggaggcaaaggtttggatgggattagagatttctaaatgtgagttcgtgtcctctgccagaccaccttacttccaccattcctcagcaaatcaagaaaaacaggagaaaagacatgcctttccataagttaaatctattctgttttaattctatattatatctgctgtacaacttcttttgtttgtaacaccatattgttgctagtaactggaaattaattttcacatgcctcagcttagaaaaataaaaagcagccctgcatcaatccc

SEQ ID NO: 92331 - DNA, 158 bp, Homo Sapiens
aagtaaagaaccgcagtcatcgaactggagtcccattgattccctccccctcgcctccccaaatctggcacctgcccaaggtatcctcagaaccatttggggtgtcctttggcattggataatagaaataaaattttacctctttctacaataaaaaa

SEQ ID NO: 92332 - DNA, 978 bp, Homo Sapiens
gtcgcctcttgtgcttttcgcttggtctgggggtgtctcggtgtgttccgccactctctccgtggcctctctcctccggggcgctggtgtccgtcttcggtccgcctcggccgtcccttccaggcctcgggtccgcctttccgtgcgagcagatcactccccagcctcatctcggtgaaaagggcgcaccggccttctggatttcttgcgcgttcaccgcactgcgcccctgggcccgagccccattttttcggtccgcaccttccacaaggcctcccctggtcccgggacctgtaatgcccagaaccctggcgggcagaatcaccttggagaggacgcccagttcttcgtcaccgggaggccccccgcgcattcgccatgtccaaggacaccaaagctcatcggggtggtgcgggaccccgtgaccagggccatctcggactacacgcagacgctgtccaagcggcccgacatccccaccttcgagagcttgacgcttcaaaatacaggacagcgggcctcatcgacacgtcgtggagcgccatccagatcggcatctacgccaagcacctggagcactggctgcgccacttccccatccgccagatgctcttcgtgagcggcgagcggctcatcagcgacccggccggggagctgggccgcgtgcaagacttcctgggcctcaagaggatcatcacggacaagcacttctacttcaacaagaccaagggcttcccctgcctgaagaaggcggagggcagcagccggccccattgcctgggcaagaccaagggcaggacccatcctgagatcgaccgcgaggtggtgcgcaggctgcgcgagttctaccggcctttcaacctcaagttctaccagatgaccgggcacgactttggctgggattgagcagacccgggctatgtaccttacccacgtggcttatctattgacagagattatatgtatgtaaaatgtaaa

SEQ ID NO: 92333 - DNA, 361 bp, Homo Sapiens
cacagcactcaccgaccccaggcgtgactacgtttgaggcaaccatgaaggcttcagacattcaaacttcttaatagaccaggcgtggtcgctcacgcctggagtcccggcgtgctgagattacaggcctttcctcattggccgtcatgccttggatcattaaggacactttggaacggagctttgctattctctgaagatacacaaaatcctccactgctcacgtcataatctatttaccaactgtggaaaattccgcggtgcctgtggtttttaaagtgatgctgaagcgagcacctttgtgcatatgtcttgatccacgcctgattttaaaatttcagataaaatcctagaagtgaaa

SEQ ID NO: 92334 - DNA, 403 bp, Homo Sapiens
ttttttattgaaagaaaggagtctttatttgagaaagcaaagaaattcagtgaaatgattctgagacaatcatagggccatagtatggctattcccctttgtccccaggtataattttaagaccgaataataacatcaaatcagaagacgtcagacaaggaactggagaatgttctgttaaacaagttcatttgtctgataatgtaaatacacagtcattttaaaagctggtttggctctggtaccgtagtttcctctttcctcatatgagcttactcacaagtctcttacttcttggagaatttggaagaagcatactaatccaaatcctcagtcttcactggggcagctgtcttctcgcaaatccaaaaaatttcagcactacagcgagaaatataaatat

SEQ ID NO: 92335 - DNA, 945 bp, Homo Sapiens
gctaggtcgaggctggtgtaaatcggacgagggatgtcgagtgggccctactcaaacgccaccagtgtgaggacatctttggcgtccagctggagggcgccttccccgacaccatgaacaagtgtgccgagctgctgagcagcaccgtgaaggtggactttgtggacatcaacgtcggctgcaccatcgacctcgtgtacaagaagggtgggggctgtgccctcatgaatcgctccaccaagttccagcagatcgtccgtggcatgaaccaggtgctggatgtgccgctgactgtgaagatccgcacaggcgtccaggagcgtgtgaacctggcgcaccgcctgctgcccgagctgcgggactggggcgtggcactcgtcacgctccacggccgctctcgggagcagcgctacaccaagctagccgactggcagtacatcgaggagtgcgtgcaggccgccagccccatgcccctgttcggaaatggggacatcttgtcatttgaggatgccaaccgcgccatgcagactggtgtcaccgggatcatgattgcccgtggcgccctgctcaagccgtggctcttcacggagatcaaggagcagcggcactgggacatctcgtcgtccgagcgcctggacatcctgcgggacttcaccaactacggcctggagcactggggctcggacacgcagggcgtggagaagacccggcgctttctgctcgagtggctgtccttcctgtgccggtacgtgcccgtggggctgctggagcggctcccacagaggatcaacgagcggcgcctactaactgggccggatactggagagctgatggcaagcagaaggagcgatggatcgatagggagagtctgggcaggccccagttcgctttggcgaagaagcagggtaagtactcagttccaggcctggggggagcaacattttt

SEQ ID NO: 92336 - DNA, 455 bp, Homo Sapiens
gcggccgctcgttgatcctctgtgggagccgctccagcagccccacgggcacgtacctgcggcgggtgggcgggcaggacaggcttgagtcagctctaaccagccgcggcccacgcgccgcccaccccagccagccccggtgcccaccggcacaggaaggacagccactcgagcagaaagcgccgggtcttctccacgccctgcgtgtccgagccccagtgctccaggccgtagttggtgaagtcccgcaggatgtccaggcgctcggacgacgagatgtcccagtgccgctgctccttgatctccgtgaagagccacggcttgagcagggcgccactgtgggacgggtgacgatcagtgggcccagccaccagcctgcctgggatcgtgtggcctctgcttccatggcctggcctgagccggagcccagaccacaaaacctacaagcctagtaa

SEQ ID NO: 92337 - DNA, 484 bp, Homo Sapiens
  misc_feature (30)..(30): n is a, c, g, or t
  misc_feature (40)..(40): n is a, c, g, or t
  misc_feature (77)..(77): n is a, c, g, or t
tgcatcaaactttccacagctgttaggagntattaagtcngtagcctcattgggccctttccccacccctaccctgntgaagaacatgggaaatttctggacatgctacgtggagcctttaaaatatgaatactttgtctctctggtgagaaagcactggggtccagatggggagaagatgttctgccataagaaaatctcctggtctggtccgtgccttggcttagcacagggctgttcaggcagtgtgaggacccgacaggagggaggggcaggcagaagggagaacccacttttttatccattctgcccagcaagtaggggaccggggttgtccgggcgtcgggggagcggggagctcagactgtttttagactgacttggaatccggcccagagcttgatgcccggttcaaagcattccctcctgagtggacattacaagacctgcagcgaagaataaaacagaaagacttgaaaacaaa

SEQ ID NO: 92338 - DNA, 983 bp, Homo Sapiens
  misc_feature (564)..(564): n is a, c, g, or t
atccattgtgtgttttatttgcttttctctgtcatgaagcatatattagaactaacgtcaaatcagaggctcataatgaccttagaaaccacttagtgaaacctctcattttgcaattgaggaatcaagggaggaagtaaattctcccaaattattggtggtgataaaaatggaacttgggtttccttcccttggttgagtgcttattttgctctgtggtactgcctcatttctgcttagccagtgtgaacaggctctggaattcagatcccacttagtgatgtcctaatcaaagtagacatatggaagtaaatactaataaggcattccacagcctctgtgtgaattgatggtctgtttaggatttgtgccaatgcctctgtgacctaaagttaaaattttgcttgtgatttgttaccactttgagacactggtttttgcttaggcctctcttaattgcccacttagataaggaagccattaaggtcactccactgccatgtatgcaactgctgtgtggctcgatatgatcaacactgcctgtggactggacggtgcataggntttggcaaccatcactattacatattcttcttggttttcctttccatggtatgtggctggattatatatggatcttttcatctgtaagtgtaaatttttcttacaacaagcacatacatctacacccatttctacttttccttgtaaacccttgtatatcacattctggctgggtgactataaaccatactcctaataaaaacaaagcaaatgcctctaagactccctcagcattgggaagctgcaagaaatacaagatgaggttagttctcagtactttaggaaaaaaatgtgataaatttgaaaagtagtcaaaaatagaaattcatttaaggcaagtgcagatttgctccccagtgaagaaggaaagtcagctgctgaagtacaaagctggaggtgataactgaataaaacaggca

SEQ ID NO: 92339 - DNA, 554 bp, Homo Sapiens
gggtgcccgtcttgtgtccgcacagaggtctgcaaggagagagagtgtcttcattctttccgccatcttgattctttctcactgaccaagactcagccgtgggaaatatgagtgagcttctaagagcaagatcccaatcctcagaaagaggaaatgaccaagagtcttcccagccggttggatctgtgattgtccaggagcccactgaggaaaaacgtcaagaagaggaaccaccaactgataatcagggtattgcacctagtggggagattgaaaatcaagcagtgcctgcttttcaagggcctgacatggaagcttttcaacaggaactggctctgcttaagatagaggatgagcctggagatggtcctgatgtcagggaggggattatgcccacttttgatctcactaaagtgctggaagcaggtgatgcgcaaccataggtttcaagcaagacaaatgaagactgaaaccaagaacgttattcttaatctggaaatttgactgataatattctcttaataaagttttaagttttctgcaaagaatcctta

SEQ ID NO: 92340 - DNA, 272 bp, Homo Sapiens
aactaggtccactatcaacaggctacttactgttcaagaattccactgaagcacttattttaaggccctatttttcttaaacaaaacagtgacaacaacaatcaaaccatttacttttgatgctcattggcattttatgataaaagatgtattcatggcaatgatatgtattcaccctattaggaaacacaactggttacctatgagacctgttctgtccgtgtgcctacgtttcttaataatagctaaataaaaatttgtagcttttttta

SEQ ID NO: 92341 - DNA, 480 bp, Homo Sapiens
cctggtggagtgacccaaaccttcattcctgaagggtctgggccatttgtagtcctgcctggattgggctgttgtagtttcctgttggccttaatcacagggcatgggaatactaagaggtgtcctgatggatctcctgtattccaggcagactctttcttatcttccttgtggagtagtaaactgatttcattttgatgatcctgggtcaataaccccagccaacactgtaactcctttcttagcctgttgacttaaaagtaggagaagcccccaatgtccaggtggcaatctcagcttccagtttaatagaaacattgttgtgtctcctggggggagtgtagctccctctggaactaagacctctagaccagcagaatgtgatgttgcaggaacaggaagcaaaaattttgctagtggatcactagtggaggtggtgagtggggccactttcaactttaccccctcgttttttggtcc

SEQ ID NO: 92342 - DNA, 397 bp, Homo Sapiens
  misc_feature (111)..(111): n is a, c, g, or t
tgtaaaaaaaagggtttgctagcaaagtgcagaagaagttccctgaatagagacaatagtaaaccatcagaggatctattactgtcaataaaatgatctacacttatcacngatcaacacacatatcttagtcactagctggtaagacaagtgcttgaaaggaatataacagctatttataaagaatatgaaaaacttccagggtaagatagtgggtcaaggcagaatcacaaaattcttttaaaataaaaacaaagaattacaacttcgacttatttttcttaaataccagttagcaaaaaagagcaaaagacttcagaaatctatgatgtgttccaacttccaagcagtgtcacccacctaatcagaccgagagaaaaaaactagtggcaatgtc

SEQ ID NO: 92343 - DNA, 247 bp, Homo Sapiens
cctctacggcagccactgagagaggctgctctaaaactcccttcctactctcactaaccaggcaagaagtgtgaattttcccccagattattcagggagaaggcaggagaagcaactgaaggcaaggaagccgttgttctatggcttttaggtgtgctcaagatatactgaaacagtattatgtagctttcactacagctagcatacttaaatgccatcaaatttacacagaaaagatgacgacaaa

SEQ ID NO: 92344 - DNA, 467 bp, Homo Sapiens
tttaaagaaaagaggtttacttggcttatagttctgcaggctgtacggggaagcatagaggcttccacttctggggaggcctcagaaaatttacaatcatggcggaaggcgaaggggaagcaggcacataccacatggccagaacaagagcaagagagcgaagtggggaggtgccacacacttttaaacaaccacatcttatgagaactgtatcacaagaacagcaccaagaggatggtgttacaccattcatgaaagatccattcccatgatccagtcacctcccagcaggccccacctctggagattacattttcacataagatttggtggggacacagacccaaaccatattaatatggatatccacttttttcagtattatttgttgaaaatacttattttcctggccaggcatggtggcctcttttcactttttttaacgtggcgactagaacacgtaagat

SEQ ID NO: 92345 - DNA, 529 bp, Homo Sapiens
agatttttgactaaaaacagatatagtaaaaatgatgtattaggagggtagactggaagttgggttcaaattgaagacagaaagataagctctacagtagtgtgcatggataagaatggtgatgagtccccaggttacaaacggactctgaattgatgagaagtttccaaatctgaaagagattgctaaagaagagcctacagaatataatgactgatgggaaagcagtccaatttcagatccctcatgtgttgcgaaatgggcataaatatagtgcacacaaggtttctaaatattttaagtctcttcctggattcaccaatgtatatttcaccaacatatatatgaaattgtaacttgttaaacttctctgttacttcaagtttcactcttgtctttttagaggatacgcaaacctcatttcatcatttctactctagagactgcttatttggtagaatgaaaaagtacaacttggatagtaaactactgtattcagattttgcacaaaaacaacaaaatacaatct

SEQ ID NO: 92346 - DNA, 441 bp, Homo Sapiens
atgagattggagaagaccttcaagcagtgtcactccttcgaacaaagagtgggggtcccacttatctgacagcagcatcctaccaaaatcccagtgacaaaagaatgacacaggcgtgaaaagcagcttcctgtcctggaaaaaccaagtaattttgtacctgatcaggtcaacatgagtaaactcgtcaagataattagaaggcccttaaagctcgatagtaatcaagccctcttcctagtggtgagcagagacagcttgcactacttcctgaagagtccaactgaattatattgggtaactttcattcaccaggtatccagttttgaatgcgatcacaacaaaagatctctttctgaattgtatagattgtgctatatgttaccacacttttgtttatacatttaatttagtgattacattaaaaactcagcttagtat

SEQ ID NO: 92347 - DNA, 454 bp, Homo Sapiens
  misc_feature (66)..(90): n is a, c, g, or t
ataaagttgcttttttctgaattttttctttatgaggcttgatgggcagccctatcagcagacaannnnnnnnnnnnnnnnnnnnnnnnngagtatctgcttcaagccaggggcagtgctaagccctggaagtggtatcttctccttatccgggagtggggctacagtgttcattccagaagactcaagaaaatagcagatcatcacaaaagtaggttttacataaatgaggaggaatccacagggttgtgtatatgtgtgtgtattttaaattctgacataagttggagctttagggtagactgtgacataagagtagtttgttttccaactcatgtaattgccggctgatttttgtcttgaattatgataatggtaacttctgttgaaacaattctgtattcatcttagcttggttgggatgcaataaaagttttgtactggtaaaaatgaa

SEQ ID NO: 92348 - DNA, 430 bp, Homo Sapiens
gctctccctcgggtgcggtgagttctgtgttccacggaggggactccacgcgtgacattccaatcagggagaacagggcctgccctcactttcccatagacagaagttcccgggaggctggggaaggaccttgccactggggtcctctctcaggagtgcacgaagttcaaggtcagcagctgccgggaatgcatcgagtcggggcccggctgcacctggtgccagaagctgggagcggctttgggtcctccagcccacgccaccgcggcgagcagtccccggaggagaagccgggtggctcccgtctgtcctcggactgagcagggtggccaggccccaggtggaaactaccttggtcaggctgggttttttccctcccctttctggaggttttcagctcctctgaaataaacacctttcagtgagaaaa

SEQ ID NO: 92349 - DNA, 1149 bp, Homo Sapiens
gctggtaccggtccggaattcccgggatcccagggcagactggtagcaaagcccccacgcccagccaggagcaccgccgaggactccagcacaccgagggacatgctgggcctgcgccccccactgctcgccctggtggggctgctctccctcgggtgcgtcctctctcaggagtgcacgaagttcaaggtcagcagctgccgggaatgcatcgagtcggggcccggctgcacctggtgccagaagctgaacttcacagggccgggggatcctgactccattcgctgcgacacccggccacagctgctcatgaggggctgtgcggctgacgacatcatggaccccacaagcctcgctgaaacccaggaagaccacaatgggggccagaagcagctgtccccacaaaaagtgacgctttacctgcgaccaggccaggcagcagcgttcaacgtgaccttccggcgggccaagggctaccccatcgacctgtactatctgatggacctctcctactccatgcttgatgacctcaggaatgtcaagaagctaggtggcgacctgctccgggccctcaacgagatcaccgagtccggccgcattggcttcgggtccttcgtggacaagaccgtgctgccgttcgtgaacacgcaccctgataagctgcgaaacccatgccccaacaaggagaaagagtgccagcccccgtttgccttcaggcacgtgctgaagctgaccaacaactccaaccagtttcagaccgaggtcgggaagcagctgatttccggaaacctggatgcaccccgacggctgggctggacgccatgatgcaggtcgccgcctgcccggaagaaatcggctggcgcaacgtcacgcggcctgctggtgtttgccaactgatgacggctttccattttcgcgggcgaacgggaaactgggcgccatcctgaacccccaacgaacggcgcttttcaccctgggaggaccacttgggtacaagagggaacaacgaaatcgaaattaccctttgggtggggccgcctggcggcaccaagctgggctggaaaacaaaatcccggccccatctttccgggggggccccaattaggaatgggggaaaaaaccttcgagaaaaaccttcccggaaaactt

SEQ ID NO: 92350 - DNA, 442 bp, Homo Sapiens
  misc_feature (212)..(220): n is a, c, g, or t
tatttcaatgtttatgtcgtatctcttccgtaagcgattggtgggtctgaaatccactttcactgagatacttggttgacgtcaatacaaatgagaacagtgcggaccgttatgcccttcccctgaaaacacaaagtggagctttaaaacaggctctcacactggattttaggtggatttggattttaactccagttgtctatgagcaattnnnnnnnnncccacagcaggacgatttccaaggatattagaggatttaatgaacaaggatcgcatttaagggaagaggggtaacgaggagtaaaacgaaattttcctgctttttcctgtgagaagtatcattgtaattacccatgtatctaaattaaaattgcatattcatgttttgcattttcaattggccttgtataattaaaactgcatcacatttgatgaatttaaa

SEQ ID NO: 92351 - DNA, 1422 bp, Homo Sapiens
aacggctagttgtcaaaacacaggcttgtaaacgacggcagtactatacggtcctaaggtagcgaggctgggtggcgaattcggcacgaggatggctctagcgcggccggtgcggctcttttccctcgtgactcggttgctcctggcgccgcgacggggcctcacggtccgcagtcccgacgaacccctgccggtggtgcgcatcccagtggctctacagcggcagttggaacagcggcagagcaggcggcggaacctcccgaggccggtgctggttcgacccggaccgctgctggtttcggcgcggcggccggagttgaaccagccggcgcgcctcacactgggccgttgggagcgcgcgccgctagcctctcaaggctggaagagtcgacgcgcgcgtcgggaccacttctccatcgagcgcgcgcaacaggaggcgccagcggtgcgaaagctctcgtctaagggcagctttgctgacctgggcctggagccccgtgtgctgcacgcactacaggaggctgcgcctgaagtcgttcagcccacaaccgtgcagtctagcaccatcccctcactacttcgcggccgccatgtcgtttgcgccgcagaaaccggcagtggcaagactctcagctacctcctgccgctgcttcaacggctcttgggccagccaagcctggactcccttcctatccccgcgccccgaggcctggtccttgttccttcccgagaattggcccaacaggtgcgggctgtggcccaacccttgggccgctccttgggcctgctggtgcgggacctggagggaggccacggcatgcgtaggatcaggctgcagctgtccagacagccttcagcagatgtgcttgtggccactccaggggctctgtggaaggccctgaaaagtcgactgatcagtctggagcaactctccttcttggtgttggatgaggcagacacactgctggatgaaagcttcctggaactggtggactacatcttagagaagagccacatagcagaaggcccagctgacttggaagaccccttcaatcccaaagctcagttagtgctggtaggagccacatttcccgaaggtgtaggccagttgctgaataaagtcgccagcccagatgctgtcaccaccatcaccaggctccaagctccactgtatcatgccctcatgtgaaacagacatttctgagactgaagggagcaggataaggtggccgagctggtgcacattctcaagcatcgtgacagagcagaaaggactgtcctcaggaactgtcctgggtctgtaatagcgtcccgcactgtgaactggggcggaatattcgggggacccaaatccacactccagggcgggggaatgcccccttataaggggggaattcaacttcaaaaaagccccgaaaaatt

SEQ ID NO: 92352 - DNA, 384 bp, Homo Sapiens
tttacccacaaagaaattccttgaggacaaagaacaggcaatactcaaagtcatccctctgctcatgtgagacaaatgcatatctgattgcttcctctgccctattggttcactaagccagactaaggcacgtgactattcctgtaaattgtgcattcagtgaaaggctaatcagaaactcaaaagaatgtttcaagttgtcccacctttctgggccaaaccaatgtacatgttacatgttttgattgatgtctcgtgtctccctaaactgtatgaaaccaagctgtaccctgactaccttagacacatgtcgtcaggacctcctgaggctgtgtcgcaggcatgtccttaaccttggcaaaataaactttctaaattggaaaa

SEQ ID NO: 92353 - DNA, 975 bp, Homo Sapiens
tttttcaaggctctcaacttgtcccagtaccatttattagaaagatcatctttacttcactgagtaaaggggctaattctggactgttttcattcctcatgaccgtaaattgtaaatggctctcaacactgcccagagatgcagctgcagcttcctggcatgccggcttcctccctttgagacgtaactattttactgcatctcctctcctttcacacctccaagaccacttccttctcttctcagctggttacttcctctcacattttccattgagaaaatagatggaatctgatgagaccgacctcaccttctcacgtgatatccaggaatcttccctccaggcaactgtcgagggaccttgatgcccttatctaagtccaagccttctgtgttgcatcctgggtctcatcatctccttctcaaggtcttcgcttctgtaactgtcccctctgttctggcagcatcaatttctccctctctcctagatctttccaatcagcagcatgatgaaaacagcattccaccactgaatgccacaatctgcaccatccataggcgtcttcggaggtgccgggagcagtggctgatgggaggtgtccatgcagtaactttcatgtagaaagatttctgactgcactgcacgctcaatatcctggtcaatccccttaaagaagcccatcagttggccggcctgggcaccggtgcccgcgcctgctctgtctgcctctggcagttccacggtcactgtggtctcggaagacgggctcagaaggggtttcagttctttgtgggtctccatcaggatcccatggtttctcactggaatcttaacagatttcaaagcatataagtcttgttctctgatgaagttgttgactttcttgatatctgcaacctcagcgcccaggctccgccgcgaccggcgaccggcgactcgcgacccgcgacccgcgacccgcagctgccaccgcg

SEQ ID NO: 92354 - DNA, 1000 bp, Homo Sapiens
  misc_feature (428)..(448): n is a, c, g, or t
  misc_feature (661)..(741): n is a, c, g, or t
  misc_feature (886)..(886): n is a, c, g, or t
  misc_feature (949)..(949): n is a, c, g, or t
ggggtactgtaggtgcgtgggagaaactttgcagggtggggacccggcggctgctggccggtagtgactggtgggcgcgctcgaggactccaaggggcgcagcccgggggcagacccttgggtcgggcggggatcttacgcttcccttacccgcccccttttgtctttcacctcagccccgccggctgctgtgggagcggcggccgtccctctcctggaggtcgtctcctggcatcctcggggccgcaggaaggaagaggaggcagcggccggagccctggtgggcggcctgaggtgagagcccgaccggcccctttgggaatatggcgaccggtggctaccggaccagcagcggcctcggcggcagcaccacagacttcctggaggagtggaaggcgaaacgcgagaagatgcccgccaagcagaannnnnnnnnnnnnnnnnnnnngggagggggcagcagcgaccccgctgggaagccccccgcgggggctctgggccccccggccgcccgtcgctgctaacgagctccaaataaccctccccgggcggtgcccccggacgcagcccgctcgttcccggcattcgggggcaccaggagcccccctccgcccccacttcccgggctcgcgccagaccgcttacaccggcgcccccctgnnnnnnnnnnnnnnnnnnnnnnnnnnnnnnnnnnnnnnnnnnnnnnnnnnnnnnnnnnnnnnnnnnnnnnnnnnnnnnnnnatagcaccgcagcggggttgcgctcggccgcgcagtgaggggatgcgcgccctcacacctctcgacacatctcccgcccccgcctgccaattacatccattcaacgcggcgcccccgtcattcgcccgccgctgcatatcctcgntgcccgcatgtctatcctactcgggccgacatgccctaccccccccgtctcccgtcccgcccngtgcgatgtcgacagtctacgaacctccacatagatgtgcaaaaccaaccc

SEQ ID NO: 92355 - DNA, 395 bp, Homo Sapiens
ccaggatgtgagcccgactttcgcagccccaactggcaggctgacctcatgtgaactccctggcgatggcatcctggagacacccacatggctgagctggcaccatagggtgagggcaccagggccatggggaccgtggttgcttgcctcagacatggccagcaagggaggcacaacatggggctgttgagtgaatgtgtgagaggctgtgggtccccacagtccagccaccagcggcctcgcagcatcataggagtctgaggtccaagacaccggactcacatctcaaccctgccctgtgctgctcagggccaagtctaagctgctgtgacaaagaggcccccacatgcagcagctgccacagaacacggtcatctgtttttcatgcaaaaaaa

SEQ ID NO: 92356 - DNA, 335 bp, Homo Sapiens
ctcggtggctctcgggatgaaatcaaagcgagagttcgcgacacctcaggtggctggactccattcagcgcgttcccaggaaaaacatgagtatgacattgacaagcaggaggactacaatcacggcaaaaacgactacagtttgcacatccagggtcatggtgcaatgcagaacactgtagtgttccaggtggggggccggcagattgggagatgtcagtctctgttctgtcagactgtccatacagccaccatgctagaaaggagaggaggaagtagggtggttagagaagggctgggtttggcgcccgagtttagtcgggggaggggagggg

SEQ ID NO: 92357 - DNA, 413 bp, Homo Sapiens
gtctggcagccgggagcccagcgaagagagcgagcaagcttaggaaaacgagcgaagtaaagggagtaggggagactgagactgaccggtagccaggcaggcggacggacgcacgcccggacagactgagcaggcgccggagaaccactcacagcatggtggctgtatggacagtctgacagaacagagactgacatctcccaatctgccggccccccacctggaacactacagtgttctgcattgcaccatgaccctggatgtgcaaactgtagtcgtttttgccgtgattgtagtcctcctgcttgtcaatgtcatactcatgtttttcctgggaacgcgctgaatggagtccagccacctgagctgtcgcgaactctcgctttgatttcatcccgagagccaacgagaaa

SEQ ID NO: 92358 - DNA, 627 bp, Homo Sapiens
ctggtgatggtaaaggataaccatgtggtggccgccggtggcgtggagaaggcggtgcgggcggccagacaggcggctgacttcgctctgaaggtggaagtggaatgcagcagcttgcaggaggccgtgcaggcagctgaggctggtgccgaccttgtcctgctggacaacttcaagccagaggagctgcaccccacggccaccgtgctgaaggcccagttcccgagtgtggctgtggaagccagtgggggcatcaccctggacaacctcccccagttctgcgggccgcacatagacgtcatctccatggggatgctgacccaggcggccccagcccttgatttctccctcaagctgtttgccaaagaggtggctccagtgcccaaaatccactagtcctaaaccggaagaggatgacaccggccatgggttaacgtggctcctcaggaccctctgggtcacacatctttagggtcagtggccaatggggcacatttggcactagcttgagcccaactcgggctctgccacctgctgctcctgtgacctgtcagggctgacttcacctctgctcatctcagtttcctaatctgtaaaatgggtctaataaaggatcaaccacatggg

SEQ ID NO: 92359 - DNA, 493 bp, Homo Sapiens
tgcggccgcccacaatcatggcccacgggacgtccgtggcagagtatacatgctagggttgggggagagccagcctgggcacagaggagcacaggcaggaacagggctcggaccggcgggtttgcatatatcagtggggccacccagcccctaggggacagtttcctactcaggggcacggcagggccagtggactttggctgccaaagccctccctccccaggcctactggccaagtccatggctaagtcccctcctggtgggcaggagatcagaagttcttgatggctgggctgggcaagggttgcccccaaattccagaacacttcgagatgggggccatcccccgaccccaacacatgccacctgtccctggctcctgggggtggggtgctggccaggagcccagaaggtggatacaggctctggaatcatcagagccagcaccaccccaaggcccagcccctgccccccatcctgcccaggaggagcc

SEQ ID NO: 92360 - DNA, 460 bp, Homo Sapiens
acgacagtgtccccagttctcagatctctggtttatgagtgacgctgcagcctctctctgatgagctgcaggctggggactgactcctcggcaggtctgcagtgggaacctgtggagacaaaagtgactccatcttggatgccactcccctgtgttgacttccgattcgccccagtcttgtgaatgccttctgatttctactttatttactgcccctagtgtaagaacatgtcaaccttgatgttactccacaaatcgtaggctgtgactcacgtagcgttcttgcctgttctggagggctgcctttggttgtcttgctggagcacgaataccctttccctatggtatctaagccttgcatctggggtgtgagaatgcagagctccacctgtcttgtggccacccaagatcccacttcggtctgtaaattccctcaataaatcacccaatattgacaaaa

SEQ ID NO: 92361 - DNA, 867 bp, Homo Sapiens
aagtatcacctgtcagtttagttgagaaatatacctgagtactaatgactgatccggcaccagatatgtagagttgtcatatacaacaactcaaaaaaaacaatataattcagtactatattcaacatatactgcataagattgcataagaaagaatacattccaaatccaaaacaatatcatcctgttgtattatatgcatatattgaatacaataacaaaagtatcaagagttcttattaaagcacccattatcatttatgtaaaatattgcaagactttaaagtcacagaacaaaacatatttttttccccattatctttattgagatgatcaaatttcttcacactttgtgaactgcgtagttaagatggagcaatgatttgaactatttgcaaatgcagttccttccccactcttttatatactgtgttgggccatgaatctatggaaagaggtgtaatacaaagaacgaaagatcacatcaatatcaggactatactaggcattgagaatgatctagtaatgcttacgatttaaggtggtcacggatatagccgcctatcactccctttccgtctccaatgtacccgagatcgatatccagagagataagtaagctacttgaccgagtggtcgtagaggggaaggtagattgccgtggaagtgaatagtcggcaaggttgggagccagatgtattggggttcgataaaagcgtaaaagacgagaatatgtacaaggtaaggttgacgtggagaatgggagaggggcgcaaatcgatatgaggcgttgagtttccttgacctggaagtgggagagagcccctgggtgaatagacaatggcagacttaggcgtgcgatagagc

SEQ ID NO: 92362 - DNA, 531 bp, Homo Sapiens
agagaaagaagcgtctccagctgaagccaatgcagccctccggctctccgcgaagaagttccctgcccagatgagcccccgccgtgcgtccccgactatccccaggcgggcgtggggcaccgggcccagcgccgacgatcgctgccgttttgcccttgggagtaggatgtggtgaaaggatggggcttctcccttacggggctcacaatggccagagaagattccgtgaagtgtctgcgctgcctgctctacgccctcaatctgctcttttggaatcatcacattccacttctaaaaggagctttaaagatggcctggttgaacgtccttcctttgtgagtgaggaaattaagtgcagattaagtgacttgccaaagatcagatagtccaatggtggcagtgccaggaacagaattcagctttcttgcccctagacagtgtctttcacttgacccttactgagttttgaaccttagaattactaagattgttgttgttgttgtttaataaagaataaagctttgaaaaatt

SEQ ID NO: 92363 - DNA, 226 bp, Homo Sapiens
ttaagatatttagactgtgaacctgaactcccttgatctcctcccgttgggcccaggagggagccgaatccaggcccaaccgggctcactgagaaggtgcaggaagcccccaacgactcctactcgtgtgcggcccatactgggccaggacgctgcagtggccgagccgctgggtgtctgcaacggggagctcccccgccgctgggggcaataaacggaatcggtt

SEQ ID NO: 92364 - DNA, 553 bp, Homo Sapiens
aaaggattcagcaggatgtaggttgagaagcaattcacattctcaaggattggacaacagtatatccttacggtcttgctccagggcaatgtgaatcctgctccgtgttacaatatagcctttctggaaactctggaatacattacattcgtccactggattgatgacagtatgttcatgggcctgataagtgagaaatatagactattctgaatgacttactaaatcacaaacactgcaggtggtgggagagaaacgttacaaagattcagagatatgccatataggtaagctgtcaggggttcaatggtctggagcatgtcagtgtatcccctccaaagctccaagctattgcagctcatacctcctaccacgaagaaactcagagcttggtgggcctcctcaggttaggagaatcaccatggttgacattctgatgaatgtgattctaggctttgtaacgtgtgtgtgtttgggagacagggagtagggaggcagtgggtataccatcttaataaataaaaaatgcttatcaactttttacaattaaaaa

SEQ ID NO: 92365 - DNA, 564 bp, Homo Sapiens
caaacatctcaaattgaacatatccggaaaaatacacttctgaacttcgtagcattcagaataaaactcaaacctccagatggccggcagggcctccagtgatgggaatcctgtctcacctcacttggtgccactctcccctttactcattttcctggcctttccccggccccacttacccagaaatcttttactgtgcatctcctatgtgccaggcacctgataggtgctgggaatatagcagtggatgagaaagaaaaaagacccagtcctcatggagctgacttcctagtgacaggagcagcggataaagcaaatcactgaaggcagctggaaattactttccggttaagaggacaggctccttcccctcctcacatggctaccttcagatcacttgggtctcagcttaaacaccacctattgacagaggcctcgcatgttacctcattctttagccctactttgcatccttaaaaagcactcatcaaaatttgcaattatcttgtcgggtttttgttctttggtcttgattagtttcagtaaaaacttacataatgaaaa

SEQ ID NO: 92366 - DNA, 1241 bp, Homo Sapiens
  misc_feature (65)..(65): n is a, c, g, or t
  misc_feature (682)..(693): n is a, c, g, or t
ctaaaaccgctttagtgccttcgtacatacacccagacatcctgagcaagggggacgcacatgtntgtgtgtgtggtccagtcactccacagatgtaagatactcacccataaaggaaattggagtggttctggacaggccccaaaggcagtgggctgaatttaaaataaataaacaaacgtcaagcaagttaatatgcttatgtctcagtaatgtagaatgccaagttccttcctgtgtcgtgtgccctccattactgtgcattgattcctccaggtgtgtaattgtgacaactgcagtgatttggaaagtctctttgtcttggggcaaattagaaggggttcctgttgttctgctcttgtccttcgtctcctccccttttcccccagacctcccccttctttttgtcaacttgctgggagctttgctttattggttggcagtgacctaagaacaggatatggtgaggatgtcatggaagagaagagctctttccgtggtattctttggcaagagccatgtctactaagaggttaggtgacttcagtatacttataaaattcagtgagagtgccttcttctcttctaccacactctggcatagatacaggcttgctggtcacctctcattacatagatttattttaaaaacattttgattatgttaatttgagctttcccnnnnnnnnnnnnaactactttttaaaacacttgattactagtggcttagaggtgtgtacatctcctgaacatcacaaacttggtttctacctaccacacgagtagccaaaagaaaagaagcactaatagagaaaggggtgtctcacaccagacagaggacctctgctgtcaattagatccagtatcatgacctaactttaagtgtggaaaagagttcagatctctgagacactgtgaagaaatggatggctcatgtaacatctctgatccctcagtccccaaccctggacgtgtttcatttacaacattcataggagttaaccttagcagtgttgcaaggttaaggttccaaacccaaattattttaatcagggtccccccaataaatcacttatccatttattgctagttagttttatttatagcaacttgatttcctatgagtatggctcctgttgtaagaattttcccacctcttctgacatgaatgtagcataagttagcaatcggttcttccaaactcctgtgggttgaatatggtatagaaggtatgcaagagg

SEQ ID NO: 92367 - DNA, 717 bp, Homo Sapiens
cgaaataatacataaaatgtcttgtgtttgctaataaattgagaaaagacacaaaattgaattattgatattttctttttctttaaccaaaataaaagtaggctctagattcacctgttaaggccttaaacagtcaattaaccaatacaattcaccaaactagctttctatacaattaggaattaaacaaccccttttagagatatcctgaggatgacatttaatgctaaaatcaaaataaataacccagcaagaacaaaagtttaaaattccaataatttccactttggggatattttttcaccaaaattaatcaacatttctaaaatatttcaatacaaaattataaaataaaaagtgcattaaaagcagaacctttaaaactctagcacaattacagttattctgcatatgcggctacagccaggtttacacactgacattcaaggaaggaaacctccggattggtaagaagtccagtatcacaagcataagtcaaataaggcttttctttttcttaaaaaaatatacaatacacaaagcagtttggaaaagaagtaatattatttaacaattttctgacttaaatatcttcacataacaaaagttttcatatcaccgtcaatattacttatatacatatgccaaaagtgaacaacaacaacaaaaaaatcaaaagatgccctttcaaaataacagtaaaatgtctatttcttt

SEQ ID NO: 92368 - DNA, 415 bp, Homo Sapiens
aatggcagctcccagccaactaccagaaattaccctgagctcaacaataatcagtacaacagaagcagcaacagcaacgggggcaacctgaacagccccccaggcccccacagcgccaagacagaggagcacaccaccatcctccgaccctcctacaccgggctttcttcttcttcagcgagattcctgagccgttctatccctgtaagtgcgcagacaccacctcctggtcctcagaaccctgaatgcaacttctgtgccttgccttcccagccgaggctgccaccaaagaaatttaatagtgccaaggaagccttctgagcgatgccttacctctgtgctgtgaaaatgtctatgcactacattctgctagctccctcttcaagtaaacgccaagtcacaactgggaaaaaaa

SEQ ID NO: 92369 - DNA, 649 bp, Homo Sapiens
  misc_feature (99)..(99): n is a, c, g, or t
  misc_feature (105)..(105): n is a, c, g, or t
ggagtattcatggactatgagtgtgggaccatatcgttcttcaacataaatgaccagtcccttatttataccttgacatgtcggtttgaaggcttattnaggccntacattgagtatctgtcctataatgagcaaaacggaactcccatagtcatctgcccagtcacccaggaatcagagaaagaggcctcttggcaaagggcctctgcaatcccagagacaagcaacagtgagtcctcctcacaggcaaccacgcccttcctccccaggggtgaaatgtaggatgaatcacatcccacattcttctttagggatattaaggtctctctcccagatccaaagtcccgcagcagccggccaaggtggcttccagatgaagggggactggcctgtccacatgggagtcaggtgtcatggctgccctgagctgggagggaagaaggctgacattacatttagtttgctctcactccatctggctaagtgatcttgaaataccacctctcaggtgaagaaccgtcaggaattcccatctcacaggctgtggtgtagattaagtagacaaggaatgtgaataatgcttagatcttattgatgacagagtgtatcctaatggtttgttcattatattacactttcagtaaaaaaa

SEQ ID NO: 92370 - DNA, 493 bp, Homo Sapiens
tggatgccggctatagctgcagcccccaaagtcgaagctaccagaacaggttggatgaggatggcccaaagattatggagttgctggccccaaagcaagtcagacactatgggaagtttgcatgaatcatgcccttggatagacaacctaaatcatacctcatcgagcatggatcctggtcagcataccaagtcaaggcaagtaaagactgaagaaatatcacctgactgcagctccccccagaacgaagtctgctactgatggcagaagcatagatagaccaagggtatcactatgtaatgatggaagaaggaaaaaccccatgcattcactcatgtcttgaatcacctagagaagagagggaatctgccaaagtggacacaatagaaattcagttctaaatttggaggaaatgagacccactctcagataagatgaaaagtaaaagccctaggatccaatggggtattaaacaaatatttaaaagtaaaaa

SEQ ID NO: 92371 - DNA, 556 bp, Homo Sapiens
accagctatggcaatagcttctatttttcaaagatggctacaacaatatcccctgtttcaggcactcatttacaacgtggccttgatattcctcctactgagaagtcagtctatgtcctctctctttcatgctggacaggcttgtgactcattggaaaccagtatatagaggtgagaatgatgctgcacaacttgtgagactaggtcagaaaaagcagtgcagcttttgctttgtgtttggggacacttgcctttggaagcctgagctgacatgtaagtcctactgtcctgaggccgccatgctaggaggaagcccagactgtatgaagaggccacatggaggtgctgaggttgacagcctcaactgagggcccagctgattgccagcagcaactaccagattgagtgaagaggcttctagatggttccctgtgtttgatttttcctagctgaggcattggacattgtggtgtagtgacaaaccactctgctttgctctgtctgaattcaggacccacgggacccatggaataatgaaatagttattttgaaaaaa

SEQ ID NO: 92372 - DNA, 453 bp, Homo Sapiens
  misc_feature (120)..(174): n is a, c, g, or t
actatggactctgggtgataatgatgtgttagtgtaggatcatcagttataacagaggtaccctctggtggtggcagggtgggggaatatgggaaatctgctcagtgttgctgtgaaccnnnnnnnnnnnnnnnnnnnnnnnnnnnnnnnnnnnnnnnnnnnnnnnnnnnnnnnatgctcacagctcagttgtgatactagtaatgcaatttttatgcaaaattatgcttttgaagaaatcagaattctcaattttttggtgattatttaaattttcctcatttttatatggtttcttttaaaatgtttcacttttttccctgatttatattagaatggcaatgtatgcttaacacttgtatttttataagtttatgagtttttaatgttctgaaatgttattttttacttcaaatgtgttgaacatttaacttgttaaaacattccaggctg

SEQ ID NO: 92373 - DNA, 557 bp, Homo Sapiens
  misc_feature (15)..(15): n is a, c, g, or t
acttgaacccaaggntggcacaaaagccagaaggtgttactctccaccagctcagggattgtgaagatctctgtgcagactccactctgtggttggacagcatccctgagacatgcattttggaaattgtgatcaaccagaatccagaacacgctgtgcttaatggagtgaactgcctgtgaagcgcaggtgtgaggggcggatgataagtgacagtgccggtgcccccagcgcccttttacctgatggctcacccggcctacagctgcgcccttccctttgaatcgtcttgggtaacgggtgctgctttggaaatgcctggaaggtcatgtcctttgtctggggatggcttccagctgtggttgactgatagcagggggcacagaaggccagacacaacttgcctcaggtgggccgactctgagggtttgttcggcctccacgtggacttcagctgagcctgcatctttgcttggcttttcccactggcctattctgcttccctctccttaagggttctcccaggagaactcccttaataaatcacttgcacaagg

SEQ ID NO: 92374 - DNA, 568 bp, Homo Sapiens
cagaagttaccaccctatttctagacatctttgcataatcctccccttaatttgtatataattaaaaataagtatgactgcagccctgcctctgagctgctactctgggcccactgcctatggggtagccctgctctgcaaggaccaggacctctgctgctgctgtgtgtgccctgctgcctcaaaagttgctgcctagcactaccggctcctccttgaatttttttctgggcaaagccaagaactctcccaggctaaaccccaattttgaggctcgcttgccctgcatcgatttcattcctaataacttgccccttgcaacacacagagggccctgtgcagcatcaaaagggctacctttaattgaacatcagccaagactggaaggtaaatcatctatttttcccccatcaccatgatggcctcttttaacccttcccggggcaaagaatacaaaaccctgcatgtggctaaactaacagaggaaggcttcggaggtcccttattcttcaacccagtctcctaacagccattcaacatgttggcggggagggaaaaggaaaaaaaa

SEQ ID NO: 92375 - DNA, 1100 bp, Homo Sapiens
  misc_feature (814)..(814): n is a, c, g, or t
ggaccggtccggaattcccgggatgccggagccggagccggagccggagccgtagtcgcagccgcagccgcagccgcgcgccgggcctcgcaggcagcggcgcggcgagcgcagccgggccccctcctcgcgacctccgggccctgttgctcgggcgcacctggcgcgtgtgaggccggggccggcgttttcgggaagctagcaggaggccgggccacgcgcagcccctgccggcccaggttcctggggccgggccccgagtagtgcatgcggggcggggcggccgtgagccggaggcgaagatggaaggcttaacgctgagcgatgcggagcagaaatactattcagatctcttctcctactgcgacattgagagcaccaagaaggtggtggtcaacgggcgggtgctggagctgttccgggccgcgcagctgccgaacgacgtggtcctacagatcatggagctttgtggtgcaacaagacttggttattttggaagaagtcagttctacattgctttgaaacttgtagctgttgcccagtctggtttccctttaagagtggaaagtataaatacagtaaaggaccttcctctgccaagatttgttgcttcaaagaatgaacaggaatctcgccatgcagcctcatattcttcagattctgaaaatcaacggtcgtattctggcggaatttcccccaccaacctggcagggggcaagggaaaaaagggatccgtaagccatgatacgggtcagccctcctacatctgccgatggacagggaacctgcattccccgtaggtttcacccccagnaatcccccaaccaacttcctccacacccctggggaggaaagcacaggccctccatccccagcgggggggaaatagtggaaaagggcctcctggcggggaactgggggcccattttgggctctcccctttggggggaaaccccaattccggggtttttcccggtggcggaatgtaaatgggggggcaccggggcctattcccccgccccttccaccctcccacaaataacccctggcgccacccctttttcgtggaaccccttcccccgccgctgctagtctgcccg

SEQ ID NO: 92376 - DNA, 459 bp, Homo Sapiens
ttttgagttctggctttagtgacaacgaaggcaaaatggattttaggtgggcaaggactgtctcctagatgtcagtgtccattccggagccacatttttggcagaagatttccttgttctgggtcaggaagcctttacccaccaaggagacagagcatttcccgcagttaaagcattcgctatgccactggctgtcttgaaagcagataaacttggcacctgtgagaccactaatgggtttggaacaggctacacacttgttggcataaagatggttgtagcagtccatgcagaatggatagtcgtctctggacatgaactgttcttcacagagatctttcctacagccactacacagaaaacactctttatgccatagctggtcacaaaatgttatcccacctgaagttatcaccttcttacaaaagttgcagtagtgagcaaactccttctcaaaac

SEQ ID NO: 92377 - DNA, 737 bp, Homo Sapiens
ggggcgcaccgcagacggcgcggatcgcagggagccggtccgccgccggaacgggagcctgggtgtgcgtgtggagtccggactcgtgggagacgatcgcgatgaacacggtgctgtcgcgggcgaactcactgttcgccttctcgctgagcgtgatggcggcgctcaccttcggctgcttcatcaccaccgccttcaaagacaggagcgtcccggtgcggctgcacgtctcgcggatcatgctaaaaaatgtagaagatttcactggacctagagaaagaagtgatctgggatttatcacatttgatataactgctgatctagagaatatatttgattggaatgttaagcagttgtttctttatttatcagcagaatattcaacaaaaaataatgctctgaaccaagttgtcctatgggacaagattgttttgagaggtgataatccgaagctgctgctgaaagatatgaaaacaaaatattttttctttgacgatggaaatggtctcaagggaaacaggaatgtcactttgaccctgtcttggaacgtcgtaccaaatgctggaattctacctcttgtgacaggatcaggacacgtatctgtcccatttccagatacatatgaaataacgaagagttattaaatttattctggaatttggaaccaacctaattttttatacccttatgaaattgtatcctcggttaattctctttcccttacactctttctggta

SEQ ID NO: 92378 - DNA, 964 bp, Homo Sapiens
  misc_feature (680)..(680): n is a, c, g, or t
  misc_feature (729)..(729): n is a, c, g, or t
aaaagtttgcccaggacggattatggtccgcccaacccttttcaagtttttgccctctgggccagtgcccaaatcacagaaaggtcagcttttcgaacattgggttaagcctgcacagctcttcacacacagcctgggaagcatggggacccacctttgaaccaagtagacgctttgtagccctcttcggcagccactttatccagatcagatccctccggaacaaagtaactcacgtcagcaatgtgaactcccactctgaagttgccgtcagcgagtggcttgcaggagagggcatcatcgaggtctcgggcggttgatgggtcaatggtgaagatacagtcttttcttaaatcccttctcttgctgaactcctctggtggaattgtccatggcaggccttgaggaagacattctagaacttctgaagagaaatcagagaaatccacgccatactctgttagtattccttctgtttcaggctcaatttcaccagcctgcccaagactcttagccagctgccccagggcaaaattgcagtcctccttccagtccacaatgcggcagatgaacagtgtgttggcataatctttaggccgtgccacaaagtcctggggacagtccttgagaggcacataaattctaggcactcggtggtctgagggagaaaacaggggcgntatttcctaaacagtttcgccatgttcttatcagcacccaaaaaagaanggctttgaggaagccggttgctgctcgagaatgttttttctccaagatgtaaaccacctttgctgatctttgcagggatttctccgataaagctcttgtgtcttgtgaaatgcaggtggtctcatcttttgtaaccggtgcatcaccatcctctcttcctttctcagaaacacaaactgagagtttcgtaacaccctcggccgaattaacaccaagcctcgtactagcctacgtt

SEQ ID NO: 92379 - DNA, 812 bp, Homo Sapiens
cagtcgacggtaccggacatatgcccgggaattcggccattacggccgggtactcacagatgcattggtaaacattattgaatataaatttatattcatagtctacttgtttctgtaaggaaagataaaagtaaataaaactttccccttttgatttttttgataggctattttaatgatgagagttgacttaagtcattcttctatttcagcaactggccatgccacagcacataaagattacagtgacaagaaaaacattgtttgaggattcctttcaacagataatgagcttcagtccccaagatctgcgaagacgtttgtgggtgatttttccaggagaagaaggtttagattatggaggtgtagcaagagaatggttctttcttttgtcacatgaagtgttgaacccaatgtattgcctgtttgaatatgcagggaaggataactactgcttgcagataaaccccgcttcttacatcaatccagatcacctgaaatattttcgttttattggcagatttattgccatggctctgttccatgggaaattcatagacacgggtttttctttaccattctataagcgtatcttgaacaaaccagttggactcaaggatttagaatctattgatccagaattttacaattctctcatctgggttaaggaaaacaatattgaggaatgtgatttggaaatgtacttctccgttgacaaagaaattctaggtgaaattaagagtcatgatctgaaacctaatggtggcaatattcttgtaacagaaggaattaaagaggaatacttcagatgg

SEQ ID NO: 92380 - DNA, 793 bp, Homo Sapiens
  misc_feature (75)..(75): n is a, c, g, or t
  misc_feature (81)..(81): n is a, c, g, or t
  misc_feature (101)..(101): n is a, c, g, or t
  misc_feature (108)..(108): n is a, c, g, or t
  misc_feature (131)..(131): n is a, c, g, or t
  misc_feature (649)..(658): n is a, c, g, or t
tttatatgatgacacttaaaaaccaaagctgccttatacatgcttggggagtgtaagactctgttttctactgcntcacantaacataaatgtgttgagtntgaatcntaaaattctcactgacaaacatntagggtcagtgttgaggaaaatgtgtgatgcatgttagagaggtgatcattctcccttatgcagggacatgggtatatgtgttacatatgctgatatataacccaccattcatcccaggaccacaaagggtagctgtagataaactggttatcctaaaatcatgattatcagtgttgatctctgcaaccaacattgctttagggagttgctagtcattacccctgctacaatagatagtatttgtcagtctaagttacagacaaaaaattctaggttgactgattaagaaagccatgtgttttaatttccttcatgttttaaaaacaatggacgtaagtgcagagagacctttgaaaatattaagggaaatctatttaatcctataggtatgtgatgacttgtttttttggaaaaaggtatttggaacatcaatctgtaattatccattttccattcatgcattcactaattcaatatttgatatgtgtctgggagtgctgggaataacataaatacnnnnnnnnnnccctaagataatcattcaccagaagctcatagatataatacagttatatagctaaatgcaaccagttgtttttccaaatgtactcatcatctgtaataaaagaaaaatgaagtaaaacatctgaaaccttaactt

SEQ ID NO: 92381 - DNA, 361 bp, Homo Sapiens
ggtgatgcaggcactcttttaacttaacaagtggcattactcaaagttgtgcatttgccaggagctctgcccagctgccttcgttgtttggagagccaactgcttgactccctatatgtaaaattctgggggcaagcattctatcttcatctacccccaattcaattaagcacttggccagacattgggcaggtcccaaactcttcatggtgacattttgctcagtctgtggtagggtcatctgaacactcgtaggtcctggggagcgcttcattttagacaatcctgacattctatttatattcaacaagtctgtatcacttacgaaataaaatatatccagagccatagaaggaaaaaa

SEQ ID NO: 92382 - DNA, 537 bp, Homo Sapiens
tatcagtgtcttgcctgtgatgtggctatcagtgggaatgaagcacttagccaacacctccagtcaagcttgcacaaagagaaaacaatcaaacaagcaatgagaaatgccaaagagcatgttagattattacctcactcagtctgctcccctaatcctaacaccacatctacctcgcagtctgcagcttcttctaataacacctatcctcatctttcttgcttctccatgaagtcctggcctaatatccttttccaagcgtctgccaggagagctgcttctcccccttcttctcctccttccctttccttgccttcaacggttacctcaagtttgtgcagcacctcaggggttcaaacctcactacccacagaaagttgttcagatgagtctgacagtgagctgagccagaagctagaagacttagataattctttggaagtgaaggctaagcctgcttctggcctagatggtaatttcaatagcatccgaatggatatgttcagtgtgtaggagtgaagacaggatcccgtgctt

SEQ ID NO: 92383 - DNA, 295 bp, Homo Sapiens
ctattcttaggctttatctacaaagaaatgaattggataatcttcataaacaaaaaactggaaaatttatcaaccagaatatgcagtagagacatattttgatgagaaatgacttaagttatgttgtaactggtagctgattaagtatagttccccgcaccccttctgggaaagaattatgttctttctaaccctgccacatagttatatgttctaaatcttccttgctggtacatctatattgatatatgtatacacatgttctttataaatctattaaatatatacagataaa

SEQ ID NO: 92384 - DNA, 460 bp, Homo Sapiens
tttttatttttaatgaataaagaaagtttattggagattattaaagaaaaatgataaaataaggcaagtcctagatcagatttaaatacaatatttagaaagatggctatataattttagctaggaaaatcagtaaaagggaatatccttaaaagtgggaggggttcatataaccttttaaaatagcaagttgaggtgtaaaagcatcaccaacaatagtatgtaccttaatctttacacaattggacagtgaggagcaaagtgggagattctaccaatgccacttacagaacagattttcaagttaataagtcataaaatcctaatgtagtcataggctaggatggtgacgacaatctgcaattactggtcagagtgaaacgaagtgacaggtcagatttttcagcatatcaagttactacttaggtatgcttacaaaactttgttaaataaagttggg

SEQ ID NO: 92385 - DNA, 328 bp, Homo Sapiens
gtccaaattctagggcccagacagaagagaagagtcacatcatctagatgatgaatgaaaagatatgtcattattctcctttgggcagtgcttctgcagaaaagttgcaccttctaggtgttggactcagcaatatatcacaatgtctgcagtattttggaaggagaggagagtcaccattacttagtctatcttcaatttacagaccttggcttttctaccccaattcaagaagtcacttcttcagtcaaccaaaccaattacaaaattgtgttccaatgtcacatgttcaaaaataaacagttcctgaaaagatgtaagctttaaa

SEQ ID NO: 92386 - DNA, 331 bp, Homo Sapiens
gggccacaggtgtctcctggcagtgagaagagtgtttccagtaaagaaaagaattcaaagaacactcagtatgaaaatctatccattctggaccaaatccttcaaaatattggaagatcttcaggaaacattttccataaagagcagcagaggaccagcgcacagaggaggagccaaggcagtcagtgaggccgcagccccagaccccctgcgcaggagaggagcctgctagaacccccacccaccagcctccggaacagggcacttgtgtgcacacgcccacgttctttgaaccattccacataaaggaaaatcgtttattcacacgaaa

SEQ ID NO: 92387 - DNA, 367 bp, Homo Sapiens
gaacaatgattccttgatacccagtccatatagtatgatcccacttgtctcaaaaatatcttttgaaagttaatttgttgtctctctcaagtgtctaatctagagcagtctcctcttcctctcacctccttttttatccttgcaattgaattgttggagtcaattgctcttaaaagaatgtacagcatttcggagttgtcttttgcttcctagaggtgtcttttaaccagttcttccactatattttttgtaaaaggaatcagctgtaaagatgtaaccagaggttcagcaaaccaccatggcacacgtatacctatgtaacaaacctgcacgttctgcacatgtacccctccagaacttaaagtgt

SEQ ID NO: 92388 - DNA, 424 bp, Homo Sapiens
gcggccgccaccggcggccgaaggagaggacgacgaggaggaggtggcagcggcggcccagacctcagggccggcccacggaaggagtgcctcctcgctggaggacgcggacgatcaggaggaagagatggaggcgatggtgatcggaggcggttgctgcaaggagcaggagctgacctacgagctacagcagggctaccgcatcctgggcgagttcctgcaggagaagcaccggggcctcaccgccccctttctgcagcccttggggggcgttgccaccgcggaggaggaggtggcggaagggccgcgcagcgggggccggggcggtcgcgccttcccgcagcagcccggacagggcatgtgtctgctgcagatggaagagaagttcgccagcggccagtacgggggcatcaccgagttcgtg

SEQ ID NO: 92389 - DNA, 503 bp, Homo Sapiens
tcttcactattaagctaaaaaggtaatttttctcttgaatgatgtgaagaattgaatttctttcaactgttccaaaaatctattcctgcctgccaccctgtggggcaggcaagatgatattatacatctcttataaaacaaagatacagactcagaatggctaataggatattgctgaggcctgccaggtatcttttggtgaatagatactctttatcttaaggtatcttttggtgaatagatactctttatcttaagatttgttgtggttattcttggtctgctgcccatctataaaaaatttagaatccatcggtaaagttgcacaacaaattctgctaggattttgttggaattacactgaacctacagatcggtttgggaataactgacatctttacaatactgagtcttcccatccaaggaaacagtatattatattccatctaattatgtcatttggaattgtcttccaataaatttttatggcttttctgcaaaaa

SEQ ID NO: 92390 - DNA, 431 bp, Homo Sapiens
gcagatctaggccaggtgaccagggtttacaagtcccaggacagcaggttgggcttggtgcacggaagaactgatgagcagcttcactcatgcagcaggacagatcaggacaaagccatgctggagttggggccacacatctgctgaaaacccccaacactctttttcccagcagcagcttccaagcaattcctgaggccctcccaccggctaaccagaaaggaacccaccattggtctccttagtaacgacttccaaggccccttgcacatctgaaaagcgcacagtgtgatttccagacccaagttagacagcgatttcttcaaagtgcaacgccctcaattaatgaaccctctgggaatgaagtaccttctaacaaaaacattgttcaaaataaagctggaaaaaaacctcacacagcccctaggaaa

SEQ ID NO: 92391 - DNA, 169 bp, Homo Sapiens
ttttctcagaaattgaaattttataaaaaggcatttttctcttatatccataaaatgatataatttttgcaagtatagaaatgtgtcataaattataatgttccttaattacagctcaatgcaacttggtactttcttccctccctaaaaaacgagagagaaccaaaaa

SEQ ID NO: 92392 - DNA, 819 bp, Homo Sapiens
  misc_feature (436)..(462): n is a, c, g, or t
  misc_feature (712)..(754): n is a, c, g, or t
caaacagcattctcatgagttaagtgtaaatgagtcagaaacacatagatcaaatttcttttaaaatacacatgggtttgaaaattaaggccaaagtgcttggcaaaataagttttggttttatccaaacccaaatgttgaaaaaataattctaagatttgccaaaccaaaaatacatgcagatctcttcaatcctcccattaaataagatggcatcataaacatgggacttagtggctattttcataatccccaaggtttaggcaacatggaccttaaatattgattgaaagactatgaaaaatttttggtggaaaaacattataaccttgcaaatgaagatgagggctactggttcagggttctcatcctgattttgacagcacttctcactgtccgatcaggtgatcaacttgtcctttgtcttagctctggnnnnnnnnnnnnnnnnnnnnnnnnnnngcctatgcatagcaataataacttttaaaatcctatttttggattttataaatcctaaatgtatacttaattcatatattacaatctgcgaaacttaataactcctcatcatatccaaacagagggaagcagtccccttttgctcattcatagttcagagatagtcttcatttatttccctagagggtaaaacatatccattttgcactaacaatatctaatgctgactttgctcaggtctgtgttattnnnnnnnnnnnnnnnnnnnnnnnnnnnnnnnnnnnnnnnnnnntaggggagggtgtgtggcaggagtccttgacttgatttgaagaactaataacctactgagagaca

SEQ ID NO: 92393 - DNA, 424 bp, Homo Sapiens
aaagagaagaaaaacacaaattatcatcacaacagagagaggctgcccccaccacaaatctcccctgattcggagctcagtggggagcagtgtccccgccccagatctgttagcatagagttttacttcctggcagctaagccttcatgcacggagctccctaacacttgctgagggtgactccgagtccctcctgcacccgccctaggaactggagtcaggtgcttcgggagccccgtgagccaatctccctttctaccaacaaaatctgcctgactctgcgacaggactcactctcacaagaagaggccatgaacagggaacaggggactgtggggaactccctgaacagccatgagcgaactggctcctgtgccacatgtaacccaggagggacactgggcctcctgcctgttgggggaag

SEQ ID NO: 92394 - DNA, 365 bp, Homo Sapiens
gagttaaacgagtcagtatatttcctttattgctcaaatcactttttgtgttgggtcctttttgaaaggtggccagatctgcccaatcatattatgctcctcaaggacacaccctgtgtgaggaataagcagggtttctaccaagtcaactgtcagagtgatttaccttccatgatatttctgaatgatggtagactcaagttaatgtgagttatgtgatgcctgtctgtcattggatgaagatctacactggacagtttcaggtttctttctaaaccatgactgaagccatagattacctgataaccaaccatggttctataaatgtctgtacgtgtctataaaagtcaatgcagaaaattaaa

SEQ ID NO: 92395 - DNA, 591 bp, Homo Sapiens
atctctgtttgtttttaaagactgtttcaaagattaaatctatacaaccacttttatgaccaaaaaagttgttgtgtcccaagtgtcctaattagaaaggcagctggctctcctgcagctcccaggcttgtgtagtcaagtgcagtgaactgggcagtaatcagctcaggaccattggctctttcctcctctttcagctacagacacatgccctggcttttgcattgaccttgctttgttagttctagactaatttatccttttgtcagacactttcccttttttaggatactcacaacagagtccactttcagctattggaatacattttaccataaagcccccaaggctttctacccataacaccaacacaaaaaaccaattaagttgcagaggggggaaataatcacaaacttttggcaacctgcttaatgctagacgctctgttttcactggttattctgagtgtcatatgcagatgcagatccaagggagacagggctaaatggtggtgtcaagaattcctcccacaccccaaaaattctttccaatatttgattattaaaatatctatcatttctccacaaatta

SEQ ID NO: 92396 - DNA, 222 bp, Homo Sapiens
tagtattatctgactggatgtttactatctacagaaacatctgaattataccatttgatctttgctttaaattaagttggtgtcttaaccacttaggtctggttgccttcctctctatacaaatcggccctctatgtctgtgggttctgcatctgtgggttcaaccaattgtggatcgaaaacatatagaaaaaataaaatgtgtggttgcacctgtaaaaa

SEQ ID NO: 92397 - DNA, 472 bp, Homo Sapiens
cagtaaccccagatggagagataggggtatgctagacactgtgcttctcggaaatttggatgtagtattttcaggccccacccttattgattctgatcagctctggagcagaggcagggagtttgcaatgtgatgcactgccaacattgagaattagtgaactgatccctttgcaaccgtctagctaggtagttaaattacccccatgttaatgaagcggaattaggctcccgagctaagggactcgcctagggtctcacagtgagtaggaggagggcctgggatctgaacccaagggtctgaggccagggccgactgccgtaagatgggtgctgagaagtgagtcagggcagggcagctggtatcgaggtgccccatgggagtaaggggacgccttccgggcggatgcagggctggggtcatctgtatctgaagcccctcggaataaagcgcgttgaccgccaaaaaaaaa

SEQ ID NO: 92398 - DNA, 489 bp, Homo Sapiens
taacagagccttaatgaggcatggtttagttacataactaaagctagccaaccaagttctatgccaacctcctaagtctcacacacaaaataattaaataaccgcaagctaagacgaaatgactttcccagaaacaagtcagaaaaaatgcaagcaagtgatgaaatggaatactaaggaaggtgttgatacctgtagcttgatggtaacttttaacaaaacccaatagcaataaaaagaagccaaagcaaatatatagtaatcaaatttatatagcatctagagcatattaatgaaaatattgaacaaaaatatttaaaaggctccaaagtaatgagaactgcatttgaccatgctgatttcacttccattacagctctaagcttctgaaaccgcttgctcttctcgcagctgtgtacactgagcctgattatcaggtcatttctgtacttctttatatagccacgttatttgtgctcctatgaatgg

SEQ ID NO: 92399 - DNA, 590 bp, Homo Sapiens
ttttttcaaagttcaaccagtaatttaatatgaaaacaggaatgttagttattatgtaattaaataccattataaagaattttagtgtgtcaaacaaaatattaaaagtgctgctagaatctattataaaattttaagaattcagatgttttggataattctatttgtgtattaaaattgtttctataattcttattaatgttccaacactaatctgcttcaagaaacacccctttgctttcctttttagtctcattgaagtccttgggtcactttacccctgcccttgggttgatggacgatcagatgtcttccttctaatgctggctgagacatcaaacaccagagtggacttacttggctccagtgctggtgatgggcacttctgggtgaatggaatctggggtgtatgtacactagcaaatttgctggttcttagtgcaggatcatttgaaaatttattattctgccaaattgatcaaatcactttgaacaatttatgcatgtacttcattacacaatagtttccatttctgcacattctaacacctattaatttttgcaaatactatagccataatataacaaaa

SEQ ID NO: 92400 - DNA, 500 bp, Homo Sapiens
ttaaattcacaaaccccttgaactttatccatgagattttctgatgacccaatgacttaatcctgctactgacttaatcaaaacccagtccctacagaagagacctgctcccccgtcacagcgccccccaccggccccccatgccgcttattttaaaagcgcagctcccacaggctgcctttccttcagtttctgtccatgcccccagccccaggctgccctctcttggcggcaccgtcccaccccgcctgctgcactgagcccgctgggcctgggggactcttgctcagtagaacccgaggccagcaaaagctcttagcccaggatggctgcagcagcgacagtcctgaaggctacagagacacctggaaagggaacaaggagagcacgacagtccctgtgctgaggatccagggtggtggcggcaggggttagtgtacagtctcgagaaaacagggcggcggcagggggctgcactgacctctatacaccgagagggt

SEQ ID NO: 92401 - DNA, 564 bp, Homo Sapiens
tttaaccagatccctacaatggtataaaggaagaacatcaacatttaggtttagattcactagaacaactgctaagcatggaactgtctccaaacttttaaatataatataaactttttttcaaagaggaaaggtttcctgtgcagaataaataaatgcagatattgggtgagggtgagaaggagaaaagggttagagcccagcttgctgaaatgtcccttagtcctacccttaatctgtacagcagccctgggtctcagcaaaacacaactagaaacccactgccaaaatgggcactcagataatacataattgcaaaacactatctttttaatactgtaatagctacctaacactatcaactcaaatctgtgatcttaaactcagtattgatataataaactaatagttaaaccaaggcatactttaaccagtgagtctagatttgctaaatactaataaacttctcagttttgaagaatggagaacataaccttctttcactgatttactattttggtcacacaaaaatacagtgttttttaagcatagtgaaaagtacat

SEQ ID NO: 92402 - DNA, 489 bp, Homo Sapiens
gatatgctgtccaaggagcctccgtggtgtgacggctcctactgctatgagtgcactgccaggttcggagtcaccactcgcaaacaccactggtaagaccccagcgtcactggcaaggagcgaggggactgccgctgatgtcattgcttccccccttctccaggacaggccgtgaacttgcctgggtcctgcacattgatgggcaaaccttgaccaaatggagggatgagatgagcacacccaaggatcctactgaggaacagagatgtagggaaggcagggagcctgcagacgggtggctttcctgctggaggctgaaggtgcacagtttaccaggcagcctgccaggcctgtgccatccttcctgacttcctgcctgcaccaaagctgagatgagctactgccctcatggtgtgcctcagtatgggccgctttgccgagaactaaggggctgttcccattaaaatgagatagataggcgtgagccac

SEQ ID NO: 92403 - DNA, 466 bp, Homo Sapiens
ttttactcttctccttcaaagtgtcttattcttagtctgcactttcacatgttccattcctctctaccctaaatgggattttgaatgaaagggtattgaaattattgattcgtaaatgattggcatctttatgtaactgggacgttctattcattaatacagcatatggatcaatttatttaggtgtttgatatcttccaacacagttttataaagtgctacatttagatgtaacacatctcttatagttccttatttttgttaatacttcaagtggtatctttttattacattttctatcaacagttactggtatataatgatacaattattaaatatatctgtattcattcgtttgctaaagtttctgttataatttgtttttacattattttggaattttccatatagaattgtatattaactttaaaaaataaaatagaattggcaaatctgtatgaaaaaa

SEQ ID NO: 92404 - DNA, 580 bp, Homo Sapiens
acgagggttgaaactaggcttgctttcggtacacaggtgaagacttgaggaagccagtgccagagaggacgtgcctcacccctcagctggctgaatgcgcttcattggcttacgctttgctttctgtatgctttctgtccttctgggtggtgtcgcatatatttttaaaaccacattcagtgtgatgaacacttgttggtacacttctaaggttagtcatctttccttctctgagcagatccttgagaagggcattgacagtggatgctttaaatagtgttcagtttttaccagtaataatattttttggtggatgtcatgaaaacacatgacatcgtgttgtgcccatgataaaaagtcctgactttttattgaatgaggtgtgctggtcaaagagacagacgtggctgccttctctggtaacagccagaggaaaaagttagcaattctagatgggttctacagctttaaaaaacttgttgtatccttaggtcctcataatattaaatattttctaattttaacagattttaagagtcagatatatactttgacatgaatgacatagtgttgcttaagg

SEQ ID NO: 92405 - DNA, 514 bp, Homo Sapiens
cgtcgtgaggagcgccgctgctttacggctgcctctcccagactagagccccggagcgcccaccgccgtcagccgcgtcttcaagctagtcggccccgcggagagcgagagaccctgcgcaccgcagccctctccgctgcgcccattcctgccgccggcgatgtaactcggggaggcagcggtgcccgctggcccggggttgagacaggcggcaggtgcctgtgaggcgggcgggtgccgggggccagcaggatggaggaaagcatggaagaggaggaggggggcagctacgaggcgatgatggacgaccagaaccacaacaactgggaggctgcggtggacggcttccggcagcccctgccacctccgccgcccccctcgtcgatcccggcccctgcccgagagcctccgggggggcagctgctggcggtgcccgcggtctccgtggacaggaaaggccccaaggaggggctcccgatggggccgcagccaccgccggaggctaatggggtga

SEQ ID NO: 92406 - DNA, 378 bp, Homo Sapiens
gagatggtcaggaggctcccgatgtggttgcattcgtggctcccggtgaatctcagcaagaggaaccaccaactgacaatcaggatattgaacctggacaagagagagaaggaacacctccgatcgaagaacgtaaagtagaaggtgattgccaggaaatggatctggaaaagactcggagtgagcgtggagatggctctgatgtaaaagagaagactccacctaatcctaagcatgctaagactaaagaagcaggagatgggcagccataagttaaaaagaagacaagctgaagctacacacatggctgatgtcacattgaaaatgtgactgaaaatttgaaaattctctcaataaagtttgagttttctctgaaaa

SEQ ID NO: 92407 - DNA, 546 bp, Homo Sapiens
  misc_feature (324)..(369): n is a, c, g, or t
ttttttaaggtaaatggtgattttaaaaagcaagatcaccaagaaatagaatcaaaagacagatatgaatgactacacacaagatcaactaatagaaatactgcaacacatttaaaaacatagtagtagctacttaagagaagcaacttcacaaatttctttttgaaactctaaacattttgaaaaagaccaaacaatccgggtaaagttatggagtgcttggccttgtcacacaggtacagacacagtgtagatggtattgtgagcagggtagctaaagaaaactgtattttctgcaaacagcttaatcttccttagataagnnnnnnnnnnnnnnnnnnnnnnnnnnnnnnnnnnnnnnnnnnnnnncatttcctaaagtaatactagcccaatcaagtctagcttgaagaatctaattctaacaattagaaagacaggaaggttcaagattcaacatcgtgccacaaacacatgaacatccaaaaatctcatttgaggtcctgattcaaaatactaaggcagatccatataagaaatcctagc

SEQ ID NO: 92408 - DNA, 458 bp, Homo Sapiens
agcacagccccatccaggttcccatggttgccggctcccctctcaggacaacccagatgtgcaacaaagtgcgatggtgaacccgtgagcaactgtggtacctccacctgtcccacaacctacaactcagcagtaccaagggctggacgctggtgccaccacacgggtcccgcgaagcctgctgcgaagtgaaggaagccagacacaaaagtctccatcctgcgggagtcactcacaggacaattctggaggacgcaaagctgtaggagcgaggagagacaggtggtggttgggggccgggaaggggcctgactgcagaggggcaaaatgtgggctgcctctgtcggggcagaagtgccccactctagacccttaccaagtcgtcggctgtacatcgaaaacgggtgagccttatgtgtgtacgtgataccgcaataaacctgacttgtaaaagcaaa

SEQ ID NO: 92409 - DNA, 1318 bp, Homo Sapiens
attagctaggtacgaggcctgggtggcgaattcggcacgaggcagtgatgtggtcaccagcctcgatgtggccgtggaggggcttaacgggcagctgcccaaccttgacctgctcaatctcttccagaccttctgccagaaagggggcctgttgtgcacgcttcagggcaagctgcagcccgaggactggacatcattggatggaccgctgcagggcctgcagacactgctgctcatggttctgcggcaggcctccggccgcccccacggctcccatggcctcttcctgcgctaccgtgtggaggccctaaccctgcgtggcatcaatagcttccgccagtacaagtatgacctggtggcagtgggcaaggctttggagggcatgttccgcaagctcaaccacctcctggagcgcctgcaccagtccttcttcctctacttgctccccggcctctcccgcttcgtctccatcggcctctacatgcccgctgtcggcttcttgctcctggtccttggtctcaaggctctggaactgtggatgcagctgcatgaggctggaatgggccttgaggagcccgggggtgcccctggccccagtgtaccccttcccccatcacagggtgtggggctggcctcgctcgtggcacctctgctgatctcacaggccatgggactggccctctatgtcctgccagtgctgggccaacacgttgccacccagcacttcccagtggcagaggctgaggctgtggtgctgacactgctggcgatttatgcagctggcctggccctgccccacaatacccaccgggtggtaagcacacaggccccagacaggggctggatggcactgaagctggtagccctgatctacctagcactgcagctgggctgcatcgccctcaccaacttctcactgggcttcctgctggccaccaccatggtgcccactgctgcgcttgccaagcctcatgggccccggaccctctatgctgccctgctggtgctgaccagcccggcagccacgctccttggcagcctgttcctgtggcgggagctgcaggaggcgccactgtcactggccgagggctggcagctcttcctggcagcgctagcccagggtgtgctggagcaccacacctacggcgccctgctcttcccactgctgtccctgggcctctacccctgctggctgcttttctggaatgtgctcttctggaagtgagatctgcctgtccgggctgggacagagactccccaaggaccccattctgcctccttctggggaaataaatgagtgtctgtttcagcaaaaaaa

SEQ ID NO: 92410 - DNA, 1574 bp, Homo Sapiens
ggaccggtccggattcccgggatcgcgagcgtctctgggaccggaagtgcgggcgagcgcgggtccccgggtctgacaggagcagcctgtgggcaccgcggcggtagttggaggcgggagagggtccgtagccgcgccgccctgccccgccatgggcctcctgtcggacccggttcgccggcgcgcgctcgcccgcctagtgctgcgcctcaacgcgccgttgtgcgtgctgagctacgtggcgggcatcgcctggttcttggcgctggttttcccgccgctgacccagcgcacttacatgtcggagaacgccatgggctccaccatggtggaggagcagtttgcgggcggagaccgtgcccgggcttttgcccgggacttcgccgcccaccgcaagaagtcgggggctctgccagtggcctggcttgaacggacgatgcggtcagtagggctggaggtctacacgcagagtttctcccggaaactgcccttcccagatgagacccacgagcgctatatggtgtcgggcaccaacgtgtacggcatcctgcgggccccgcgtgctgccagcaccgagtcgcttgtgctcaccgtgccctgtggctctgactctaccaacagccaggctgtggggctgctgctggcactggctgcccacttccgggggcagatttattgggccaaagatatcgtcttcctggtaacagaacatgaccttctgggcactgaggcttggcttgaagcctaccacgatgtcaatgtcactggcatgcagtcgtctcccctgcagggccgagctggggccattcaggcagccgtggccctggagctgagcagtgatgtggtcaccagcctcgatgtggccgtggaggggcttaacgggcagctgcccaaccttgacctgctcaatctcttccagaccttctgccagaaagggggcctgttgtgcacgcttcagggcaagctgcagcccgaggactggacatcattggatggaccgctgcagggcctgcagacactgctgctcatggttctgcggcaggcctccggccgcccccacggctcccatggcctcttcctgcgctaccgtgtggaggccctaaccctgcgtggcatcaatagcttccgccagtacaagtatgacctggtggcagtgggcaaaggctttggagggcatgttccggcaagctcaaacacctcctggaacgcctgcacccagcccttcttcctctacttgctccccggcctctcccgcttcgtctccatcgggctctacatgcccgctgtcggtttttggtcctcgtggtccttggtcctcaaggctcttgggaactgtggattgcagttgcatgaggttggaatgggccttgaggatgcccgggggtgtggccctggcccagttgtaccccttcccccatcaacaggttgtgggggttggctcgctcgtggcacctctgttggtctcacaggcatgggatggcctttatgtctgccagtgcgggccacccgtgtgccccagatcccttggcaagtcgagctgggggctgcctggggcgatatgcggctgctgccaa

SEQ ID NO: 92411 - DNA, 496 bp, Homo Sapiens
aggtacatgcacagataggcacatataaatccacatttgcaagcaaaaagtggaacctgtaaagcagaatttctgaggaatctctaaaagactaatactatatggaatttgaagaggaaacccagagcagaagcacatagtgaagtactgccacaaagatgtgtgacgccactaaaggtgctctagacccacaagaaaggaaaactgggagcaggacaactatctggatattgactgcacatgccaatatctcagtcagactaacagaatcagagctttaggcagagaaatgaatggttggagagagaaggcaatgcccaggtgccctgctttgaaatgtcccgcccatccccaaattagtctgaaaatttcaaatgttgtataaattcccttcccatcaaaagtgtcccataaacagcagtggtagaagagactccccaaggaccccattctgcctccttctggggaaataaatgagtgtctgtttcagcaaaaa

SEQ ID NO: 92412 - DNA, 317 bp, Homo Sapiens
agtgcaaatttagactttagtttgggaaagagaacagtatacagtatcctttgtaagataaatcacaacaacaaaaattaagttttattgcacaaagtagataaatgagaaagtctttcttaaaaaatgcttctttaactgtaacagcaaaactaaatgcatattttatcaaccccttatttctaattgctgtattcatttccacccttaaactatttaagcatttcatctgctgaaagtccttatatacatggtagacggaatatttctccattaatgatagatcaaaatgaagatatttaaaaattaacaaaatc

SEQ ID NO: 92413 - DNA, 511 bp, Homo Sapiens
tttagccttccattgattgaatggaaggtattgttctagatacttgttgaggcacttcccatttaagatttacttactttccccaatatatccacagggttggattagtaacttggatttggagcatgtctggtgataaaaatgcagaatgtatatgctctcacttttcatctacgtacacatatgtaaacacacgtgtacactgtggtaaatttccaaactgcccaaaaatcttcactcctccccgtttccacatcctgtgcatacgactttgtagatcctcctatcaaggactgaagtttatttcccaccctttgaatctggcctagactgtggcttagcttgcactggccaaaagaatatagcagaagtaatggtacacagattcatagtccttcgttcaagagggcttgaacacttctgctttctctctaagaacctcagactctggggtgtgaacaagcccaagttaccctgttggagatgagagatcacactgaccacaggccat

SEQ ID NO: 92414 - DNA, 499 bp, Homo Sapiens
aataaacagcgtgatgttacagactgcagagttaaagaaaagcagacattgacagtttctgatgagcataaacagtaagtgcagtcacaggccaaacttcttgctaggaacagcaagactgggaagaggtcttaaatttagtgatactgttattattctatattctcaatatagtaacacatgcatcttgctgtgtcaaatgctttctgggccatcattaaaaggacattaaaaacgtttttcttctaatgaatgcagtataccacaggacttcaattcactgaatgacaaaatatagagaaataaacttgctacaattaatggggccaaaagggtggttcgaatttcttgataaagcttccaggtgaacatctgacgtgttagtagtcttcttttggtagtgccacattccccaaggtattaaaatgttatgctccaaaagggtatattcttttagattttattcaacccaattaggtctgaggactgaatcacactg

SEQ ID NO: 92415 - DNA, 336 bp, Homo Sapiens
atttggatttttcaaagacaacatctaatcatccccagagaaatttcagctgagaagacaggatgatgaagtgccctgggggccagagtccagacaagtattttggcacctccaaggactcgcagaacacagagaagaaaagagagaccctgttatctttccgcaggggtggccgttcaaactctcacagatggaagttaagatttcctttggtataagtggcagtttgactggctgcaaggagagcctcagtttgtttaatttggagtaaaattttatgagttaatctctagtgagggaaagcagcagtaaacacagaacatactggtcattaaa

SEQ ID NO: 92416 - DNA, 556 bp, Homo Sapiens
tctagtgaaaaactgaatatcccatgataaaaactagatacaagctatctgtgaaaatgctttgcaatgtgtggatttgtctcacaaagttaaacctgtgtttgattcaacgggttggaaacactttttttgtagaatctatgaagaaacatttctgagaccattgaagcctatagtaaaaaattgaatatcctgtgatataaatgagaaacaagttatctacgaaaatgtatattaatctcactgaatgcaacctgtgttttacttcaccaggttaaagatgctctgttggtaaaatctgtgaagggacatttctgagcacattgaggtctatagtgaaaaaacgaatatcctgctataaaaactagaaacaagctatgtgtgaaaatgctttgcaatgtgtggattcacctcacagatttaaacctttgttttgtttcaacaggttggaaacactctttttgtagttggacgaagggacatttttgagtcccttgaggcctatagtaatgaacagaatatcctgcaataaaaattagaaagaagttatctggga

SEQ ID NO: 92417 - DNA, 624 bp, Homo Sapiens
gggctcccagccatcccagtccttcacatccacacgcactccatggcccaggaggagctcagctgcccgcaggtatccattggctccagctatgtgcagcagtgtggcaccctgagcatctatccagtccaggtcctggcccgctgcgatcatgcagtggatgtccgcaatcatctgctgctcaggagccacccgcatctcgttgattttctcttgggtgatgccctggtatgccatgcaggtctcgatgacatccagggtgggttcatcctcgcagaggtcatatggcatgttcccatccgagttgacagcaagcaagtcggccccatactgaacgaggatcttcaccaggttgatgtggccgcaggtggctgcagcatggagaggtgtccacagctcgttgtccttggcgttcacattggcaccatgggagaggagcagcttcacaatttcctcaaagttgtcgatgcagcactggtgtagggctgtgagtccgtcctcattgcacaaatcagggctgaccttattcttcagaaagtagcgtacttcctcggcgtcgttcctcagcgaggcctccagcagggccacgctggcctcgaaggacactttcttgcggcggccgca

SEQ ID NO: 92418 - DNA, 502 bp, Homo Sapiens
aattacaagttccgcgacggcaatctcatcactattggccagaagggcttcggttgctttaagatgctcttccagccctccctggcaggcagcacccagccgggcctcccggagctcacagctgcctgcctgggccgctgccaggacacgggcttcaaggaggagatggccgccaacgtgctactgtgtggcggctgcactatgctggatggcttccccgagcgcttccagagggagctgagcctcctttgccccggggacagccctgcagtggctgccgctcctgagaggaagacctccgtgtggaccggcggttccatcctggcctccctgcaggccttccaacagctctgggtcagcaagaaagagtttgaggagcggggcagcgtggccatctacagcaagtgctgagcctcggcatttccacagacaaggcctccagcacagggacgacaggcctctctatacacatttacagaatttcacataaaggtttactctg

SEQ ID NO: 92419 - DNA, 548 bp, Homo Sapiens
gtgggacactactcttcgttcccgacgtcgggcgagcgtgaggagagaaccttgcagcgggaggccttccgcaaagctgtctcctccaagagcctccgccacttcctggaggtcttcatggagactcagatgtttcggggcttcatccaggagcgggagctgcgccggcaggatgccaaaggtctgtttgaggtccgagcccaagagtatctggaaacactccccagtggagagcacagcggtgtcaataagttcctgaagggactaggcaataaaatgaaatttctccacaagaaataactctcagcctcaagggaaaacttcctcctagtgcagccctatgctttaaaaacagttcctggtggcctttctgaaaggctgggtcccaggttgtcacggtgcggaactggaggccgcggtggcttctggccgaggctgggctcttccctggatgaggacctgggagccgcctgggaggacagccccagaaagggagcccgagaccaggcgtgtcgccgacatgcaaatgggttgttttggtggttggg

SEQ ID NO: 92420 - DNA, 864 bp, Homo Sapiens
  misc_feature (500)..(500): n is a, c, g, or t
  misc_feature (713)..(722): n is a, c, g, or t
  misc_feature (779)..(792): n is a, c, g, or t
tgcttcgggggccgcaccttggaggagatctggagggcggccaccccgacgctgaccaccttccccaccatccgcgtcggcagcgacgtgtggggcgagcgcagcctggcggcagcgcggcgcagggcgcgccaggtcctgcgagtgaacctggaacccatggtgaggctccgccgcttcccggtgccccgggcatgaggtgcggcctccagggcgcctcctgccggccccgaccttgggacaggccttccgcccggaggaatgaacaagtgtcagtcgagtgtttacagatccggccaggaccccggcccccaatgcactttacgcgcgaagaagttgccggatggttgtccctgtcccgggccgcggcgcggtcgtcttggacgctggggcaggtgtgccctctgctgcctcccgtacccggcctgcggagggaggggacagctggacccgagggaggccctttcttctgacaccgatgagacgtctccagaccttangggcagatccgttttctcactgttggactctacctcactggtctggaagtcctcccgagacattattttttcaaaaggaatttggtttccgtgcttggtgtaataaaagccagaaatttactttggttcttttatcctcccccccttttttctattttcccttggcccacccccttcttttggggggaaccagaaaagtttccgaaaacattnnnnnnnnnnttttgccccccttaaagtttgtgtgggccccccggggggaatattctcggaaaaagnnnnnnnnnnnnnntttttccccaaaaaatttttttaaccgggggaaatttcccacaaaagccttttttgtttcccggaggggaaa

SEQ ID NO: 92421 - DNA, 522 bp, Homo Sapiens
gcggccgcccctgtccgggtgcttgtcctgcgatggcaccacaaacccagtcagaggaaggccgccgggcaccacgtccaaccctgcagtcccttccgagccagccaggtccccactgccgggccacgggctggcgctcagtccctccctcgccaggtccactaggtcctgcagggcctggtgctccctctggctggccgaaggcgacgggcccctggagccacagcctgcagtgggggtgccgtggagagcgggtgaccttcgctcgctcagctctgagtgctcaggtggcaccagaggcggcacgggctcctgcataaggccctgggcaggccgctggggcacgagaggagggaccagcctggccgtgtagaagtcctccatggcccaggccccagtcagtgcgctgccctcccacagaaagctctgcttgcgttcaggtggaggaggacactggcccgctctgtcccacccttcctttaaaatcctgctggcaggaagtggtggcgtgctagacaattc

SEQ ID NO: 92422 - DNA, 408 bp, Homo Sapiens
tcttggcagccaatgaagccaacactttagctcagtcacgtgtcttttttccaactcaatgtcatatttgtatagatatacatgtattctttcatatatcacaagaagatatatcacaaagaacaatgctgttggaaaggagtcccagtttactctatagcttgggctctggatagtactacatgaggatcatctctacaagtggataaccatgacttgctttgaaagatctcaagaagagactatttcacattctcactggctaacccttaccagggccttgaagatgtcaggaaattattcttgctataatttatacttattgtctcttttcaccagtggatgcagaagataagttttagaactttatacctaaagacccctactggatcactctgtcctttcttg

SEQ ID NO: 92423 - DNA, 766 bp, Homo Sapiens
catcgttatccttgaggactatttcagactcatttattacttgctgagtgtttgtacagcttacacttggtaaacagaagtgatctcgaaaattttaagcaccgctattacttctctcagttgcacgacacttttgccagagacagaattccttaactagtggcaaatcccatttacttttgcagagaacaagactagaatcgaaaacaaccttctcatggaaaatctagtgcttagcctaggcagttttcaggcaatggtttatctaactttaacttcatgcttaacatcacaaagctggacaacagagaaacctccctgtgacataggctaacttaaacttacatcatcaaccattttcatctgtaaaatatactacagagcaacaacaaaaaccatcttaacactaaacaaataggaatgataggtggtcattgaggccatggaaaacttttatttccctgaggatattttatagtagcataatacaggtatccaggaaaaaaacctaccaaaaactgagtattaaaattgctctgaaattttctaagctttaatttagtactaatctatgtgtacacataaacgttaactgcaaaacagccttctattccagcagtggctctacgaggtagccactttggtttcttataatttacattttgttgcaaactctaataacggctcgaaacatagacaaatctttttccactgcgaaggaggtaagcactggattgaatactaggtcacttctactaggggactg

SEQ ID NO: 92424 - DNA, 528 bp, Homo Sapiens
cagtaagggctcttctgggtccctcgtttccaaaggcatgaaagttctgacctgaaaatgggggccggggagggtgatgtcacaaccatataacgcagctccttcagccgactcccacccgcaagaactgagacctgacggataaaagcagagaggagtcagagtgagcgctgcgtttgggaaactgcattccagggcagcaagactggtgccaagacggagtcgtggcaaaagcatccggaggtcttccttaatatatgtcagcagtggagtggtgtgcttaaggagagagagacttggaaaaatacagaccgagaacaaggccatgtggagatagaggcagagactgaagttgtaccaccaaaggcaaagaatatcaagtattatcagtaaccacaggaagctggaagaggccaggaaaggtttttcttagagaccttggaaggagcctgaccctggaacaccttgaattttagacttctgaccctcaaaattgtgaaagaataaatttctgttgttttaagcaaa

SEQ ID NO: 92425 - DNA, 857 bp, Homo Sapiens
cttgtgatcccagcaggtctagtggtgaaaaagatgagcagacatgtttgatgtgggcttatgaaaaagggcatgatgccattgtcacactcctgaagcattataagagaccacaagatgaattgccctgtaatgaatattctcagcctggaggagatggctcctatgtgtctgttccatcacccttggggaagattaaaagcatgacaaaagagaaggcagatattctcctcctaagagctggattgccttcacatttccatcttcagctctcagaaattgagttccatgagattattggctcaggttcttttgggaaagtatataaaggacgatccagaaataaaatagtggctataaaacgttatccgagccaatacctactgctccaagtcagatgtggatatgttttgccgagaggtgtccattctctgccagctcaatcatccctgcgtaattcagtttgtgggtgcttgcttgaatgatccaagccagtttgccattgtcactcaatacatatcagggggttctctgttctccctccttcatgagcagaagaggattcttgatttgcagtctgaattaattattgcagtagatgttgccaaaggcatggagtaccttcacaacctgacgcagccaattatacatcgtgacttgaacagggcttcctgaactatgtatgtgattgctagagctcaagcagccatctttgaacatgaggcagtgcatcagaaagagcagagcagcaagaaagaaggcatctcagttcctaacgaatgaagtcaccacatcagccatagaagcctgcctctaggactctgaaataaaaaagagaaataaactcttagtttaag

SEQ ID NO: 92426 - DNA, 708 bp, Homo Sapiens
ggggcccggcggccgcgctgtggggccgcccggcgctcgccacttccggcgcgttggggctgttggtcgggggcggccgcgcggtactagcgggcggctccagggcgggcgcgcgcaaggatgctctagggggcggcggcagtggccgtgtgggttgaggctgcgaggacagcgcgggcccccgggcctctcccctgagccggccgcctgggccgcgcggtcgaggcctgtcagcctccgcccgttcagcctcggggccggggccgccgccacctctgcccgcggaggccggggagcccctgcctgggcccgcagccttcccccgcgggggtcgggcccgggcgggggtcccgagcagctgccctcctcgccggcatccgagcctcatttcctgctttttcagtttccttggggaggggcgggtgggtctggatgaattgtctcggggtcccccgatgaggcgacccgggcggccctgccctttttagagggtcccctcggggcccggtggggaaggggttgtctttgcatgggtgggggacttcccgagtctgccgggaccatgacctgaactgtgcgagcgggacgtgtccgaagcccaagaaccagctcatctgagccgccccctccccggccagcatggtagctcatgtaagtggagtcatgaagtatttggcctgttgtgactgccttatttcacatggcaca

SEQ ID NO: 92427 - DNA, 393 bp, Homo Sapiens
  misc_feature (364)..(364): n is a, c, g, or t
tttgggaaaaagacttcgcaatcatttatgtaacaaaagattttcattcagagcatacatatatctaacaaaacatttgtatccagaactgttaaacacgaaggaccagatttaaaaacgggcagaagactggaactgaaacttcacaaaagatgcagaatggtcagtaagcacaggacaaaaacggtgccagtgacgctggtgccaaagcgggaaggaacgcattcttcagcctaaaagacctaacagtaggacacggacataaccactcccggccaaaaagaacacagagcaacacaacgtcttggctaacgaaaactcaaagcctcaattcactcagttccttcacagcgctcggaaacangaaagtctcgcggtatcggaaaatgcgcg

SEQ ID NO: 92428 - DNA, 1006 bp, Homo Sapiens
ccggtgcccttagccaccgagccgccgcccgtgctgcacctgcccgccatccagccgccgccgcccgtgctgcccgggcccttcttcatgccgtccgaccgctccaccgagcgctgcgagaccgtactggaaggcgagaccatctcgtgcttcgtggtgggaggcgagaagcgcctgtgtctgccgcagattctcaactcggtgctgcgcgacttctcgctgcagcagatcaacgcggtgtgcgacgagctccacatctactgctcgcgctgcacggccgaccagctggagatcctcaaagtcatgggcatcctgcccttctcggcgccctcgtgcgggctcatcaccaagacggacgccgagcgcctgtgcaacgcgctgctctacggcggcgcctacccgccgccctgcaagaaggagctggccgccagcctggctgctgggcctggagctcagcgagcgcagcgtccgcgtgtaccacgagtgcttcggcaagtgtaaagggctgctggtgcccgagctctacagcagcccgagcgccgcctgcatccagtgcctggactgcgcgcctcatgtacccgccgcacaagttcgtggtgcactcgcacaaggccctggagaaccggacctgccactggggcttcgactcggacaaactggctgggactacatcctgctgagccaggattacacgggcaaggaggagcaggcgcgcctcggccgctgcctggaccgacgtgaaggagaaattcgactatggcaacaagtacaagcggccgggtgccccgggtctcctctgagcctccggacctccataagaacccaaaacagatgacaccctcttcccagtccccacggcggccttcccgaaaaggacaagccgtccaagtaggctgaggaccttgggcgggctcttccaataagaagctgggctgtgtgcaccctcgtcagagcatctctgcttaccgaccctgttccccgcatgtcagcaatgaaaagactatcc

SEQ ID NO: 92429 - DNA, 708 bp, Homo Sapiens
ccattactttctatatttctttgtttctgtttcattactaagaagagcttccctctgtgccatttagttgaaattcaatagagagggtctacgactggcccattcgccaagccacaccatacaagtccaaggctgctgaggagattgtggattagctacttatagatcagctgtccaggcatggtccatttagctatgggacagatagggccctgtcctgtgatacggaataagggccttcaaggcatccttgagatgaataagtcaatgaatgaataaatatcaaagcaatctggacagggcaggcaataacagggatctctatcacatctgctttctctccatcagcaagcagcattttataagagcctgtctcccctggatctcccttacactcaacatgtaatctgaaaaatcctttctgtggcctgcatttctttgcaagactcagttcatttggaacattagtgttctgacagttgtttttgtttccttctttctagttatatatcaacctttcgaaatctaaacccaatggcgtatgtcagtacaaccaggcaggtttttggtaggacttcactatcaaggtggcattatgactcttgtaagccctaggaacttttactttcataagccccatcctcaattaaaaaaacattacgactatgttggtataaggacaaatataattcaaaatagacagaaaaa

SEQ ID NO: 92430 - DNA, 523 bp, Homo Sapiens
gaatgcacattcctcactaaatctctcaggcagctgctttagtcactgttactaacaccttgctctgtcatctctttgtacacatgtctaatttatcagtttcttgtagattgtcagcagcctgctgcctccgtaccgccacagtgctcacaactagccgggaggcaagactgcccaactgtcagtcctgacacagctctccctgaggagcagccacattccagctcccagtgcgcccctctccactgtctctccaagcctcctcacccctagtcttcatctcctgtggacgaacatctggggtggaagttttgtagccacacacaggatactgcccaagatccagcgggtgttttcttctcggttgttagatgtacaattggattaatgtccatcgttttggaagacgagagaaagttgagaagaacacgaagcacagaccctgatgtgataaaacattttgtggtttctctgagtcacagataaacttctgccatcaaatggctacagttcatttaaattt

SEQ ID NO: 92431 - DNA, 776 bp, Homo Sapiens
  misc_feature (738)..(738): n is a, c, g, or t
gggtttgcaacaagatgtgatgaatatgtcacccagttggatgagatgcagagacagttagcagctgcagaggatgagaagaagactctgaacactttgttacgaatggctatccagcaaaaactcgccctgacccagaggctggaggacttagagtttgaccatgagcagtcccgacgcagcaaaggcaaacttggaaagagcaagatcggcagccctaaagtaagtggggaggcatcagtcaccgtgcccaccatagacacttacctcctgcatagtcagggcccacagacacccaacattcgggtcagcagtggcactcagaggaaaaggtatgcatgcagcgatcttcatagtacggtgcagtggccagattttagttaactgcaaaaataaatgtgctcttgttgtggaggatggaggaggggaagcaaaagaaaaaatgggagctggcatataaatggtcttgctaatgtgggtctttccagatcaaaacctttttgataattgtgtttatgtagtcctttctaaccccctgcccaatccctcctcttgattaatcgtaatataattttcaagtgtctgttaatatttttgctactctttgtatgtgtaaatatgcctctcccttacctccaacctgagaattggtagataaaggtggatattaagaatgaagctgtgttctaactgggttttaattttaaaagcccttgtaccctttggaaatggtgctgntttatcagcttctctttaacgggggcaaggatatggat

SEQ ID NO: 92432 - DNA, 548 bp, Homo Sapiens
ctacagcaccaaagaaattcaaataggaaaaggagagttgagaattgggaatcaagaatcagccctgtttccatcttagccacaccaacttatatctttatgattttcaaagcttttgccatgtgattctgcccccacaaaggcatcggtatttcctaaatggtacctgtatatgcagcgttgttttctataccatccttattcaaaacttgcatgtggcacaaaatgggttggtggcaccaaggtatattttctgttgatttgatatgttctttgtcttaatcttagccaagaaaacaaacaggaccaacttcaaatccgaacttctgattctgatcaccaaagtcattgatcatgacatcaacaataggtacttgatcaatttttggtgtattgatttcaatgacagtcttttcatagcctcttctgggcgcacaaacatcatacagtgtgttggtaaaagggatattgtgatagggccactccccatcacttgatcccaggaagcgagtgttttgtccttaactcctggtgaaacaccaaccagg

SEQ ID NO: 92433 - DNA, 407 bp, Homo Sapiens
  misc_feature (62)..(95): n is a, c, g, or t
aggttcaacccagcagcccttggtggaggctgtgacctcaaccccaccaaatgcccaaagtnnnnnnnnnnnnnnnnnnnnnnnnnnnnnnnnnntcctgtcaccccaaatcacactgcacacagggtccctgaaatccacttttattcatgtaaaaaaatccccaaagaatagagaaaaaaatgtgactcctacttcccggagctccaagtctccagccagctctcccggggaagggaggagacgctgctagctcgagggtgtgggtgtcacagggagcaaagccctgaccaaggccctaacctaagactgagggcaggaaggaggggccccaggaggatgaagggagttagctgaggtacttgccccgggtttaaaaaaataaaatttctagataaaaagttaaa

SEQ ID NO: 92434 - DNA, 261 bp, Homo Sapiens
ctttaggaattgaattaacacactttggaattgtctgtgaaggggatgatgcaagctaaaatgtgaaatgcaaaaccctgccagggtagaatgttctatttcatgccagtgcccatagaagataaatacttttcatttatcttccccattcactctagacggtgaaggtcaaccctgtgctcaattccagagactttcctagggacatcgtgttgggcatggaggactaaggccagtgtgaagataagtcaccgattcttt

SEQ ID NO: 92435 - DNA, 1321 bp, Homo Sapiens
  misc_feature (1061)..(1061): n is a, c, g, or t
tgcggccgctgggctcaggctgtccgctctgggctccgcggcctcggccccgctgcactccacctccgccccctcggactccctcccctctgcttctactcctcctgctccagtgcggatcgtttcgcaactgcttgccactcgtcccgtgcctggctgtttttccatttcccggccccctcttcttgagtactttaccccctgcatttggggacagggactggaaaaggggcgggtggagcgtccagtggagaagaaggaagcgaggcccgcaggaggaggaggatcggcggactgtggggaggagaccccacgccaccctttctggtcatctcccctcccgccccgcccctgcgcacactccctcgcgggcgagctactttcggaccaggaaagtaagagcggccctgggtgacagcgccgcggggccagtcccggggttagccgcgcgtctgctcgcttctggtccgtcgcgctcccagccagggcacagccccggaccgaggatggcttcgaccacaacctgcaccaggttcacggacgagtatcagcttttcgaggagcttggaaagggggcattctcagtggtgagaagatgtatgaaaattcctactggacaagaatatgctgccaaaattatcaacaccaaaaagctttctgctagggatcatcagaaactagaaagagaagctagaatctgccgtcttttgaagcaccctaatattgtgcgacttcatgatagcatatcagaagagggctttcactacttggtgtttgatttagttactggaggtgaactgtttgaagacatagtggcaagagaatactacagtgaagctgatgccagtcattgtatacagcagattctagaaagtgttaatcattgtcacctaaatggcatagttcacagggacctgaagcctgagaatttgcttttagctagcaaatccaagggagcagctgtgaaattggcagactttggcttagccatagaagttcaaggggaccagcaggcgtggttaggttttgctggcacacctggatatctttctccagaagtnttacgtaaagatccttatggaaagccagtggatatgtgggcatgtggtgtcattctctatattctacttgtggggtatccacccttctgggatgaagaccaaacagactctatcagcagatcaaggctggagcttatgattttccatcaccagaattgggaccacggtgactcctggaagccaaagacctcatcaattaaaatgcttactatcaccctggcaaacgcaatcaacagcctcagagagcactgaagcaccca

SEQ ID NO: 92436 - DNA, 510 bp, Homo Sapiens
gaatgtaaggactgcggcaaggcatatagtcgtagctcatacatcattcaacatcaaagaattcatacaggtgacaaaccctacgaatgtaaggaatgtgggaaggcctttattcgtgtttcacaactgactcatcatcagcgaattcacacttgtgagaaaccctatgaatgcagggagtgtggaatggcctttattcgtagttcacaacttaccgaacatcagagaattcatcctggtatcaaaccttacgaatgtagagagtgtgggcaggcatttattcttggctcacaactcattgaacactacagaattcatactggttagaaagccttgagtgtaagggataaagataagcctttatgtggagttcacatctggctcagtactaggtaatttttaatgtagtgtaattaatgtcagaaaacacctgtcacttccatcatagaacatcagaaaactcacacccaaagaaaattaaataaatgtgggaattctttttgcctcaaa

SEQ ID NO: 92437 - DNA, 458 bp, Homo Sapiens
gtgggtgatgatgactgctatgaccgatggttatacggggcccatgactgcggaggctttgtggcatggctgaaactgagaagctggtgttacagagtactgaattcccgtagctgactgcatggtctcagacactgcttcatacacaggaggagcaggggcaagcacccggtgatggtgaggaaaagcatctgtgctgacagggatccgacgctgatgggctgcatacaccggtgactcctggtcatccaaacgccgcttcattctgtgctcatgctcagggatgcactacaaaaccgcaaagctgcttcggccgctcgtcactgcgtgtccctctcagcgtgagccgcgagctcagcagggaggccccgagaacggcgcggggcacaggcccgcagaagcggactgccagctacctctccactaacgaagcggtcacaggctccggtgcccagact

SEQ ID NO: 92438 - DNA, 485 bp, Homo Sapiens
  misc_feature (424)..(436): n is a, c, g, or t
ggaaaaccacaacaacaacaataactataatctttggtaaaaattcatctctttggggaaaaaatttgggaaagaatgggtaatccatatgtaatagatgcaaatcacttacctttacaaaacagctgatcttctggaatcagccttatgaagacatctgcactgtttttatttgttctgaccataaacttgctttctaaatgtcagtaaaagccttctaacttaatgaggatttggaaggcaatttccattttatggcctcaatctcagaagagatgtaaatttcatacctgaaccctaagtaaatatattttctccatttggcacacaaaaatgtgagagctcaatatgtagtatttgttcctgtattaacagaatgcaattcaaaacagcatattcagtaatgaacccttaatgctaagtnnnnnnnnnnnnntaatatagtgatctggggtcaattatgggaatccgtattgggagttgtt

SEQ ID NO: 92439 - DNA, 460 bp, Homo Sapiens
aagctggaaaacagtcccttacctctgagaagcgtctcctggcagatgaaaccctcaatcactctgtcgctaacaggacacgtccaaacccaggaggtcgccccagacccccatcctgctcagttcacacgccagtggtaactgaacactagcagaatgactggttcatctcagcttcttcactgaattttttatctgcttgatgaagaactcacccccgagggaagcaggacagcacagtgttgaaggacatgggttttggagccagacaaacctgaggccagcccctaactttgccaccttccagatgtatgacttcgagcctcactttcctcccctcatagcaccagctcctcagaaggtaaggattaaatacacccatgtgtgcaaagcacatggtaagagcttaacgaacaacaggaattctaataataagcaccggactcatccccgtaaaaaa

SEQ ID NO: 92440 - DNA, 348 bp, Homo Sapiens
ctctgggtggttctggcagtcacctgttctcatatgtctactggggccaagcccaggcttggctgtgagtgctcaggtgctgtggggggttcctctcagtggtgttgtatttccctctgagtcaggacccaacccaagccccttaattaggtgactgtgaagagctgccatcatgttcttctcgcaagagagctgtgcttcaggtatgaagtatttcagtgacgggtgaagtcagttttcttctgcccagctcttcttccttttttcttttccccgtgggagagcatcttaaccttggagctgaagatcaaaagcacagcgcaatgaacatatgtcctatcactacaa

SEQ ID NO: 92441 - DNA, 1177 bp, Homo Sapiens
gcggccgcgcctgagtacaagacgttgctcatcagcagcttgagccccgcgctgcccgccgagcacctcgaggaccggctcttccaccagttcaagcgcttcggcgagatcagcctccgcctgtcgcacacgcctgagctgggccgtgtggcctacgtgaatttccggcacccacaggacgcacgcgaggcccgccagcacgccctggcccggcagctgctgctctacgaccgcccgctcaaggtagagcccgtgtacctgcgtggcggcggcgggagcagtcggcgaagtagcagcagcagcgccgccgcttccacgcctcccccagggccgcccgcgcccgccgacccgctcggctacctcccgctacacggaggctaccagtacaagcagcgctcgctgtcccccgtcgctgccccgcccctgcgggagccccgtgcccgtcacgccgccgcagccttcgccctggatgccgctgctgccgccgccgtgggactgtcccgggagcgggccctggactactacgggctgtacgacgaccgtgggcgcccctatggctacccagctgtgtgtgaggaggacctgatgcccgaggatgaccagcgggccacgcgcaacctcttcattggtaacctggaccacagcgtatctgaggtggagctgcgaagggccttcgagaaatatggcatcatcgaggaggtggtcatcaagaggcctgcccgtggccagggcggtgcctatgccttcctcaagttccagaacctggacatggcccataggggctaaggtggccatgtcgggccgagtgattggtcgccaaccccattaaagataggctatggcaagggccaaccccaccactccgtctctgggtgggtggcctgggactaacacgtcactggcggtctgggccgagagtttgaccggcttgggagccatccggaaccattgatcacgtcaacagggagatagcttggctatattcagtacgacagcttggacgccagcccaggcgctgtgctaaatgagggtcaacctggggttggacaaacgcaggcccgtgatatgccaagcaaagaacgggacccaaagtacaagctaccatccgggattaacaggacacaatgataccggacagaaccgtacccatgggggcggaacacacctgtacaacaag

SEQ ID NO: 92442 - DNA, 999 bp, Homo Sapiens
caaactaaggctaggtacgaggcctgggttgtgaatcggcacgagggtgggcgcccctattggctacccagctgtgtgtgaggaggacctgatgcccgaggatgaccagcgggccacgcgcaacctcttcattggtaacctggaccacagcgtatctgaggtggagctgcgaagggccttcgagaaatatggcatcatcgaggaggtggtcatcaagaggcctgcccgtggccagggcggtgcctatgccttcctcaagttccagaacctggacatggcccatagggctaaggtggccatgtcgggccgagtgattggtcgcaaccccattaagataggctatggcaaggccaaccccaccactcgtctctgggtgggtggcctgggacctaacacgtcactggcggctctggcccgagagtttgaccgctttgggagcattcggaccattgatcacgtcaacaggagatagctttgcctatattcagtacgagagcttggacgcagcccaggccgcctgtgctaaaatgaggggttttcccttgggtggaccagaccgcaggctccgcgtggattttgccaaagcagaggagactcggtacccccagcagtaccagccctcgccactccctgtgcattatgagctgctcacagatggatacacccggcaccgcaacctggacgccgacctggtgcgggacaggacgcccccacaccttctgtactcagaccgagaccggacttttttggaaggggactggaccagccccagtaaaagctctgaccgccgaaacagccttgagggctacagtcgctcagtgcgcagccggagtggtgagcgttggggggcagatggagaccgtggtttgcccaagccctgggaagagaggcggaaacggagaagccagcaggagggccacaccgaagcctgcggctcgctcaccagcatgcaccggtgcagcaatgtccaggtgacccagactccgcgcagtctgtgag

SEQ ID NO: 92443 - DNA, 641 bp, Homo Sapiens
  misc_feature (105)..(105): n is a, c, g, or t
  misc_feature (145)..(156): n is a, c, g, or t
  misc_feature (179)..(179): n is a, c, g, or t
  misc_feature (181)..(181): n is a, c, g, or t
  misc_feature (207)..(207): n is a, c, g, or t
  misc_feature (295)..(295): n is a, c, g, or t
cccaagatctcatttggtgtttgcataaaagcccctaaaaaactctctttactcagcggggtctggcgtgatgaagggttgaaaggccttgacctgttactcttncggtgctgccaaccagcagagcagatcggggctcccatgnnnnnnnnnnnnaaaccattagacacaaaacaggngncctttccacctcctcacttgcaccanaccaatgtgaagggcaccagtgaactgaaacgcctcagccccccatctgtaccgttgatgtgggtaaaccctgtggtccacccacttnatccctcatcacgagatgacagcttgaccccaaactctggggcaggtctcatgtaccccaacctgggtcagcatgactgcagaagcatccagagcctccctgccccttccatgaagggcccacccaaagactgtgctggggacccagtgtgttgctgggtccccctttccagtgagctgtgactgctgagtactggaaggaggttgccagggtctctgctacctttgtctgcatccctcccttgctccctgctgggtggtccctcacccaggcctccaatgtggttggccctggggactcattacttctggtagctggctttctataaaaatgggtcaaacccaaa

SEQ ID NO: 92444 - DNA, 412 bp, Homo Sapiens
gcggccgccgtaaagcgcggttgcgcggcgtggccacgccccttcagtgcttgtgacgcaggcgccctgggctttttgggcgcgaaaaagaagcagtcctgggttgtacccggcgcagctgggagcggctgcttcctccggggtcgtatctccgcccggcatggggctgctggacctttgcgaggaagtgttcggcaccgccgacctttaccgggtgctgggcgtgcgacgcgaggcctccgaccgcgaggtccgacgaggctaccacaaggtgtccctgcaggtacacccggaccgggtgggtgaagggcgacaaggaggacgccacccgccgcttccaggtatgcagggtcccgccccgaagccgaccggctgcgcgggcctccccctagccttttggctaccgggcccc

SEQ ID NO: 92445 - DNA, 382 bp, Homo Sapiens
ttgccatacgattgcagtaaacaccaactattttttatttttcaggagaaaggcatgctcactgggctattttggaagatgatgccgctgaagaaagccttgccttgcacatgcaatagcatctcacgctttagctggcagcaaatcctactcaagccacctcccgtttagctgattcggcatcttcgaggtcccacatgcctagggaatgagtgaaaaagccctggagcccgtcggtttcacctcttctgcggtggggtcgtccgcagttgccctctctttcctcctaggcctggctcgacctccactttggagaagatgctccaggaacactgaagggcagggtcgtccccgaccttctatgaggattgcccagctcaag

SEQ ID NO: 92446 - DNA, 479 bp, Homo Sapiens
  misc_feature (75)..(75): n is a, c, g, or t
atgtttggttgtcccgtaatctatttaaccaatccctgtcactggaattaaggcgggattcacattctcactatnatatgatatgttgcagtgcccatctttgtaaaaatagcccttacataaccaacagcagcaaagcatgaacacataacaataattgtttctctttctcatctaagcaacactttaaattcacattatgtgcaatggcttaaagagtgaacaaagaaaatattactaaggagaagggggctgtagaagggatagagggcaagagtaggggcttgcatctccatcactgcagtaacccccagtgagggattagacatttcctgccatgtcaagtgttgtctgtaatcttccttgtttgcttgtctttttcaggaagtgaataagaagataacagtgtttcaaatgccgtgaaacatggcatcatgctctaacttcagtataccaataaaacaatcagcttgcaaaaa

SEQ ID NO: 92447 - DNA, 477 bp, Homo Sapiens
tacaaaaatcgtaccattccaagaaatctgcagtgtccactaaagcataaaatataacttttctgtgtttccaccttataaacaccctgcatactcttccacttgcctggaccgcccccacccttgtttctccagttcatttttcacgttttcaattgaagacactccttcctctatggaaactctcctgagcaacccaatcccaatgaacttctacagcacttgctgccagttctatgcatttggcagatcagatatagagtcttgtattgttagtgttttatatattattcattcaaaagctatttacaggccactcactgtgcgctacattgcctcaggtgctagagggaattacaaataaggataagtcaagatcccttcaaccaagaagttacagtacagtagggggggataaacaatagtgcacaaatgattataagtcaaagtaggaaataatgagtcccaaaagagatg

SEQ ID NO: 92448 - DNA, 418 bp, Homo Sapiens
  misc_feature (202)..(210): n is a, c, g, or t
tcaataagacaagtcttccatgagcatgttgggcaagtacagctggaatagaaaagatagacagtggattctttggcttcatccaagtgggctgaggattgaagtatttttccagtcatgttcttgaacacctactttcatggcatgctgacatttccagactactgaagatgtgatgattaactgatcctgcatttgatgnnnnnnnnngtttgcacattccaaaggagataggtttcaaatgactatatagggtacaatttccactgaagtgatttctcttaatcttaatccttaaccactctcattgctacagtaccttccaaaagtaagcatagttcataaagtcttcagactgccttttagcacattaacatactcttcacaatcccacaataaaagcaccttaagtgcaggg

SEQ ID NO: 92449 - DNA, 383 bp, Homo Sapiens
cactgcaaagtgaaaccaaatgatttatttgtgctaaatgaatggaaataatgtattcaaaatatacttctttgtacactgcacttgcttatactgggtgaaatgaacagccatcaatgctaatgtgctactttcctttaaaccttattttcttttctgccaagcaatacaatattttctggccattatgccaaaataatgcgataatgtccatttcaaatagtattttctaatggtattttgcacctttaaaatatttgttcaaactctattttaagagaacacaaatgaagtacgaaagggggaagccgcattgtttttgttacaatcacactgccttctgacagcagaaatcaaataacacattctaattagccattgaa

SEQ ID NO: 92450 - DNA, 759 bp, Homo Sapiens
tttaataatcagataaatccaagtgacgtacaaaatcctgtttagccaggtaataaggtcttttctccaaccccctaagaaatggccacgggttaaggacttatgactctgctctcacccccatgcccgaacacccacacatacattttccactgtcatctctatgcgaaacctgatgtacgacctccagaagccactgtcactgtcttcgcctgagcagtcacttttaattcttataccaggaataagtaaagtagggtgtgggggcagggtggaatgccaaagagatgaaccaattatcctaaaagatccaatgccattttacattagcctactctgaaatcaaggaatgtacgagacatgccagctagaaatgccaaagagagctccaaagtgttttgcactgatttaccaagttagtagaaatgcaattatttgtaattacggtatcaatgttatctgaaacccattaacacctttctctgtgaactgcacatattaatctgtgactatatacagcagaatagaaccatcttactggtgtgaggataaattcaacttgctgaaaattcagtacttatttatttcaaaagaatcaatttcaattctagatttccttaagcttcctgattacaaagtaattttaaaagctgaactcatagtttacttttagccttctgtttgtgctatgaaacaaaaatagattttactaaaggagatggccaaaatcattctaaaaaatgttttggggtacttcat

SEQ ID NO: 92451 - DNA, 401 bp, Homo Sapiens
ggtgaccccaggccccaggaaagggagcgaggacagcgctggttcccggctccccgcagcatcatggctttgcctctgaggcccctgacccggggcttggccagcgctgccaaaggaggccacggaggagcaggagctcgtacctggcgtctgctgaccttcgtgctggcgctgcccagcgtggccctctgcaccttcaactcctatctccactcgggccaccgcccgcgccccgagttccgtccctaccaacacctccgcatccgcaccaagccctacccctggggggacggcaaccacactctgttccacaatagccacgtgaaccctctgcccacgggctacgaacacccctgaggccccggacgcccccggacacaataaaggtgtgaagcttcaaa

SEQ ID NO: 92452 - DNA, 513 bp, Homo Sapiens
gcggccgcggagggacgatgcgcgagtacaaagtggtggtgctgggctcgggcggggtaggcaaatccgccctgaccgtgcagttcgtgaccggcaccttcatcgagaaatacgaccccaccatcgaggacttctaccgcaaggagatcgaggtggattcgtcgccgtcggtgctggagatcctggacacggcgggcaccgagcagttcgcgtccatgcgggacctgtacatcaagaacggccagggcttcatcctcgtctacagcctcgtcaaccagcagagcttccaggacatcaagcccatgcgggaccagatcatccgcgtgaagcggtgagcgagggcacacgggggcttggcggctgcaccccggagtcaccgtcccggggccggaactccccgcgcggggctccggggaaggggctttctggggggtggctccaagctggaggctttactattgtcattctgctcctcctcctcaatctcaaatttgagtgctttgtttcacaact

SEQ ID NO: 92453 - DNA, 570 bp, Homo Sapiens
tgcggccgcggagggacgatgcgcgagtacaaagtggtggtgctgggctcgggcggggtaggcaaatccgccctgaccgtgcagttcgtgaccggcaccttcatcgagaaatacgaccccaccatcgaggacttctaccgcaaggagatcgaggtggattcgtcgccgtcggtgctggagatcctggacacggcgggcaccgagcagttcgcgtccatgcgggacctgtacatcaagaacggccagggcttcatcctcgtctacagcctcgtcaaccagcagagcttccaggacatcaagcccatgcgggaccagatcatccgcgtgaagcggtatgagaaagtgccagtcatcttggttgggaacaaagtggacctggaaagtgagagagaagtatcgtccagcgaaggcagagcccttgctgaagagtggggctgcccctttatggaaacttccgctaagagtaaaacaatggtggacgaactctttgcagaaattgtgaggcagatgaactatgctgctcagcctgacaaagatgacccatgctgttctgcatgtaacatacaatag

SEQ ID NO: 92454 - DNA, 1093 bp, Homo Sapiens
  misc_feature (1007)..(1033): n is a, c, g, or t
tacaaatttcagatcttcgtagaaatattgaaagattaaaaccatctctacaattggtctcctggaatcaagaaggctggaagaccagcctgtgttccgtacctcctgtgggccattctcattcgttattagctttagcaaataacacatgtgtgaagcccaccttcatggaactgaaagagagattcatgaggctctacaagaaaaaggctcaccttcatcactatctacaagttgaagggatggaagaaagctgtttcacagaagctgtgtcatctttatcagcactcatacaggaatatgaccaactggacgccacaaaaaacatgcctgtgcaggatttacccagactaagcatagctatgtgaaaaagaaaccctcaaaaatactttcttaatttcacattgttttttctgacctttctgtttcaacatttttgtaatttggaaactccagttttttcatattatcgggaaatatttttgtctaaaagagtgatttctgtttaatcgcaatttgttggtaataccaatgtgtgaaattagtgaaatcttagtaccttaacttcaaacatttctcttcagaaaagttcccttttctaaaattgagataacatagttcttgaatattttgctgtatttatagcctcatatttaggcatttatgcactgatgtgtcttcaataaaaatcttgtacagatatattttataattatttataactttatattctgatattctatctaagttatcctgattctttaacaagtagttatcgggagtagaaagaacacaatataaaatatttccgtgtaatagccaccaacttttcaggcatagggtttatgacaacgtgttaaggagggtctgcttcttcctttagataacaacttgtttgcccaaaagaatcctaatttgtacacttaacatgtatttgtattaaactttttaaataattgctttcttatcaaaccaattgattttataataaatgtctatatttttcnnnnnnnnnnnnnnnnnnnnnnnnnnngaccgcgtatgcggccgcaagcttattccctttagttgagggttaattttagcttggcac

SEQ ID NO: 92455 - DNA, 382 bp, Homo Sapiens
  misc_feature (19)..(19): n is a, c, g, or t
  misc_feature (66)..(68): n is a, c, g, or t
aacacttttctaaacaganttcttttctgtccatcaaccggcctacctactttccgtccatccctnnnccccttcatccccccacccctgctctgtgccgggcactgtagctttaccagcgaacaggacacagcatggtccctgcccacgtggagccctcttcccatgaggaaggcaagcatgaaaggggaattccacgtggttagcagggagggtgagtaccaggaatcagtcacttcaaataggcaccagagcttcaaaggacatcacctccaaacagcatgctgggcagggcacgtcatcttgaaaaatgaaataaaggtcatgggaaaatgatattttaatttaacagaataaacaagtatgggttataattgcaaaa

SEQ ID NO: 92456 - DNA, 411 bp, Homo Sapiens
tttcccagatcctgtaggacgagtcttggttttggggtgtgtgagtgtggtgtgtgcgcgcgcgcctggagggaaggatcaggcaacttggcgagagaaggaaggaccgggcgctgcttataacccaccgaaaggcacgctttgcccgcgtgaaactgacaagaaacattgccgcagtggcttgacttcatcatctaagtatctatttacttggcccccacccacccactccttttcctctgccagtctctcccctacctccttgacgcctcccactctccctccctggctctggcagagggaggaagatgaaagagaaagccgctgccgctgtgatggacaccacattgatagatgctctgacagtggggagaggccgggaatctgggactgagaaaaaaaggaaaaggg

SEQ ID NO: 92457 - DNA, 746 bp, Homo Sapiens
cacttgttctggagggcccccgtaaatttcccaagtttaataaaccatcattctgttttggccatctattgcaaagggagggtttttaaaagcagagagactccagaatgggaatcccggagtctgaaagtaaaaacactccctcttcagttgttgcttctgtagtaaaatcaacaaattgcttacttatgactgttttcttccaagttgcttagaaagcttctactttttctaattgagaaattgagtcatttggagtcagagctgggattctaggaacacacacgaacctactgagaaccaaaaacaggaaggtgagtctttcctctctgaaaaaaaatctgcaaatcttccaaatatgattggtattcccataggcatgtaatgacattctgtccataaataccctttattctgtagcccagtcagactcagactcttagtggctactttccttccttactgtcttccatctttttattaagcagattggcttggctggtcatactctactgctggttttgcccgactctataaccaccgcctgtcccgtgtgagtgaaggcacatccttatggaaattgctactgttctttccagtgacaatctatttttcatggtggaagactagcatttggatgttttaggaatgactgaactaattctaaaaagaatgtttgagggaaaagttctctgcctgagatgaatgatttaaagaaataagatgggctgtagtctcagctactc

SEQ ID NO: 92458 - DNA, 457 bp, Homo Sapiens
  misc_feature (346)..(346): n is a, c, g, or t
  misc_feature (354)..(407): n is a, c, g, or t
tttaacagccttgagatgagatcacacaaacactcaaatgtagcttctaggggaggggagaacccaggaggctgggctttctcttctcttctcaccactggaagggaggagtaaccagaaggagcggaagctaaaacacgctgtccagagaggggagctgtggtcagtgggacgtcagtgagtcagtcatagggtttgtcctgatggtggtggtggcaggtggtaagggttggggggaaaaatgaagaattagaggaaacccccaacaccagcaggcaggctgtactgtgactggactctccctcaacatcccccactctgctcaaagctgagggacagaggtggnatagtgcnnnnnnnnnnnnnnnnnnnnnnnnnnnnnnnnnnnnnnnnnnnnnnnnnnnnnncaactgggtaaagaaacaaggccattttctgttttctttttccaggggac

SEQ ID NO: 92459 - DNA, 324 bp, Homo Sapiens
cccttatatagtttggatactgctgtggcctgaatgtttgtgtcccccaaaaattcgtatattgaactctcatccctaaggtcaacagtttagggaagcgattaggtcctgaggactctgccctcttgcatagaattagtgctcttataaaagatgcccgagggagctcttttgcccctcctgccatgtgaggacacagctagaagctaccatctgtgaaccaggaagcccccctcaccagacactgaatctgctggagccaccatcttggacttcccagcctccagagctgtgagaaataaatgcctgttgtttaagctaaaa

SEQ ID NO: 92460 - DNA, 469 bp, Homo Sapiens
ccactgagtggacttgatgaaagcatctcacggaagaaagagctagtgattgtgcatcaaccacttgcaatgtcatttcacggctgcacctgtcaggcaagacacttccccactctgatctcacccctttctctcacctccccaatcctggatgggaccaagccaacagctatggagtgggggtagggccaagacagaataagagaagacactggccatgtcaccccccaactatatgtgttccagactaaggcttgcccaggctgaaggagggaaggtgctttaaactggggaggacattggagttttaatacttggtcagaaagactctcaattactgaaatgagactcttattgttgtgaaaagggaacaggaaagcgatagggcttgctcaggacaagaaataacttatctaggaggaggacttcaaagggcagtgggaaaataaacctgtattctgcttacaaa

SEQ ID NO: 92461 - DNA, 532 bp, Homo Sapiens
tttataattacacacaaatttatggtaaaagaattaatatgctgtctggtgctgctgttattgactacagtgttgtacagaatttatcatggattattgactgctgagaaagggacagtggaatttagccataccaaggactatactggaaacagacttctgctgctgaatgtgccctgatgtgaccaggttgcacttggaagagatcctcgcgtcttcatgaggcacttaaagcttataaaagaactgcggctggaactcatctggtgctccccatgagagtgctctgcttgtagactggccagtgtccatgaaacaattgctttctgttttgaaacagttcagtcccctcttgttcagatgactaaatttacaggaagctgcaagtaaactaagttgctgtcattcatcctttttcactttactgccaggaaacttgctaaaaagatgccgttacgcctgctctttttctggacattgtcccttagcgctcttcagcaagcatttatcactgtatctccactgcctggca

SEQ ID NO: 92462 - DNA, 784 bp, Homo Sapiens
ggcagataattatttaattagcagagactatgtgctagagaacatttatcatagttaatggatgacataaatttctatctacaaaatttctaagaaagcaactagtctgctgaaggttaatgtgtgtgcattttgtgaggggaggggaatgttcatcgttttcttttcttatccagtccagcttcacctcataagagagctttaccccgtaagagagctgttactgcgatccatacctatgtctgtcttggcctctcatccataaaataatcagatacatcactttttctcttccaatgaaaagaggaaagctatccatggcttcttctctggaagttccatgaaaagattgaattaaagatgaatagcaaggactatactggaaacagacttctgctgctgaatgtgccctgatgtgaccaggttgcacttggaagagatcctcgcgtcttcatgaggcacttaaagcttataaaagaactgcggctggaactcatctggtgctccccatgagagtgctctgcttgtagactggccagtgtccatgaaacaattgctttctgttttgaaacagttcagtcccctcttgttcagatgactaaatttacaggaagctgcaagtaaactaagttgctgtcattcatcctttttcactttactgccaggaaacttgctaaaaagatgccgttaggcctgctctttttctggacattgtcccttagcgctcttcagcaagcatttatcactgtatctccactgcctggcacactcccaggcccaggct

SEQ ID NO: 92463 - DNA, 529 bp, Homo Sapiens
  misc_feature (245)..(256): n is a, c, g, or t
  misc_feature (495)..(495): n is a, c, g, or t
actagaatggaaaaaattcacttttattacctcgaagatgccaaacagtgccattttattactgtgggaagctggaagtcatttccgaacccttttggcaagggtgctatgtagagcatccagttcagtcctttaagtgtcttctgagaaccaccacacagactgtgatttactgtcttcaggagttaaagggaccctttctaccctgaaacttgaaaagacagatggaggtaagttcctttatnnnnnnnnnnnngttgtaagtaaagccaggcagcagttgcagtaaattgagtcctttcagtcactgtatacatacagcagttctgcaataaggggaaaaatataatgggaggagcggctgtgaacgagtgacctcctcaagctgagtcctctctgtgaaccaggcattgagagccacggctcctgatttgcatggattatctccacttgaacagatacagagcagatacatttaaattgagctggcacaanggcaaaaagatggaagagtgcatgaatgagggac

SEQ ID NO: 92464 - DNA, 469 bp, Homo Sapiens
  misc_feature (62)..(62): n is a, c, g, or t
  misc_feature (88)..(88): n is a, c, g, or t
  misc_feature (153)..(153): n is a, c, g, or t
cgaaatggcccagcctgcggattccgagtccggtctgagcctgctgtgtaaaatcacccttncaatcgaggccctctttgggcccctnccggcagcctcgagttccttagcagccaaagcttcgctggggggcggcggaggcggcggcctctntgctgcctcaggtgccatctcttacgccgaggtcctgaagcaagggcccctgcctcctggagccgctcgccccttgggagaggtttctcgaggggcacaggaagccgagggaggtgatggagacggcgaagggtgctctggtcctccctcggcgcctgcgtcccaagcccgggccctaccgccgccaccctacaccaccttcccaggctcgaagcccaaattcgactgggttagcgctcccgacggccctgaacgccacttccgcttcaacggggctggcggaggcatcggggaaccgcgacggcgtgcggccgca

SEQ ID NO: 92465 - DNA, 501 bp, Homo Sapiens
tttataggttcaatatggtttatccagtagttattattaaacattttaaaaacaaattagagttaaacagcaatcactaagtgcctactaacaaaccatttcatgaaaatgatacttagcctcaagggcagctttcatatttgtatgacaaaggcagacggagaaaatggagctgaccttcacactcctgcgtccaccatcattagatatgtgaccactgagcaggcgtctgaaacttgaaggaggtggtactttttatctcagggaaattcccagaaaacggctcacacgtgacttctcaacactcatatttccaagagaagtaaaaatctggttggtgagacacagcacccagcacagtccatcccctgtgcattttggatcaacttcctttagtaagacatcccaactgggaacatcttctccaagattctatttggtttcctttcctggagaaatttacaacagaaaggttagagagaaaacatacagcccacgtac

SEQ ID NO: 92466 - DNA, 374 bp, Homo Sapiens
  misc_feature (186)..(211): n is a, c, g, or t
gactcccagtggatagtgagaagccactgcttccctgcaagaaccttcccaaatttctctaaccatgtgaagacatgcttgattcccctcaccttcaccatgatttttctgggagaataacaaaaagaaggaagattcagtaggaaaggaaagcaatgaagaagccaagaaagagacaaggaaccnnnnnnnnnnnnnnnnnnnnnnnnnnaatagaaacattaatttcaggtgaagaaactgaagactttagccagagccaagtggctaattcagagtttaatacacctttgacctcaaaccctttgtggtcacctttgaacagtgcctccctctctgaaataaaatactggttctgtcattaattattaaaa

SEQ ID NO: 92467 - DNA, 457 bp, Homo Sapiens
  misc_feature (243)..(350): n is a, c, g, or t
aaataaaagagtggtttaaacaagtttcaatttcaaagaaaatcttccttctgagccattaaaagtagagcttacaaggatgatatacattcattcatgagagaaatgacatggcatattggtttatggtacaaattctggcatgggactggctaggttcaaatccagagagcatgggtttatacaccagctcccagtgttctagctcagtaacctcaagcaagtcattgaaccatgttgcannnnnnnnnnnnnnnnnnnnnnnnnnnnnnnnnnnnnnnnnnnnnnnnnnnnnnnnnnnnnnnnnnnnnnnnnnnnnnnnnnnnnnnnnnnnnnnnnnnnnnnnnnnnagtatcacttattattcagcaaattgaatatctactatacatcaggcattttacaagtagtagggaacaaaaagttcaagccctcatggagttttaattccaaaatg

SEQ ID NO: 92468 - DNA, 508 bp, Homo Sapiens
tatgagcaagacagtgggcatgacagtgaaagtgaggatgcctgttttgattcttcacaacattttaccttagttactataggcatgcagaaattttttatacgcaagtcacctacttcttctaatgaacctgaaaatagagttctccctatgccaacaagtattgggattttccttgactgtgataaaggcaaagtaaatttctatgatatggatcagatgaaatgcctttatgaacgccaagtggactgttcacatacactgtatccagcatttgcattaatgggcagtggaggaattcagcttgaagaacccatcacagcaaaatatctggaataccaagaggacatgtagttgaaacatctgatgtgactcaggataaaaactgtaaacaaagcaatgccttagcgttaaccttcgtaactaattacatatcgctgagtgttctgtcaccccacttgtgtttgagtatgattcttcttgaaatacagaaaatctaaacagcaaa

SEQ ID NO: 92469 - DNA, 721 bp, Homo Sapiens
tacgctgagagagaatcggcgtgagtctccgccctcagagcctacgacaactctccagactccgccggagcaggcgcagggggcgtggccttggtggcaccacccccaacagagcctggtcagtgctgaagactgcgtcagtctggctctgccgccccgcccactgaagccgatagctggagcaaagctcggtcgggcgtcttccggggtcgtcacgtccggttgccaaggtgactggctcgctaaagcccaacccttatgatgcaatccaatggcaagtgatatttgctatcttttcttccggatcaaggaacaaatcgcaaaagaaagctctcccgacacctacgcaaaataaaatgtttccggggtcaatcataaattttctgcttctgtgctcgccgctagcgtacgtttttctctcccgtcagtgcattaaaagacatcggcgcgcttttttggagtcatgcacttctggcctgagaaaacttaaaacgcctgcctgtggccagcgattattgttgctgcttctctgaaggtttcccatttactcctctttcctgaagctttgcctctagacttacttaactctttcctccagcctacgttcatcgaaactatcacttattgtcatatagacctttatttctgaagggagatctgggagttgcatcagaacatccattgtattcattaaatcatttattcagctgtccattgcaaa

SEQ ID NO: 92470 - DNA, 902 bp, Homo Sapiens
gagagggtaaagaccagcatgcttggtgagggccttgctggggatgggagcctgggagggtctgcacaaccaaatgctgagatttaatatcactcagaaccatgcaaaccaaagggaatgaagggggaaagaatgccaagaaatgagtagtttcccacaggtgggagccatggagccccgtggtccttcccatggaaagtttcctcaacagcacaaggctgacccctctaagtcctcagagccgagcacccatgtgtctcctctggctgcagtcatccgatcgcaggggtgtcttcatctaaggtttgggaagtgctttatcttatagagcttcataaaatcaccactggctttcagggcccagagacctactgaagttcaaccaatcttgattgttttaaaataagttgtgtgaaccctcttcagttttgccaaaaagaagaaatggctgtttcaaaatgatgctttttcagtatttgcagggatttcaacatcgtcatagtcatcttcaggctcaatgtagcttgggatggaaacagtcttcttatttttaactttatttaccagtgagtatgtagcgggcggctgacttggggcttcctgtggggaagagtcttctagagaaggccaattcctcggtggcagaggcggtaattgaactggcgactcattaagaacattctcatacatcttttcttcatctacttgcttgtgtttcaggggcttggcaatttcccatttcttgcagacacagtacaggatgaggcccaggcccacagagacaacaatgatggccacagctaagatgatccagaaattattcctccaccagctcattgcagtggaatcctgaactgtgaaagtatccatatgtgagcagctaaggagacagcagtggctgg

SEQ ID NO: 92471 - DNA, 463 bp, Homo Sapiens
  misc_feature (442)..(442): n is a, c, g, or t
aactggggtcctagaaagaaggggacagaagaggctccaaaatacagttgggaaatgtggacattatggttcattgtaagtcaccgccattgcctgaggggaaggaagaaagttaacagcatccaccgtattgagggcattcccacatgctgtgttagggacagttagatactgctaggtgagtaacgggagataattgttcatcatcgtgagggaaaaatcaataaggaggatcacaagacatcctgctagaggtgtaataaaagtatcaggagatagaaaccattgtattgcagggggcacaccactgtcccctattctgagggttgtaataagtggtcatcacacagaatggagagtggaccttactagacattgtcacaagtgggaagaggtaacagacaccatgctggagtgaggtgattgtaaaagaggtaatgangagatctccagaaactgtttc

SEQ ID NO: 92472 - DNA, 387 bp, Homo Sapiens
cctggcaagggaacctccacagcccaagaatattaacatttatcaggtgccgggcatgggcctcatgtgttttatgtaattcaatcctcccaacaaaagtatgagagccagccctgcagcacagccttcaacatgagcaactcctgctctctgtagctccagccccagcctggacctatctttcagagccataatgttgagacagtccctgagtcttggatgaacacgtgaggagaagatgctgttctgagagctgctgataatacgtggatccaaacccacaggcttgagctgcttaattgaaattcacgtcaaaatgaaattctggtttagctcaacttgactactatggatgatgaaaataaatccctgggtcacacaagaaaa

SEQ ID NO: 92473 - DNA, 561 bp, Homo Sapiens
  misc_feature (25)..(25): n is a, c, g, or t
actggcaagggaccctcacagcccnaagaatattaacattatcaggtgccgggcatgggcctcatgtgttttatgtaattcaatcctcccaacaaaagtatgagagccagccctgcagcacagccttcaacatgagcaactcctgctctctgtagctccagccccagcctggacctatctttcagagccataatgctgagacagtccctgagtcttggatgaacacaggactcacagtgtctacaccggacagtttctgtttgcacgacgttgagtaaacttcacatccatcggggaagttaccctttgggattactgatgaaggtgaggagaagatgctgttctgagagctgctgataatacgaggatccaaacccacaggcttgagctgcttaattgaaattcacgtcaaaatgaaattctggtttagctcaacttgactactatggatgatgaaaataaatccctgggtcacacaaggatagtgattgagtagagcttgtttgctggcacaggaatgacatttcaactggaattaaattgtcgtcagaaaacagaaaa

SEQ ID NO: 92474 - DNA, 319 bp, Homo Sapiens
agccaggcctggctcagcccactgcgtggaaggtcaccggccactccccaaggagctgggatccccgggatgcaggcccacagtgcggggctgcacccatgatgcggagctggcctccaacacctgcgggccgcgccaggcaccaactcagtgtttgtcagtgtttgtttttccaagaaatggttcaaattgctgctcagatttttaaatttactgtagctgccagtgtacacgtgtggaccccattttatttttacaccaatttggtgaaaatgctgctttcctcagcctccccacaattaaactgcacatggtctct

SEQ ID NO: 92475 - DNA, 975 bp, Homo Sapiens
  misc_feature (876)..(910): n is a, c, g, or t
tatataggacacacgctggatcaagggaaaatttccaaatacacttcattcgaagtatcagagccttaaaattttgcaaattggtaaacccagcaattcaaagaatttaaggaaacagtcatggatgtacatggattcagtgaagtgctgttaataactgtgaacagatggtaaatagtcaaatatccaatagaagattaaaatgaatttatgattgagtcatacacagaataataaaccataaaatgatgcagaagactatgcatgacctggaaaagatgttcccaatatattgttaagtgaaaaaagcaggttacaaaatggtatgcacatatgagcccatttttataaaaatatacatatttagcaaagtaaaaggacaaatgatatttatcaaaatattaacattggttctttcaacatagtaggatgactgttgattttgcttaactactcccccattttttcctatttgaatttactacaatgaagtttgttttttaaatggagagtaggagatgaggacattattaacctctgattagcccacatatactcctaaaggctccttctggcaaagtaaatgtttctgttcagcctatatctgggaaattgcttctaccttataaatttgagtgtccttcaaagatgatattcactccaacttccttttaggcaaactatacaatagcaatttttgatattaaaaacttaaaaaagaaatccctcaagttaattaacaccaaaagaatagatgagaaaatacaatcctcacttttcaaaaagaaacatccaagtacatactactaaattatacaaagttaccccggccgtaatggccgaattcccgggcatatgtccggtaccgtcgactgnnnnnnnnnnnnnnnnnnnnnnnnnnnnnnnnnnncggccgcttcctcgctcactacttcgctgcgctcgtcgttcgctatagcgcgtagcgcctatata

SEQ ID NO: 92476 - DNA, 560 bp, Homo Sapiens
tttcgctgtatctgcttatgttactgttgtcactgtacaaaggtcctgccgtggcatggggcttgcagctatgatactgcgcattgagtgtattgactgttatgtgaatcaaatgcagcaggatcttgctgatatcacagtctcggtatggatacttgtaaaggatgacaagcaaggccttcaaccacatctgccggatgtgaggctttagggaccagagggagcaacgaggcggctgttggaaataatgccggagttgaggacaagagcagtatttgagcacctgaaccactaaggggagaaggtgttttcccaagttaatgttatagtccataacttgggcaattcctgcaatgaatgcattaaagcaagttgacaggcgcattttttgagggtgcaatcatgaagcaaccttcctgctggtcatagccgagtaagacgtacaggtgtcgcttgaccgtgttgaaagcctttgcactgctgatgtctgactcagcgctgctttcatccttggccatgaacttcatgagcactgtaatcagctggtgaactgtctggtg

SEQ ID NO: 92477 - DNA, 626 bp, Homo Sapiens
ctcagtcccaggattaagttactaatcacttgatgttgtcttaattgaaaggcagattacccagtttaggcccttgaagataatgcttggacaattacctcctaaattattttcttgccagtaatttatcttttccccagcaccacggccaaatcacagctctgagtggggaaccacatttgaacagactagtcccttctgccttctgggcaggtcacatctgaaagattatcctctttgaatcagtttgaatgttctagtgaccaggccacacagtttctcttgacatttaaaaataaagcttccagtcttgtcactaatggatttggggtccagtacccttaaaatcacctcagagctgcctgaatccatagactacttgcagaatcactggttttacttggatcaagccatctgagaagatttttatatacctcaacatattaaaggtatgaaaagatcatgcagaaaaaaacctgttcagcttcatctcacatagtatttctgccacttatttcaccacagatactttgttaatatcttggaactcttgtttttagaaaaaagcattggaaatggaggagactgtcaaggacaataataaatgatggtactgtaaacaaaaa

SEQ ID NO: 92478 - DNA, 421 bp, Homo Sapiens
taaggagactttaccactctgagattgtaaatctgtaaaatagagatgtaggattagcccatacggtagttgtggtaaatactgtgagacaataaggggcctgggacacagcattcaaatgggaataatgaaggtcaagactgtgattcctgtatctttgacgctctcggtataagcaccgtcgtgggcacagggcagtggcctttatgcaggagtttaagagggaatgaaggaatgaatgggcaaactctggagttcccaagtattctctccaggagctgtttccattcttttcgtttccagcagattcaagaggcaattgttggaatgtaaaaagagcacgggacttggagtcaaatacttaagtctaccatcaagtagttgttaagaattaaacaacaatttttgtgtacccagaaaa

SEQ ID NO: 92479 - DNA, 401 bp, Homo Sapiens
gcccgttggtgtcggcacgtgcggtccgtaccggcccggggcccgcgcccgcgcccgggtggaagcgggccttggcgtagttgctcacgaactggtcctgcaggaaagagccggccatggcgtagcgggccccgggcacgatctgcgagcgcggcgagtcgttgggcgagggggtcaggcggtccatgtcacagccggtgtagatcctgcgggattgtttcagaaacccctaggaaaaagccgcgcacgcagtaatcatgaaagactggccttcacccgtgttctggaacccgaggtttgctgctggaagcctccaaagtacttagtgtctattgtttcccctgtgtgaaactttcactcccacctctactaatacaaacaagaattactactctgaaaaa

SEQ ID NO: 92480 - DNA, 1221 bp, Homo Sapiens
  misc_feature (157)..(166): n is a, c, g, or t
  misc_feature (1105)..(1105): n is a, c, g, or t
caggtgattatcctaattaatgtctatctaattaaattactgtcagcagctaaccaatggcaggagccgtttcatcggctgcacaagcagcaagatcaaaagtgagccttttctgattgctgcatagtgtcaattggccaatctcttctcccagggnnnnnnnnnngtaaatcaaacctttgagaagcatttgctggttgaagtgctttctgtctagtgagggggtctgtggatttctagtttatgataaataggactttaaaaaccaggacgggagggcgagtgttcaggttctagagctatgcagctggagcactgcctttctccttctatcatgctctccaagaaatttctcaatgtgagcagcagctacccacattcaggcggatccgagcttgtcttgcacgatcatcccattatctcgaccactgacaacctggagagaagttcacctttgaaaaaaattaccagggggatgacgaatcagtcagatacagacaattttcctgactccaaggactcaccaggggacgtccagagaagtaaactctctcctgtcttggacggggtctctgagcttcgtcacagtttcgatggctctgctgcagatcgctacctcctctctcagtccagccagccacagtctgcggccactgctcccagtgccatgttcccgtaccccggccagcacggaccggcgcaccccgccttctccatcggcagccctagccgctacatggcccaccacccggtcatcaccaacggagcctacaacagcctcctgtccaactcctcgccgcagggataccccacggccggctacccctacccacagcagtacggccactcctaccaaggagctccgttctaccagttctcctccacccagccggggctggtgcccggcaaagcacaggtgtacctgtgcaacaggcccctttggctgaaatttcaccggcaccaaacggagatgatcatcaccaaacagggaaggcgcatgtttcctttttttaagttttaacatttcctgggtctcgatccccacggctcattacaataattttttggggaatgtggatttttggggggatcccaaatcactggnaaggtttccagggaagcaaaatggggtttccttggcgggcaaaagccggacaccaaatggtgccaaggaaaatccggggccttatatgggcatcccgggaattccccccaaacact

SEQ ID NO: 92481 - DNA, 528 bp, Homo Sapiens
  misc_feature (21)..(21): n is a, c, g, or t
catcaagagtggaatgaaacntttgggcaagaaagacagcaagcttatattcctctaagtgttaccagtaatccattcactctttctaatagaagtcccaatcacacagcagtgcatgcccacctggctggaaatacacacctcggaggacagcctactctacttcaatacccatcatcagccaccctcagtagtgctgcaccagtggcccacctgttagcctctccgtgtacctcaagacctatgttacagcatccaacttataatatctcccatcccagtggcatagttcaccaagtcccagtgggcttaaatccccgtctgttaccatccccaaccattcatcagactcagtacaaaccaatcttcccaccacattcttacattgcagcatcacctgcatatactggatttccactgagtccaacaaaactcagccagtatccatatatgtgaaaaacagtatattggggaagctcaatgatacaaacatttgattaaaaataaaaacatggtatttaataaaaa

SEQ ID NO: 92482 - DNA, 451 bp, Homo Sapiens
ggatctggactttcatttttctggttaatcccaaggccagcaggcataggggttggttcaagactctggcatcgtagcatctagattcctgtcctgggtatcaccacttcctatctcagagatcttggccacggtactaactctccaagctccagtttcattatctgtaaaaggagttaattatgcttcccatttcatagttattcagaggattaaatcctcacaagaaatactagctcttgcgggacttcatgttgttttttgttctatgaactatggagaagacagatgatgacctgtggtaaaggaaggagaagcatgaggttcaacccaaagatgttgtcaaggtgaaatgtagacagggcctcttggcttgaaccgataaatacaatctatagttgtaaattttgaggccatccattaataaatcctccattcctcccaaaaaaaa

SEQ ID NO: 92483 - DNA, 457 bp, Homo Sapiens
tctcccctttgtaaacggttacctcccgaaaacccaggctctcctccaacagtggttttcaagcgaggcgatcttccccgggaggggatatttggcaaagtctgggggcatttttggttcactggggctgctacttgcatccactgggtagaggcgggggatgcagctacacaacctgcgaagcacgggacagcaccccccccaacccagacagaattagccggcccaaaacctcagtagtgcccaggctgagaaaccctgccttaaacaaacaacaaagaaaggccaagtcccataagtgggtcaccgcgccgagactggggtccacgggacaccccagccacgccaagccgggaagtccccgcctcctggagctgaacccgcccctctcccagaggtggagctgcggggggcgggaacaggcacggagaaaataaacaagactaaaaagtcaaaa

SEQ ID NO: 92484 - DNA, 869 bp, Homo Sapiens
  misc_feature (47)..(47): n is a, c, g, or t
  misc_feature (49)..(49): n is a, c, g, or t
  misc_feature (111)..(111): n is a, c, g, or t
gtgggtggtggactagcccttggccatcgccaggtctcacgtctgcngnatggaactggtccttctgtagggtactgtattgtctcaggcccagctcccaggccagcttgnccagctctgcaggggctcggggagtgctgtcgagggctgcacggccagccaggctgacatagagtcccgtgagcgtgaaggacagcttggcgtcctcaccaagctccagcagggcctctgagagctggcacactgcccggcacaaagtaggcctgtggctgtgactgagaagaagtggccgcgtcccggaggagcgtcagggctctgtcttggtgctctgtcatccctgagctctcaaagtagcgcatcacgtatgcctgggcctgctccatgagaagccggacagctcaaatagggcgtcggccttgctcaggctctggaccaggcggccccggggccgggctgtgaggaggagggtgcaacctcggagcagcttcttctggaaaaggccggccagcagcccccggagggagcagggctccgccggtgccggtccgcacgtgctgtgcaggaagccatcttgcgcttccagctcctcgaagccgtctaggatgagcagaacgcggtcaggtctcttcaagatgtggctgaaaacctcatcggccgccacgagtggctgtgggcccagggagaagagcagatcctgcaggccataggcatcccccggacggttcaagcaatggcaggggacagagaagacaaagtcgtactggggaagccggccacaagcccaggcccggctcactgccccagcccaatagctcttgccctgaccagctttgcccagcacagcaatcactcgtgtctcacgcggccgc

SEQ ID NO: 92485 - DNA, 441 bp, Homo Sapiens
tcaacgcaccgcgcgccaagggcaccagcgagtgaccgagagactcgggggagagggcgggaggaagagggacgccgctgagggccaaggggcgtgggcgtcttcctggcagccttcatccttatggccgtggcaggtaacctgcttgtcatcctctcagtggcctgcaaccgccacctgcagaccgtcaccaactatttcatcgtgaacctggccgtggccgacctgctgctgagcgccaccgtactgcccttctcggccaccatggaggttctgggcttctgggcctttggccgcgccttctgcgacgtatgggccgccgtggacgtgctgtgctgcacggcctccatcctcagcctctgcaccatctccgtggaccggtacgtgggcgtgcgccactcactcaagtacccagccatcatgaccgagccaaggcggccc

SEQ ID NO: 92486 - DNA, 463 bp, Homo Sapiens
atatatagtccaataattactgacttaataggtatggtaaaatagctgataataagtcagactctcaagagtttctgtaccttgattattgacaaattcattgttttacatcctactaaagaacatgtgtgtggggagggggtggggaactggttcacaacataatctgaaggagatcaaacatctgtaaggacaggtacccagtgatgataatatatctgaaaacacaagccatttttattctttatcccaattaacttgaggtactctgatgatgaagcactcgattgcactatgacctccttgagtgatgtgcagcttggttcctctctcactttttgtttctttttaatatgcaaatgtgagtgtgcgatcttcagtgtgtctgcataagctaacttaagatgaatttaagtacagttttctgaaatatttctattgaaataaattacttaaaattaaa

SEQ ID NO: 92487 - DNA, 457 bp, Homo Sapiens
ctcagatgttgagagaatgccaaggaagaagtacattggtgtgtggaggcttttaatccaggtggatgacactgataatggtgacattgccactaagaatgactagatacagaaaaagaaaaactacaaagagggccagctgaatttcaccaaggctggaaaaacccagcaacaggaattcggtgaccatggtgaggttttctgccaagatctgcaaagggggaaagaagtaaaacatattcagatagaactacgaaaatagaatacacactcaatgggctgaccaactgattcataacatctttattggagaatgaactttctttttctctccaggccccctgtaacccctgtctggtattttctacatgactgattcctctctagagccagaactatggaatcttaagagaatctgtatttctttaaaaagaataaatatcttatgacactcttt

SEQ ID NO: 92488 - DNA, 366 bp, Homo Sapiens
ttttaaagcagtctgcatctttctgaaacttctagtgagtctcaagtcatgacaacctgggtcagagtcagtacaaatgggacaaacctgggggagaagaaaggggaagatgtggccctagtagcttatggtagattctcggtcattgaatgctctgtccagcccaccattgtccttgggtgggagaggtgaataatgttggaaaagatagaagatattgctggcatcttctttgttattgtcccctacaaaatgcagtggatgctaccagacattttgagactcaatccttatggaaaagtaagaaccaaaagaactatttcttgcaaacaagtatctcccatttgactttatagccctcgtgcc

SEQ ID NO: 92489 - DNA, 317 bp, Homo Sapiens
tcaagtttcactgtctgaaatttttcaaagctgacccaagtcaacctggaaaatgtttaacaccctgggcttgaacacaagaaactctgtgatgaacagacattcaattacattttttaaaagtgagaagcatttttgtaaaatagcgactctggaaactaattggcagccgcaaaacttgtgagcaaaggccaaatcttgtggggaacttttactacagtaacacgactcaaagaaaatgtgaataaaaggcatctttgtttcccagtcaaattagctgattaagaaataaaacatcttaacatgtttttaaaaaa

SEQ ID NO: 92490 - DNA, 386 bp, Homo Sapiens
aattgatgttcattattatttgtgtaattgttttgcttgtgatccttggaattatcctagcaacaacattgtcatagcaaccatatcccaagagccatttatccttgagactcagaccacatctgcaaccaaatcagcatcctgtcatttcgtgaatgaatctcagacgctgtaacccggcatcgagtgctgaccttgtaatgtatgagttcacggaagaagcacaaccgaacgtcttgttcagtgacagcgccgtaagcacagtgggtgtgatgcgtgaccctgaatgacacactacagaatgtgagcagtgtgagacttctctcactggccttgaaataagaaaatattgaacattttaatattaaaaatatttcagtgttaaa

SEQ ID NO: 92491 - DNA, 487 bp, Homo Sapiens
tttaaaaatttcaaatatttaagcattaagcatgtctaaatatttttcttaaaatttgatacaaagaaatagctttctcacaattttcctactgtggaattacttgctattcaatctgaaatgccttctccagcctttcctgccatcatgtgtctatatctgatctgtccctcaaagcctgacgtaaatatcatgtccttcaataaagcatgaactgtcaccccctataactttacacatgagacgtaaagccaaggagaggtaaaattaaccactttctacctcatattttggttattttcatctctaagctgtagaactgtaagctctttgaaagcaagctctttgaatcatcttcctctcctccctccatccatctatgcagccagtacttaatagtgaaagtgacaattaacttggcacttcaagatcctctgaatgttgcatgcttttgtggattatcctgtataaaacacagatggaatac

SEQ ID NO: 92492 - DNA, 645 bp, Homo Sapiens
  misc_feature (38)..(38): n is a, c, g, or t
tcattgtcatctggtattgtgtgtgatctcatttctcnaagtaaaaggatgcaagtatgattccagaggtgctctcagattccccatacacccaaggggtaataaacgtgtacaagtacagtgttcatgatacgtgccttggtgggagtccgtggtgccacagggaaggggctcccactgcttctggtctccagggacagtgctgctggaaaggctagtgatgagcttcaccctggagctcctcccgggaccttgcaagcctctccatccagcatcttctctatcttagttgaatgccttctttctgaacatttgttttaagaattattttataaagtcaacaatactttgcttgaattctttcttaatttacgattttttattataaaaatgtatagtgatacaatgggacatgtgaagaatacagaaaagtaaccactttaatgcaataactgttatcataatattgtatttcgtggtagtcctttcctgtagatatttttaatgccatttaatgccattgtcaccttggatttatgagtgaaaagtgtttctaaaaatatagaaataatgtcagatcagagtctgatcttctatgtttgtatttaaatggattaaaagatccccggtggttccatgaaaaaa

SEQ ID NO: 92493 - DNA, 416 bp, Homo Sapiens
ttttaacctacacaaagaatgtgttaatgagcaaacattcacaggggaatcaaattatcccaataaaattcaaatcaatcaaatttaaaccaggaaaatttgacttagtagaaataaaactacgatggaaaattcagtggcagaagctaaaatttgacctaaataaattattgtcaataaattataagccatcattgtaaaattccaaatgcaaaagaattcatctccataaaatgattttgataaaatagaagatggaaaaaggtagaaattgtttaactgctctgtattgaacatttatcttggagtaaaaatgattgagtaagcattaattaagaaaatactttcttgataaaaattcagccattattggtgtttttaatgttgtagttataagcatggagtcaaaacaccct

SEQ ID NO: 92494 - DNA, 549 bp, Homo Sapiens
gcggccgcacacctgtggaagaggaatgaatagagggggtgtgtgaaccttctcgctgcagactaactggcgccaccgaccaaactcaagacatgcttgatcaacaacccaaaacaaaccaccaggtcagacaacacccgcccgcggccgggccaggcgccgagcaggcagctgcggccctcgggaagcccggagaggggacccactccggcgccctgcccgcgtccccctttgtgggtgacagactgcacgggaggacaccggggcagctcccatgcccacgagggtgccctccctcgggaactagggaaggcagaagagcccgctgaccaccagaaaaaacacggggacggcggggacaagggctgacccgtctccaccgagactgaacctcgagttctaaggctaagtacgggtttacttgctacttaggtggcagggagagaggggatttacttccttgggagtttgctctcagaaacgctgggggcaaagaacaccgcggtgcctggccccggaagccctcggggacgggcgtctctggtgacc

SEQ ID NO: 92495 - DNA, 1507 bp, Homo Sapiens
tcctgcccctcgccggtacctcagcaaggtgccactagaagcgccaggctggggccgcctctgagcgccccgcgggggccatggatggtgaaacagcagaggagcaggggggccctgtgcccccgccagttgcacccggcggacccggcttgggcggtgctccgggggggcggcgggagcccaagaagtacgcagtgaccgacgactaccagttgtccaagcaggtgctgggcctgggtgtgaacggcaaagtgctggagtgcttccatcggcgcactggacagaagtgtgccctgaagctcctgtatgacagccccaaggcccggcaggaggtagaccatcactggcaggcttctggcggcccccatattgtctgcatcctggatgtgtatgagaacatgcaccatggcaagcgctgtctcctcatcatcatggaatgcatggaaggtggtgagttgttcagcaggattcaggagcgtggcgaccaggctttcactaagagagaagctgcagagataatgcgggatattggcactgccatccagtttctgcacagccataacattgcccaccgagatgtcaagcctgaaaacctactctacacatctaaggagaaagacgcagtgcttaagctcaccgattttggctttgctaaggagaccacccaaaatgccctgcagacaccctgctatactccctattatgtggcccctgaggtcctgggtccagagaagtatgacaagtcatgtgacatgtggtccctgggtgtcatcatgtacatcctcctttgtggcttcccacccttctactccaacacgggccaggccatctccccggggatgaagaggaggattcgcctgggccagtacggcttccccaatcctgagtggtcagaagtctctgaggatgccaagcagctgatccgcctcctgttgaagacagaccccacagagaggctgaccatcactcagttcatgaaccacccctggatcaaccaatcgatggtagtgccacagaccccactccacacggcccgagtgctgcaggaggacaaagaccactgggacgaagtcaaggaggagatgaccagtgccttggccactatgcgggtagactacgaccaggtgaagatcaaggacctgaagacctctaacaaccggctcctcaacaagaggagaaaaaagcaggcaggcagctcctctgcctcacagggctgcaacaaccagtagctcatggggccttggaggagcctggcctctcagcctgcataacagactgaaatgtgctcaggccctggccaggagggcccagggtcattcttttaacaaaaggattattttgttgtgttttaatttgtcactcggaacttcaggatggaggaccctgaccctaaacctccttcaaatctctggcccaagctcaggccctaaagatgggcagggcctaaggggctgggagctgcctgctggcaaaccagcaccttttagctaagttggccccaagtgag

SEQ ID NO: 92496 - DNA, 503 bp, Homo Sapiens
acttcagagtgatcaccgcccggccacgcacagcctggaggagcccatgtcctattagggtatcggctttgcctccgattatctggcaaataaaccaatttaggagtccgccagggtctttctggccacctctccagggccctggctgggccagtcctgtcttcatttccatacagccagcatcctcagtgagatggagaaatgtcattatttaccaagaaaccaagatctgaaaatggcaattactcggcaggtcagcagaaagccccaggatacttctctccccgggattcagccagcagctcggagctggaagaccgagccagtgcccaccccacaggctcccaccccctgtgaactcacatcccattggtttacaaaaacgactatgtatccccccgacaaatacgtattcatgcctccaaatgttaagtctattgcacactttataaaacacaaactgaaaagtcacagtaaaatgcagatataaacatgaaaaaaaa

SEQ ID NO: 92497 - DNA, 474 bp, Homo Sapiens
tcaggtgggtggcaggccctttcctgcttgccctctgccctccctctctctggccctgcccagtctctgccaatctgtgtacctcccaggagccgggacactccctgagtcctctgggagcccttaagccacactgagaacacagaccctgggagaagcagccagcagtgaggaatcctggaaccccttcccagggagagccttcccatgacccccatgaagagatcagtgcaaacacaggtgtcagagcccttcatggagtcctggggtgaggagtccctgccggagctacccacagagcagtccctgacggagtactctgacctcgaggaggctccctcggcgcacactctctatgtgggccatctgaacccccagttctcagtgccggtgcttgcctgcctgctgcgagacaccctggagcggctggagatgccggtggcgcgggagcacattgaagtggtgaggcggccc

SEQ ID NO: 92498 - DNA, 447 bp, Homo Sapiens
aggccccttgctttcaggtctgataacttgctaggttattaaacctgaaacttgataacttctgtagatgttgaaattagaacggcctcactcacctgggctcacaaaattccagaaagtagttgacgtcctattactggtttaccgtgaaggctctatgtccagagtggacaggacaagtggaagagtggcacagggcgaggtgtggggggtggcgtggagctccttttcaggagtctctaagaaggtgggactccagcggcaatgccttgtccatgtgctaagccagccgagggcgcacgaagtgctgtgtggtgtccaagctgacttgggagggaccagtttggggccagccccccagcctcacttgtcatgtcccacctctgctggcatctgtgggcttaaagtgccttcactcccatccttttcaactatttcttgattaaa

SEQ ID NO: 92499 - DNA, 443 bp, Homo Sapiens
  misc_feature (294)..(389): n is a, c, g, or t
gtacaggaaaaggagcaatgtctaccattttctttctaaccttcgatttaactattgtaatgttgtaagcttaacagagacttacacttaggcttaatttcaagctcttcaatcatttttcccggttggtgattcaggtgtattctcatgtcttatgtaaacttatcatgagtgttgttgatttataatatatttctttatgtaagccatagccttgtcagtttgagttatatggaagacaaattgtagggaaaaagagcaacagattactcagaaaccttctgtgtgagctgnnnnnnnnnnnnnnnnnnnnnnnnnnnnnnnnnnnnnnnnnnnnnnnnnnnnnnnnnnnnnnnnnnnnnnnnnnnnnnnnnnnnnnnnnnnnnnnntgtgtcactgtactccaatctggacaacagtgagactatgtctgttttcaaaaa

SEQ ID NO: 92500 - DNA, 446 bp, Homo Sapiens
caggaatgccaagggcaggagaagatcgatgtcccagaacaagcaatcaggcagagatgaaattcaaccttcctgtgcctttctgttctattcaggccttcagtgggttgaatgaggcccaacccacattgaagaggaccatctgctttactcagtctcctggttgaagtgatgatctcatctggacatactcagaaatgctgtttaaccagctctctggaaatcctgtggcccagtcaagttgacacacaaaattaaccatcacactgcagagacacagtctatcccaatacctgtatttactgggtaacgtgcatctcagctcaccaggctggtttgattgacttggcccaaagctgccctttgagtgttgagccctagctgacccctttgatccttcacagccccatcattaaaacaaggaccctgaatcaagtgactgtaaa

SEQ ID NO: 92501 - DNA, 518 bp, Homo Sapiens
agtgggtgagaggggggttgtagaacgggttaatggcttgaacccagagggaggcttcctatcataggcacaatagttgtagaggcacttttctccatagttagcaccaagagcctgctcatggctacaagacgacagctcagaggaggggctgtgcagctcccgtttgatcttggttggaggtggggcatgaagcaccaggttatcagactgaaaatctgggacaaactgttcatcatcaggaacttgtgcttcagctaaccaagcctcttgaagttgactgagatcctgaaatagctcttcagaatcgtgagccagatctgtgtccaaaaacttcctctttctgtcaatcacaggccgccctctgcattcctcagatcgagatttccctgggaccataaaagggacttgctgatcataaaacccgtccatggtgctttcagcgtctctaataccactttgagaggtttcagcattgagtaatttctgggggaaaagggatcctcctgaggcggccc

SEQ ID NO: 92502 - DNA, 435 bp, Homo Sapiens
atgatagacaatattgggtttaattttcaagattgagaaagaggtctaaggaaacccttgttctcccaactcattagagatgacagggcggcttcctctactgtgaccttacatcaaccacagtggattttatcatgaagggctgctcacactggatcacgcaatcaggataaggggaaacaggacatttttcggttatcagactgaaaatctgggacaaactgttcatcatcaggaacttgtgcttcagctaaccaagcctcttgaagttgactgagatcctgaaatagctcttcagaatcgtgagccagatctgtgtccaaaaacttcctctttctgtcaatcacaggccgccctctgcattcctcagatcgagatttccctgggaccataaaagggacttgctgatcataaaaccaatagttgtctatcata

SEQ ID NO: 92503 - DNA, 363 bp, Homo Sapiens
gctgcatccaggggtaaatctggatactggctttctggtcctggggcgcagtcctgccctgctcagaactaaaatcctgagcgattgaggtctgtgtgttatgtcctaaggtgttttgtctgcagtttgagagcatgtctttctcctggtaaaaggaattagatccatagtcatacggcccccagctggaactgaacacgacattctcctgtggcgaataaaagggagtcgagtagatccggttctgggcaacggccgctccataggtcgagaaatgcctcactggatcataggcggtggaattgagggcgacgttggggaggacgtcctggcccccggcgaggtggcaggataaggaagggt

SEQ ID NO: 92504 - DNA, 424 bp, Homo Sapiens
agaggtatcatttgtagaaaaaatttgatttgggttaaatataggtttttaaaactataaatgttgtcttttttatatttttatgaaaaagcagtagaaaattacttttgaagaaaacaggctatttaaatattgaaatatatgtatgttgtgagtttaaggagcctgtaattgtcagttttacaaaaccatctgtgttcaatggttgtaaataaattctcaaaacatcatttcaaaggctgcctacagaatattatcacttgacagatagagttaataaattaccaatcaggcacattttataatgtttgtctctgtaaaggtaatattagcagttaaagaacacggatgagaaaagaatgtgttacataggttgcatcacttgcagttaaataaaactcacaatttgtgctcacaagcttaa

SEQ ID NO: 92505 - DNA, 480 bp, Homo Sapiens
aatgttatatgtgactcatagatgaaccataatgacactgtagaaaaatggtggttttcttcacttttccaccatccacatttcttactatccctttagcttatccttcagtgacttaggtttttgtttgatggcaatccttaccattttttaagcctaattttagctgaatttaaaaggaggggtgaagagggtgaatgagatagaaaaacaagacatgatttttctgggtactctccctctagtctccatccttaacaagagtcttgcttatgacattattcaaaaagccagatacaacatccattacaaagtgacacacatctttggatggctgtttttgaagtatttcataaatctttttatactctctggatggagaaggcctttttaaacatgatactaaagttggaaaccaagaaaaaaagttggatggatttgattacataaaaatacagacttccttatggcaagaagaaa

SEQ ID NO: 92506 - DNA, 402 bp, Homo Sapiens
cgtaaacaacaaaacgaagtttcgtcttgtatccccaaaatattagctgaagaaagttatctttataaacatgatattataatgcctcctttaccttttacttctaaagttcatgtccaaactattaatgccaagtagtcatcaactttatttttgcttaattatgtgtagtcatatgaagtctatttctagttgactgtaacatgggtattaatagtctttgctgctggtaatactgaaagaacctgctttatattggagtatcaagatctcaggttcattaagaccaaactgacttttcctttgtttttcatatatttttattctacctttcagtaaaactagagaagctaaaaaagagccatgacaatttattaatataaatgaattaaccatttaaaa

SEQ ID NO: 92507 - DNA, 831 bp, Homo Sapiens
  misc_feature (707)..(759): n is a, c, g, or t
ggaggggagccagccaggttgtagaaacagcatccctgactttgttctgctaactgtgcagagagaggtgatagtctccgcccaggccatgagggacctggaaatggctgatgacacggtggagctcggccacaccaggcccagctggccccacagcaaaccagagggtccaaggaagctgggtcctgcccaccaaggtcccagggatcctcctctgaggccccctctctcctttgggtttagtcaacggagagggagatggggagaggactgaaaggtctccccaaaggtacaagctgagagacctggatttgcaatcagacagctcacatggacccaagttggggttaacatgcagattgtgcaggggttccctgcggatgcacccctgtgtgccctgatgtggacctgctccttcctgcttcctgggctccagacagaaacaccgtacccctgcaccagcctctgcctcagctcttcacagtcagcacaccctccgcttcctgtcagggtgttctctgctgagtctggttatgggatccctttctgtgcagagccatgctcccgtgtcactgtgtgtcaccttcaagctgtccccgtgtgtatgcctgtgtgagaatatgtgtgtgtgggtttgccatcgaaggaaaacctttattttggctgctaacatttggaaacatttagagaacaaacaatatcttttnnnnnnnnnnnnnnnnnnnnnnnnnnnnnnnnnnnnnnnnnnnnnnnnnnnnnttcaactcctctaaatttgtcttaaattgaacttagaactaatctaataaaaatagtatgaagtttcaaaaa

SEQ ID NO: 92508 - DNA, 420 bp, Homo Sapiens
cgtggtctttgctgtgagaagtcggcgatccatgaatctccactacttacttgctgtgatccttattggtgcggctggagtttttgcttttatcgatgtgtgtcttcaaagaaaccacttcagaggcaagaaggccaaaaagcatatgctggttcctcctccaggaaaggaaaaaggaccccagcagggcaagggaccagaacccgccaagccaccagaacctggcaagccaccagggccagcaaagggaaagaaatgacttggaggaggctcctggtgtctgaaacggcagtgtattttacagcaatatgtttccactctcttccttgtcttctttctggaatggttttcttttccattttcattaccacctttgcttggaaaagaatggattaatggattctaaaagcctaaaaaaaa

SEQ ID NO: 92509 - DNA, 457 bp, Homo Sapiens
atgggatgaattgatttattcttcttctgaattgcttggcagtgcttcaagattgacgcatcagatttgcacaatgtgccactttaggagattatttcttccttccttcagccagacagaagactgcagtagggatatggttcctgtttgcctatttccatccacaactctgccagagacgaaagcagtgtttgaaacaattcaccaagatttccatctggaatcatcaagaatggaattgatcaaattccttaagaaatttacttaaagtcatgattttgacagcctagtgctacctggaaaagggacagcagcagcctggagcagttttctagctaacaagaattttgttagctatgtggccacctagtggctcttccatggatgtcgctgatgcattgtcaggtacacagacaattgcccactaataaagaagttattatctttcttggaaaaa

SEQ ID NO: 92510 - DNA, 450 bp, Homo Sapiens
tttaacctaggggctttgggccaaactgtgcagtcgaataatatgatttatgatgggggctttggaccatgtagtattagcttgacctctagagggactagagactaatggtcagccacaagggtagtcaattatgtctttgtgactgagcccccagttaaaattctggacttgaagactcaggaaagataccacggttggcagtgctctgtgtgtactgtcacacactgttactcagaaaagttagccctgtccatgattacactgggagaggacaactgggaacctttgttttgggaactttcctgaactctgttccatgagtatcttctattgactcattttaatatgtattctttcaccctaagaaaccataactgcaagtgtaagctttcagtgagatctgcgagccattttggtgaattataaaaaatgagagtgatcttaggg

SEQ ID NO: 92511 - DNA, 1019 bp, Homo Sapiens
  misc_feature (812)..(820): n is a, c, g, or t
  misc_feature (935)..(945): n is a, c, g, or t
ggggttgttggttgggggccttttggccggtgacggagactgcccaggtgtggtcaccatgttcctctccgcggtcttctttgccaagagcaagtcaaaaaacattctggtgagaatggtgagcgaagctgggacaggtttctgcttcaacaccaagagaaaccgactgcgggaaaaactgactcttttgcattatgatccagttgtgaaacaaagagtcctcttcgtggaaaagaaaaaaatacgctccctttaaacggtggattgaaaatgactttgatttataaagagaagactgagggcggggatactgattcagaaatcctgtagcgtgtaataaaagaagaggaaatggcatggaatcactgcctcctgtgatttgaaggccattgtgaaggaaaacaatgcagtgaaagaaagttcttcatattaggacagatatcattgcatcacatttatttatctttctgggtatttttatagcccttaataaaaaatatctcaactccgccccacctcacacccaataaatcaacccttgttcggccgccctcggcccctccaagaagctttctagaaccattcgttttggcgcgcggggcccggtaggtaaactgaacctgcggtcatacctggctccctaggaaaatccctggtccttgacccactgttttgccacctcccaccaataacaaaacccccggggggccacccaagcggttctgacaaaaccccagatggcgagtcttgaggggccattcctgggaacctcccaaaagggacccccaaggcgagtttttgacctttaactnnnnnnnnngttcccgtgccaccccctttgggagttacctggttgtaaatttcctttaatccatttccgtgccgaaaccggggaaaccccctcccaccccggcgctgggacgtaaccttgaaannnnnnnnnnngggaatctcagacacccttgtgtcccccctcccccaaccttatattttgccccacggggcggaatatacggggg

SEQ ID NO: 92512 - DNA, 389 bp, Homo Sapiens
atcatagaagacctttcttcctctcccgttttctttttctttcccttgtattttgtaagtgccacttataaacaagataccaggactcaggacgttgaaaatgccacttcagaaaatgtgtcggccatccatccctctgtccttttaatgagatgcatccgggactgcaggaaaccaagactgctgcgaaggcaggattgtcgttgggcaaccaagcatccttccagctgccccagaaagaatctcacaatgtcctgcaatccctggtcttctcaccacctcagggggcggtccttgaatccacccccatccttgttccaggctcacaagttaaatttaccaggagctgatattgcaaaatagattgctatttcgcaactgaaaaaaaa

SEQ ID NO: 92513 - DNA, 385 bp, Homo Sapiens
tttttaagtcattcaattatcaggaggaagaagccaagctaggacaagacctctgggcttctaccatccaggcactgctatttctcctacactcaaaatgcccgctcaggcagtgacagccacagaaatcacaaacacctatctgatgcttcttatgtgccaggcacgtgaccgggtcacacactgagccaacgtttgctgagcagtcatgagtgtcgggcactgggccgggggcatcaagaacacaaaagtgaccgtggcatctcccttgcccctgggagctggttttctagcgggagaccctgaacattgccatttaaacacagacaattccaaatcgtggtgacaggcaggaagaaaacacgggcgtatggttgtaaggatt

SEQ ID NO: 92514 - DNA, 488 bp, Homo Sapiens
gaaaaaaatatgggatatacatcaaatagtaagagaaggtactaggattattttcttctgtctattttctaaattttctacaataaattctaattttttaatgaagccgaaacccaagctcatgctgggattccattgtcaaacacattatctcacttaaatcctaaggccaacctcatgagatagccagggctgttcccttgactgccagcatttcatgaatgaggatgcagggactctggggacgcagtgcctcctgactcaaactagaaggaactgctatctgaaggagtctctcaggcaccatttccctgctgtacataaccagagagctttgtaaatataaaaaggaagcggggggggacaagaggaagaaaacaggaagtcctacttggcagcatctggaagtggacatcgcccccctcaccatcaggaaggtgagaggaacattcacacacaaacaagctcatccatctggcctgagcagc

SEQ ID NO: 92515 - DNA, 341 bp, Homo Sapiens
ctgttggaaataagtgattcatttatagagtgaagcctctatgacttcaaaaagatactcaacagtctctggcatttgaagaacaaaatattttctctgtaaatacaccttcatttccattctagttaggagcaatggcgcccaggacggcacacagaatggagaaaactggatagctggtaactcatttagctcttggcactctaaaaaacctcaaatacagccatccaagccagtaattctattgctgcgttatttctgtgtttaactgtgaaacttgcttcttgtctgtacccttgaaatggaataaaatttcatgagactccttgttaatgtaaaaa

SEQ ID NO: 92516 - DNA, 508 bp, Homo Sapiens
aaaccatgggctactcccaagaaattgttgaaaaggtcattaaggtgtatggaccatctactgaaccattattgctcttagaggaaattgaaaaagaaaataaaagattccaagaagacagagaattttcagctggtacagtgtatccagagaccaacaaaaccaaaaataaaggtgtttatagcagcacaaatgagcttacaactgattccactccaaagaaaacacagtcctttctagctcaccagatgtgctttttgatccaataaatggtctaaccccagatgaagaggcactttccaatgagagaatttgtcagaaaaggagattttctgattctgaagaaaggcatacgaagaaacagttttctttggaaaatgttcaggagggggagatcttacacgatgctaagacattggctggaaatgtaatagctgacctatctgattcttctgctgattctgaaaatttaagtccagatttaaaagaaactgcttgggtaatggaa

SEQ ID NO: 92517 - DNA, 441 bp, Homo Sapiens
tttgccatctgggtggacctaaggggctctaaggcaagaaggccttctgcattttggagaaccctgcggtcagatgctcagacaaagcagagttaggtgcttctagaatgcccagcgtcgccttaaaatcttccttcctgcctgcccttgggactgttgccacagagcagcaattggtccaaaggctgacaaacagaatagaaggaaaagcactcttcttaatcagcaaaatagatcattgtccctaaatagacaagaattggcaagtcactacttaaacttggttttaaaacttgtttgtagggcctttagacatgcctgctacctacagagaagtgggagggtatttgtcagtatccttgccaacatgaccaggggcccatcttcatgccaaagagccccatatgaccataaaatgttttcccaaggcctacagagctg

SEQ ID NO: 92518 - DNA, 435 bp, Homo Sapiens
ctcccaccaggcgtgagctggcagtccagaagcggccccagatgtggctatccaccgcccagtctgcttccctgcctcaaaccccagggagacagaaattacctaaaaatgcatatcattgccttatgccaagatgattcaaataagcctgagaaagagaggccagcgctaaatacagacttggcagaactacttcacccagtaaacatctaatcagcacctgcaggatcctcattttgcccttctgggcagagcaccacgaactttccctgagttattttctaccaacaatttagaatgaattgctcgtgaagtagaaatgaggggaaaagcaactaatggtggtagaacaaagtaatttttacaattaaaagaagtagctgccagatgacagaacaaagtagaggacgagaaaataaatcattttcagggaaa

SEQ ID NO: 92519 - DNA, 422 bp, Homo Sapiens
tttttctccagagtttttatttaaagtgggcaaagaaaatatgtcaaagaaactgtcatttcccagaaaagtcatttcccagaaaagtccatgacttctacatggattctaccaactgaaatgtctgcttaatagtgacgatggtgctattagcaggtgggtgagccagttcccaaggtacacgttcactatcaagagctaagcacacctgctaacaactcagtctcctacaaacctgatgtttctccagcaaaacaaattaaaattaaacctaatggtacttctggctgaggctccagaggtccccaggagggagggtgtttgcgtggagggggccttggttccacaaaatggtggcttatggacgcttttaaaacactaaagaaacccacatggtaaaaggctgggtgcggtggctcacg

SEQ ID NO: 92520 - DNA, 491 bp, Homo Sapiens
agatgcctgctgatgtgaatttatcccagaagcctcaggtcctgggtccagagaagcaggatggatcttgcgaggcatcagtgtcatttgaggacgtgaccgtggacttcagcagggaggagtggcagcaactggaccctgcccagagatgcctgtaccgggatgtgatgctggagctctatagccatctcttcgcagtggggtatcacattcccaacccagaggtcatcttcagaatgctaaaagaaaaggagccgcgtgtggaggaggctgaagtctcacatcagaggtgtcaaggattagctcagcttgcccccgctttccatctccaccatctatagtgagcctctccataattagtgccaaccattagtctcgttcatatttttacaccaggagtcaacaaactgtggccattggccaaatatggcctcccaactgtttttttaaaataaagttttattggaacacagccatgttcatttggaaaa

SEQ ID NO: 92521 - DNA, 701 bp, Homo Sapiens
agctggttagtgctaactggcaggggcaccagagtaaaatgggccttctggaaggctggaaagctggaggaagaggtgttttcctggaaagccagggattaattctgatttcttttccctctaaattagagtggggacttgctgaagttgagtttaagtgaaggtcaaaaagagaacaagttttgtaagaattccttaaatgcctgggtttgatgatcagtgcacattcctcaggaattattatagcaggtcaataagaacatagccagtaatgaacctttcagatccagcaaggactcacatttcatgcacagtttcaccagcagttgcatgacccctatcaaggaccccagcagccaagggaagtgactcaaatatgtggttcatctgctcttaccctgggcagccactctagtttttatacagttatgtatcttttgctaattaaaccaggaacctaatttaatatttttgctttgtgtgtaagatttcttcatgtccatctataatccatctgagatacaactggcataaagatgggttctgaaatgctgtagttcgtgtcagaagtagatccataagccaaattactatcatggtttgattttagaaatggtgtcaggaaaacaagaaatgaaatggtgaataaagaagtgtgagaggaaactccgcccacgcataagtggggaccgagctcgatt

SEQ ID NO: 92522 - DNA, 353 bp, Homo Sapiens
gcccagttgcgctcggtccccagcctggtgggaagcgtcagctcggccttctcctctgggctggtgtcagggaccagctcagccctgcgcaccatcacccgtgtgctggagacagtggagcagaggaccgtggagggcatccgctcagccatgcgctacctgaccagccacctcaccccacgccaggcccaggctgaccccaactatgattagagccctgcacagggacccccgaagggctggttcagtggcctccagagatccctgggaccctcacgccctgctcccttgcccattcttgctctggacggttcccccagcccatgcaataaatcaccagtgagcatttaaaa

SEQ ID NO: 92523 - DNA, 676 bp, Homo Sapiens
  misc_feature (14)..(14): n is a, c, g, or t
aaccacccagtttntgatcagtttgttgagaacttcaaggatacatcaacagaagccggggtgctgggcccactgtggtgcactgcagtgctggtgtgggtagaactggaaccttaattgcattggacagaatcctccagacagttagactccaaagactctgtggacatttatggagcagtgcacgacctaagacttcacagggttcacatggtccagactgagtgtcagtatgtctacctacatcagtgtgtaagagatgtcctcagagcaagaaagctacggagtgaacaagaaaaccccttgtttccaatctatgaaaatgtgaatccagagtatcacagagatccagtctattcaaggcattgagaatgtacctgaagagctcctggataaaaattattcactgtgtgatttgtttttaaaaacttgcttcatgccctacagaggtgccagctatttctgttgatactatgtataatttattaatctggagaatgtttaaaattttatataatttaaaggtaacagatattattgtacatagttgtattttgtagtttcttctgtaaatatgtatttttcataatgtttaatattaagctttatataatactatttttccacactaaagtgttcatgacttgttctacataaaactaattcaacctgtaaa

SEQ ID NO: 92524 - DNA, 265 bp, Homo Sapiens
tcctccctccctccccatccccaatcctgattcctgtttacaaagaatgttgaaaaacaaggaattatgtataacagttcccagtttgctcaggaaattctcagattataaagagacattacaaatgaacaagtgaagagaagaaccttggtggttccaacatagtatggccattgttttatactcaaaatatagaaagacaacctcagaataagaaaacttttggaatggaataaatcaagtttatcattaaaatgcaaagaaa

SEQ ID NO: 92525 - DNA, 1002 bp, Homo Sapiens
  misc_feature (197)..(252): n is a, c, g, or t
  misc_feature (662)..(662): n is a, c, g, or t
  misc_feature (716)..(716): n is a, c, g, or t
  misc_feature (728)..(728): n is a, c, g, or t
  misc_feature (742)..(742): n is a, c, g, or t
  misc_feature (774)..(774): n is a, c, g, or t
  misc_feature (780)..(780): n is a, c, g, or t
  misc_feature (783)..(783): n is a, c, g, or t
  misc_feature (786)..(787): n is a, c, g, or t
  misc_feature (817)..(817): n is a, c, g, or t
  misc_feature (830)..(830): n is a, c, g, or t
  misc_feature (903)..(903): n is a, c, g, or t
  misc_feature (921)..(921): n is a, c, g, or t
  misc_feature (935)..(935): n is a, c, g, or t
  misc_feature (938)..(938): n is a, c, g, or t
  misc_feature (980)..(980): n is a, c, g, or t
agttaaaatgctttacctcaatggttgagatattttgaatggatttttcaagggggggaaatgcttattataataataaaccaaaatacttaacagaaaattgtcagctattctgacaaaaataaacattttgagagactttatttcttttgtccgtttctgtggtatcactcattgtcgttaagtaagtaaagctnnnnnnnnnnnnnnnnnnnnnnnnnnnnnnnnnnnnnnnnnnnnnnnnnnnnnnnngcacagaagaataatgagagccacattttagttcaacttcttgtgttagctttgatcaaagtcaggacaataatcattgagaaggtgcatgtctaataaaataggtaaatttaataattgtgagacttcagtttttatctccaaggttgtatttagagtggagaaacccaacaactcattacagtttcgctaagatttgaaaggttaaaaaaatttatttccttatgatagatgccatacttttccatatggagtagtcaggaaccatgaaattttttgcattcagtttttttaataacatttgttttctcacagtatggatctagttcataatgattcagattccttttgctgaaacacaattagcattgcagggaagcttctgtactactgacatgacacttcatttnggcgttctaattttgtatcactacagtgatgatgtaaaaatgacatggccattnggatttgcctanaaatcccggcctangtccaaaagtatattttgcaagatgatttcantgctanttncannaacacgttgatgaagagaagaatgtatgangaggagtgggtanctcaagaatgatactgctctatagagttatctgtgactgttggtttttcatctgtggacctgagaacatacanagagcatttgagtctcancactcactatttantanagaatctgccactatgcacaagtagaacattctgacacaaanaggatttattctaatatacttt

SEQ ID NO: 92526 - DNA, 422 bp, Homo Sapiens
tccgagaaatcacgacaaggtatgaccaaccctgaggtgttcaatatcttaaaaccccaaaccacgatgaaccccgacagagccaagcaggccaagctgatcgtccccaacagcacggcgggcctgatcatcggcaagggaggcgccacggtgaaagccgtgatggaacagtcaggagcatgggtgcagctgtcccagaagccggagggcatcaacctgcaggagcgcgtggtgacggtcagcggcgagcccgagcaggtgcacaaggccgtgagcgccatcgtgcagaaggtacaagaagacccccagagcagcagctgcctcaacatcacctacgccaacgtggcaggccccgtggccaactccaaccccaccggctctccgtacgccagccccgcggatgtgctgccagccgcggccgc

SEQ ID NO: 92527 - DNA, 291 bp, Homo Sapiens
  misc_feature (110)..(118): n is a, c, g, or t
aaaaacaaacacacaaaaggtggtctttccccaaaaggcaggcagttgaagggaggaaatgtagttgctggagtggaaacagtaacattcagttaacaatggaatatttnnnnnnnnntagttttcttttcaaattgtaacttgtggtaaaacatagaaaaatgtactaaacgagcttgtataaaacagtaaaattttcaaataagcccagggaaaaagcacaatgctggaaagaatgcggtacaacgggagaggagaaaagatttcatacaaaactacctattacaatac

SEQ ID NO: 92528 - DNA, 715 bp, Homo Sapiens
gcataaggagacaccatcagcctgattgagagggtcatggtgagatggagcccgccaaggtggcagcgctgagctgacccgccacgggaccatagagtgggagcctttcctgcccccttaaccgcagctaacatcaaaagcactggtatgggctgtctaactggaacctgagttggtctttgtaattacgattcttctgggtttattttgccagctcattatccacccccctgaaatcaggccgcccaaatttagcaggtgctggggaggaccccagggagtggcgtatgggggctagctggtgaaactaccctttcctttctgttctatgagtgtgatggtgtttgagaaaatgtggggctatggttcaggcgcacttcacatgtgcaaagatggagaaagcactcacctacacgtttaggctcagaatattgattgaaacattttgaaagatcaaaaataaaatgttatttttaaagtttctctctgagattttgcttaagttttggtagatattcttaagttttagtgacctcagtttgggaattaagtaagctaaacattgtgtccttattattagttatataaaactatgctttagactttgttagaaacttctgcccccccttgactgactccttttccatttctggttgtacaaaatgaattcacactttaatgctatggccccctttaaataaagtacagcgtgact

SEQ ID NO: 92529 - DNA, 460 bp, Homo Sapiens
gacatgaattacgtgccacaaggatggtggccaagtgctgggttggtgaggtgccggcggaaggatgagaatccacatctcaacctgacagtatgattttctaaccatccttatacacacttccaaagtgctgaaaactttatttcctcataaaacacaaccattcatgagagattaaacttgcaggtgagaaaatacgcaggaaacacttatttctctatgaaaatatgagtctgaagaaagtcaagagactctacaaacatttctgcagccctctattggagatttgcaaaggtctgcatgtgcacccctttggatgtcaagggcttactgaataccatttccacacggtctatcgctatgtcaaagggcaactgctccaccatcatttctgatccacagacctgttagatgttagtctggagaaggagaaataaaactcaatgttgttaattgcaaa

SEQ ID NO: 92530 - DNA, 503 bp, Homo Sapiens
ttttttttcttatagatggggtcttactatgttgcctaggctgttctcgaactcctggcctcaagcaatcctcttcccttggcttcccaaatgttgggattagaggcgtgagccactgtgcctggtgtgaaatattctgtattatcaagaatggctctgttgttgacctactgtcttcactttgtacaggctattgggatctcggtgtcattccaaattcaataaaactcggaaaaatgaatcaaaaatccatcagtctcaaagatgatgcatcctaatttaatggaatgctacctgacaaaataactggtaaagctcaaggtgaaaccaccaccactcatcaaggccagattatcttaatcaatcctcttaatcaaagagtttatggcatgcaatcaaaatgattttgttgtcaggacctgcatgtttagctggtgctctagctgacttaaggctgccctgaaaggctctgcagtgaggtgaatgagaaaacccatctttct

SEQ ID NO: 92531 - DNA, 528 bp, Homo Sapiens
gggccgcctgcctttgcatcagagaccgcggctgtgccattgccaaggtgggcagcgccgcctcgcttccccattcctccgtctcccacgcctcttgcgtgtttgagtcgcgaagtgatggactttaaatctcagaggaggaatgagaaacttggttagtggctctcttggcatgttcgtagccctgtggttgaagtggctgaaacctgcgttgagcctcagtccaagcagctggggccacaccagtttgcaaaagcggatgtggcagtttccaccgcagcagcagcctgctggcgcctcatcagattctcctttggaggaagtatcttcttcccttcattctcggtgaatggcatccagagataaccaaaatcaggtgtatctagtttcaagttctgtcttgcaaccgtgataattggaggatgcaaactttacactttcttctctagctgtctaccaccactgctgcgcttgtggatgactgcaggaacaccgggtacttgccacaagtatctctccagattcatc

SEQ ID NO: 92532 - DNA, 427 bp, Homo Sapiens
gaaattttagcctctgacacctacagttacagcaaacaataaacacagactaacttctaggcaaataaacaaacaagagatggagcacattcaagtcacagcagtggccatgatagctagagtttcagaagccattctgtgacctggagcatggaaagaaagtgctaaggttggttgaactgaaggagagaagggggttgtgtccttcataaattcatggagccacacctgatcacctatgtctcagctttatgtaagaaaacaaacccctaatttgtaaagccactacagttagatttctgtttttaagcaaggaaacagtttacggcactcttctttttaaaattattcagtactcagcagccatttgaatgtttaatagaacaaggcattatactggcactaaagaactgtgaaaatgaaaaaa

SEQ ID NO: 92533 - DNA, 792 bp, Homo Sapiens
agaatgctagcatgccagtgtcccatcgttaacgggtggaggagaagagcaggcggaggaggagaacgatttctatgggattctcaaagtaaatgggcaattttcatgcacatggagaatctacttctgcagactgagttcaggccagacctgctctgtcaaagcccgacagagagacccgagatgccacagaaaatggctgaaacatttgggattctggaagggacaggcagagcgaatgagagctgtggaaatgataacccctccatgggtccagacttcactgtctaaaaggtcactctagacccccagctcagggtgatgcctgctgcctttgatcagagccctcctgtcattgactgtgactcagatctgccctctccactccatcctcaaccccaagagtcttcacaccaatctgcaccccagctccaagcacaaggcattacaagaaggtccagtggttcctactttagactacacaacaaaagaaatgaaaacccagcccaccgaggcttggcccctgtggggatttccttcccctgctccatcagccagacaaggcacctgcatcgtgggtccttcattccatgtgaatggaaaccccggtccctggcagaagtattcatgctttggttgcatttaaattgctgttctttgggccattttcatccccttcttttccagcctccagcctttcatttttggggctcccagccctccctctttaatgcacccttttgtgttgctgcaaattgccttcagttccatcaaagcagactgccagctttc

SEQ ID NO: 92534 - DNA, 567 bp, Homo Sapiens
ttagcaaaagatattacatttgcagttggtgtcaaaatataatctgtaaggataacttgggggaaattcctcaaaagtatacttctcaaatagtctcacagatgttttgaataatcttctagaaaccaaggtgaaaagaaatttatcacaagaatgtgaagctaaatttcctaatttaaaatcactacgaagtaagtttgagataccatccctactttcccctctattcagacgttttctgcaaaggagttcacagtgggtgtctgtttctctctaaaaaccctatctcacaccatgctaaatatatctatagatttggcaactagtccagctcatctcaggctgaattttggggattcattggggtttacagatgaaaaatgactgtagataccatctactcggcgctttattgaataggcacaagaaaactgaggcccacgggtgttaaatgatttttcatggctaaactagtctgccacaaaattctggtcatttgtcatttgtcattttgagtagttgatactgactgcctactatgtggctgacaatgtgtgggacacataa

SEQ ID NO: 92535 - DNA, 577 bp, Homo Sapiens
gtctgtaaaatctgtgaattgtcatttgaaacagatcaggtcctcttacaacacatgaaggaccatcataagcctggcgaaatgccctatgtgtgccaggtttgccattatagatcgtcggtctttgctgatgtagaaacacattttagaacgtgccatgaaaacacaaagaatttgctttgtcccttttgtctcaaaattttcaaaacagcaacaccatacatgtgtcattataggggccactggggaaagagtgcacaccagtgttccaagtgccggctacagtttttaactttcaaggagaaaatggagcacaagacccagtgtcatcaaatgtttaagaagcctaagcaactagaaggattacctcctgaaacaaaagttactattcaagtgtcactggaacctcttcagccaggatcagtggatgtagcatccataactgtgagcacatctgactctgaaccatcactccccaggtctaaaagcaaaatttcaaaaaagtcccattaattctagtttcagtaaatctaaagcaagtatttcaaaccaaattaaaaaacctcataaaacaaaa

SEQ ID NO: 92536 - DNA, 937 bp, Homo Sapiens
tattgggctcacagctactgaatgagaccgactggtggagacagtttagtgaacctggtaaacactacacgtgaagagtggtgaaagggaacattgattactgaagtgccctggagagggaaagcactggtcaacatcacatggacaaatttcattgttttctaaagatggcctggaagtagtctttgccactgcttcctccacaaacagctcttcataacatgggctgcatgaaatcaaagcaaactttcccatttcctaccatatatgaaggtgagaagcagcatgagagtgaagaaccctttatgccagaagagagatgtctacctaggatggcttctccagttaatgtcaaagaggaagtgaaggaacctccagggaccaatactgtgatcttggaatatgcacaccgcctgtctcaggatatcttgtgtgatgccttgcagcaatgggcatgcaataacatcaagtaccatgacattccatacattgagagtaaggggccttgaggctgtaggatgacaacactttgactgtggaggtgctagtttgaataaatgtgacaaaagcaaaaactggtgtgaaaaagtacaaataactatctggatttaaaaatgtgtctacgataatgtcactattataagaacaactaggatgaaatgcattttaagtacttctatgttaacagcaatttctgtttagtcttagattttagtcatctgaagggctgaacagaggtcctgtgacacccaataatcagctgaatgtcacagcacttcttcctaagtaatggcatcaccaaagaaatgctaaggaataaaaactgccccaaattccaatggttgaagtttatcctttaaaataacaatttttgtttatacccaaaaaagtccagatatgaaaagggcttttctaaaatttcttggcgagggaatgc

SEQ ID NO: 92537 - DNA, 436 bp, Homo Sapiens
  misc_feature (257)..(265): n is a, c, g, or t
cagatgactgaatgaggagactgaactgtagccagctctagagattaaaaaaagtcatggagattcagaaagacaggaagttactgcatataaaggttaacacccaccctcaccttctacaaacagcctcagctaaagatacctgggaggagcttgtagaagatgccactctctgcaatccagaggaaaatgtctttccctttgagcggatcatttctaccaaggtcaaactcatattttacattgagtttgtatgnnnnnnnnntcagatgtttaatttttcatgtaatcaaagaacaataacaaaagcaaaccttcacttgaggactgactctggactggttctggaagctgtacaaaagacatcccaagccacgtgggaactggcatgagcccacaattaatatgcattaaatcagtcactcctcaaataaaa

SEQ ID NO: 92538 - DNA, 448 bp, Homo Sapiens
tttatttcacaattttttttactaaaagaatagatttttattaagcgttgtaagtttctttccatcagcattaacagaacaacagaccaatttccatcacagaacaactcctgaggcattctcattcctttctgaaactcttccattaactcctgaagtttccccaaagaagcatccattcaaacttacattaataaactatggagcttttgtggtgaggtgggccaaaaaggcagggaatttggaatctgggagtgggaaagagaaatacatattatccatccactaaacacactgtcaaaagcacaggagaggagatagtaatacaggaaaaaaacaatgaaataattttttacttttgtcaataacatcatttatcagggagcactaaaagtcactgactccttgcagttaaagtttctttacctagtgtgttattctaaaaaca

SEQ ID NO: 92539 - DNA, 352 bp, Homo Sapiens
tttacatccacaattttatttaataagtatatcattaacattttcttaatatatcagaaaagatgaaaagaaacaatatagaaatattttcagctatacaaattcagggcttccatgacaaataaaggctaaagattccacctttatttacatacatttttttcttcatagaaaaagtcgatatccaataaaatgttacctaatgtaaccccaggcaaagtgaatgccatgactggacaatggagacttattcgttgaaccgttacacctaattaccatgtgccagatactgttctaagcactctatggatgttagctcatttaatcttaaaaccatgtcatagaatatggt

SEQ ID NO: 92540 - DNA, 413 bp, Homo Sapiens
  misc_feature (203)..(203): n is a, c, g, or t
accagcactctcccagaaacccagccctctccttgggcctcgggcctagagaccactccagtgccccaggagtcggccccaatactcaactaccaccttgtagccctggtgccccttgaaggaggtaggagaacggaccagagcttggagaactaatgcttggagccaagggccccagcccaccccaccgtcccacacattgntgtggccccaacctcggtgccatgttacaccggcccctggcgtcacccactaggcaggctgctgctttcagcctcagcccctggcccagccccagcaggccctcagcctggaagaagccccttgggcctaagcctcgggtgggagctcagggccacctgtgacgtctgcatcttcttggagagagaataaagtttgtatttaagtggaaa

SEQ ID NO: 92541 - DNA, 798 bp, Homo Sapiens
  misc_feature (528)..(528): n is a, c, g, or t
  misc_feature (727)..(755): n is a, c, g, or t
gacagcgaggcccaggatggaaaccctgaaggggataagaaggctgagaagaagacacctgatgacaagcacaagcagcctggcttccagcagtctcattactttgtggctctctatcggttcaaagccctggagaaggacgatctggatttcccgccaggagagaagatcacagtcattgatgactccaatgaagaatggtggcgggggaaaatcggggagaaggtcggatttttccctccaaacttcatcattcgggtccgggctggagaacgtgtgcaccgcgtgacgagatccttcgtggggaaccgcgagatagggcagatcactctcaagaaggaccagatcgtggtgcagaaaggagacgaagcgggcggctacgtcaaggtctacaccggccgcaaggtggggctgtttcccaccgactttctagaggaaatttaggcgtgcgggcgcctgcaagcgggagacacccacaccccattctgggcgggcccagtggagtttggggaggggggcgaaagcaancgggactgctgggagaggaggggtaggaaggcccgcctgagcgcgacggggcttccgggaagggactggttctcgcccccttccccagcctggggcctcggatacctgctgcccagagcagcccggacccgaaacctttcaggccccgcttgcaagagctggaaaaaaacgcgtatctactaggaggagccagggactnnnnnnnnnnnnnnnnnnnnnnnnnnnnnaactgtcgaatgttgcgaatttattaaacttttgacaaaactt

SEQ ID NO: 92542 - DNA, 477 bp, Homo Sapiens
atatacaatgctctaggtgatttgtccgaaataaatacaacctgagaacatccatttcaatgtccccaaacactatttatcccctgaaaaagcagcttaaaatatgggtgcacattttgcagcttatgttctttggttaggctctgaagggtgtttgttctgggctgggctaggctgggcctaactgtagagacacacctaagttccgttctctgtttggaggctgcacccagcctgagtccccaccagtcccctccaaaagccctgatgctgcttgcggagcacctgtcttcattgcctctcccttctgcagcctgaaaggagggatgttcaggactctgcagctctgtgtccagcccttgcagagagctttgtcctctgacatcagctaccacacaggctcattctcaactggcacagaaagggttacttctgaccctacagcagcttacccagggcaaagtgagagaaactgaa

SEQ ID NO: 92543 - DNA, 624 bp, Homo Sapiens
gccttagcccgagccggcgccaccgcgcccccggccatggcttttgccaatttccgccgcatcctgcgcctgtctaccttcgagaagagaaagtcccgcgaatatgagcacgtccgccgcgacctggaccccaacgaggtgtgggagatcgtgggcgagctgggcgacggcgccttcggcaaggtttacaaggccaagaataaggagacgggtgctttggctgcggccaaagtcattgaaaccaagagtgaggaggagctggaggactacatcgtggagattgagatcctggccacctgcgaccacccctacattgtgaagctcctgggagcctactatcacgacgggaagctgtggatcatgattgagttctgtccagggggagccgtggacgccatcatgctggagctggacagaggcctcacggagccccagatacaggtggtttgccgccagatgctagaagccctcaacttcctgcacagcaagaggatcatccaccgagatctgaaagctggcaacgtgctgatgaccctcgacggagacatcaggctggctgactgtggtgtgtctgccaagaatctgaagactctacagaaacgagattcgttcatcgggacgcct

SEQ ID NO: 92544 - DNA, 444 bp, Homo Sapiens
aaccaatttcaaatacttttaaaccgtcttctcctggtaaaaagcctggtggaatgaaggcaggaacatttgatccttacccatcacattctgctgacccttatgtggctaaattggcaaatatttctggcaaagatgataagattttccacccaccaagtggaccaaaaagcagaccagttgaaagtataatgactttgaatgtcagaagggcactaaattcaaagaactacaagacttcttcagtaccatcctattagcaactggaagacaagtagctttctagatcttaactatgagtaattcactatcaagagctaattatttgaaaaaatataagatgttatggagcagatagctcaagcagttaaaagaaattctgcaactctaattctcttccttattttaatactactacttaataaatagtatttgctaataaaa

SEQ ID NO: 92545 - DNA, 402 bp, Homo Sapiens
aactcattcatacgagaaacacatgaaatgtaggctgtgttgagaaataaatagcagaattgtaattaggggccagaggaaaagggtgtgaagaccatgtcaagatttatgcctgtgagatgggttgcagaattgacctgagcagaccaggcttccgagggtcaaaaaagcgtctgaaggagagacactgagtgcattctgggttcacattcccctcctctactgcattcctgaattttctgcctcacagcggcatctgaagcagtggctgtatgtgtccttaaccacccttcaagtccacaacatgtcatattacctcattttggctccctgggactattttggaggacctgaattagtcatgtggggtacttgattaaaaatcacttgaacagccaaaaa

SEQ ID NO: 92546 - DNA, 512 bp, Homo Sapiens
tcttggaaaccatcagccgttgtgaccctggaggtttccaaaaaagaggatgacacctgaacgcccagcaggtctttggaactgtgaaatgcttcatctgtggggtcctggcaatcatggcagtaagcatgtcttctccaaaggatgtccacatcctgatctccagcacatgtgactatgttagatttcatggcacaggggaattaaggttgcagctcgaattaagatagggacattatcctggattagatagtccaggtgggcccagtgtaatcacaaaggtcctcacaagtgaaagagggaggtcagagtgatttcatgtgagaagaacctgacccgctgtggttgtctgtgaagatggaggatggggccacaagtcgaggaatgcaggcagcctctagaagctgcaataggaaagaaagcggcttctctcctattttagccccccaagactgattttggagttctgatctccagaactgtaagattataaatttgtgttgtttgaaaaa

SEQ ID NO: 92547 - DNA, 531 bp, Homo Sapiens
aaaacccaaaatgttatgcttctcacaactcaccgaaatgtggccctactccttgcaaagaatggctcttcatatcaacacttattagaatgataaaatgttagagccaaaagggcccccaagtgtcactgagaccctcactatgcaaatggagcaacccaagggaactggtgactttcaatcaaggtcgcacatctggaaaggaggaggacccagatatggcccccgttctcaggtttgtaatactaatagctgggagagtgtttattaggtgcggttcagggctcagtgcccgatgcatgtgaactggtggaatcctcactgcaggcttctgaaatgggctctagcctccccgccgccatccgcctcgtcgtcattattgcgaccagccatctggggaaacaggtccagagaaatgaagtagctcgcccgtggcacacaacctgccattggctgagcaggactcaaccggactcccatcagcgcgagcccatctggtggatcacagcatagctctgagtgagcggccgc

SEQ ID NO: 92548 - DNA, 585 bp, Homo Sapiens
  misc_feature (51)..(76): n is a, c, g, or t
  misc_feature (114)..(148): n is a, c, g, or t
ttttttgagacagagcgagactgttgcccaggctgggcaagactccgtccnnnnnnnnnnnnnnnnnnnnnnnnnngaattaggtactaagccaatacataaggcaaagaagcnnnnnnnnnnnnnnnnnnnnnnnnnnnnnnnnnnnactttaaaatagagtaaccttatagatgtaaaaattcacaatgtgtacttactgatggggcactgaggatgggttttaaagactcatttgtacttctccaaacaactcctgtctagctagttagctattttagccagaagcacaaaaggtagggtagcaaaaatacaagtggtagtgcaggcaaaacgtagtatgaagtcaaaaaatagaatagcctggacatgatgaccgaaccacgaaatgggtcatccaggaatgcaatggtgcagacatcgaaggtgcacaggcagaccgtctgctggggcaagcaggaccccacctgtggggcaggtattaagaagcaggctctcctgagtggatggggaatggctaagcacaggaccctcgtttccagggttctcagccagggaaacaagacagcagtttaaggctcaaaa

SEQ ID NO: 92549 - DNA, 556 bp, Homo Sapiens
aaatagagggaagacatcaatctggatcacagccacaaaaaaagatcttgtggtggtaaacacttaagagacagtggtgaggggtagggataactggaggcacactttctgcctcagtagcttgttcttgcacctcaaaaaagtattcacaaacagaacagtgtaccacacttctccagtgtttctccaggaaaatatctccagaggagttgatcaagaaaagtctataaatcatgatagactgtgattgtcaggtgagaaaggaaagcctttttcagtctgaaagcctcaggactctgcagattttcaaccccatctttcaagaccaggctcagtcttcctctactgcacgagcctgaagtatccctcccttgaatacccggcctcactcctcggagcacctgatgcttgctccaccttatgaacaggtcccaccctgctctgctttacatattttttaactgactttatatttgaaatttgaaattaccaatcccacaaattttggatttttttgttttctttaaatatatacatatatataaacagaaaaaaa

SEQ ID NO: 92550 - DNA, 847 bp, Homo Sapiens
gggggggcggggcctgtccgcgcctaggagcagtggacgctgagagcagcaaggccagagttgaaaacttacagagtcctgaggctttcagactgaaaaaggctttcttctgtcactgacaatcgccaccatgatccatagtcttttcttgatcaactcctctggagacattttcctggagaaacattggaaaagtgtggtcagccgttctgtttgtgattacttttttgaggcgcaagagagagctactgaggcagaaaatgtgcctccggttatccctacccctcaccactatctcttaagtgtttaccgccacaagatcttttttgtggccgtgatccagacggaggtcccccctctgtttgtcattgagtttcttcaccgagtggtggacacatttcaggattattttggagtctgttcagagccagtgatcaaagacaatgtagttgtggtttatgaggtatcggaagagatgcttgacaatggttttccattggctaccgagtcgaacattcttaaagaactcataaagcctcctaccatccttcgaacgggttgtcaacaccatcacaggaagcacgaatgtgggtgaccagcttcccactgggcagctgtcagttggtgccttggcgacggactgggtgtgaacatataccaacaattgaggcctattctgatgtgattcgaagagattgatgcaattacttgataaatcaagctccacaattactgctgaaatcagggggtgattgatgcctgtgtccaagctgactggcatgccagaaccttaccctttcccttctggaaccctaggttgttgggatgatgtcagcctccctccttg

SEQ ID NO: 92551 - DNA, 885 bp, Homo Sapiens
  misc_feature (80)..(106): n is a, c, g, or t
gaccgcggctgcaacgtcatcgtgaacggcacgcacgggccgcctgaagggcgctaagagcgggagcgcctcccgagcannnnnnnnnnnnnnnnnnnnnnnnnnnccccaagaagctgctgtcgcctgaggaaccggcggtgagcgagctagagtcggtcaaggagaataactgtgcttccaactgccacctggacggggaggcggccaaaaagctgatgggcgaggaggccctggcggggggcgacaagtcagacccgaaccttaataaccccgcggacgaggaccatgcctatgctctgcggatgctgcccaagaccggctgcgtgatccagcctgtgccaaaacccgcggagaaggctgccatggcaccgtgcatcatctcctcgcccatgctcagcgccgggcctgaggacctggagccgccgctcaaaaggaggtgcctccgaattagaaatcagaataagtaaaaggaacgttcactcacagggtacgctcatggagagagggcgcagagcaaaccatgtcacgccatccaatgacaccagctggtcagctcaccaccccctctggctaaaactcaagcaaataaagccgcttcctgtcattaagcatctcagaggaagcagccctccctcgatggcctctagcccagagaagcccgcgcatcttggacccaccaagcaggcccagccttcctgctgccaccatctctgcttctccccagaggaacttagagatttcacccctggcttttaaaaaaaacgaaataccgacaagccacaaggaccaatgtaggtattctccccgccccatcttcaaggctcagcgactgaggctggaagatgatatggattggaacacaaaaaatctttttttaatctt

SEQ ID NO: 92552 - DNA, 715 bp, Homo Sapiens
actcaagcacctcaaaagaggtgcttcgaccatacccaccgtgggcactgctcttgatgatcaccctttttgccattgtcatcctccccatccctgcatactttgtatactgccgcatacataggattcccttcaggcccaagagcggagacgggcctatgacagcctccacatccctacccctaagtcaccagctaacacccagtaaagaggttcaaaaggaagaaattctacaagttgatgaaacaaagtacccatcaacttgtaatgtgacttcctaacttcattaatttggcttcacataacatatcccttagaacagatccaatagacaactcttaatatcagcttgcaactgttgatctccctggatccagaaccacttttatttccaagaggaggggcattctttgggggtgttcatggggcctggacttgcaatcccttcctgggtcccatcttacctggtgaccaccatcattgttttccccatcctcttcctcaacacacatacatgcacaacacatatacaatactagtgatgtctaccagtcctgctacttctggggtgcctgtctcctggaatggagctggaggagcaatgctgttggtgaataaatcagtctactggaactccaaggactggatgtaagcagatctttttttcctatagatgtctcagatgttcagttttcctgtcacaaggcttccagtc

SEQ ID NO: 92553 - DNA, 498 bp, Homo Sapiens
aaattgagacagagtcttgctctgtcgcccaggctggacaatgagagtgaaactccatctcaaaaaaatttgctgccatgagacttttttccttaaaacacactaaaaacatagacaattatcaactgtggatacagaagatagatgagggaacaaaagacaatgtctccaactgcccagtagatttagaaacagacaggacactaaaatcaatggggagatagaattagtagctccaggatgaattatctggaagaggtagaaccccaggctcatgtcagatgaagagaagaaagagaaaagggaagaagctcgaacacttttccatcctatattaagcataagaactctgcctaaaaccccccaacaccttggagcaccacagcatcaaccccacattatacacatggagacttgaagctcaaataaaaggagtgacttggccaggaaccaggtgacctcagggctcaaagccttctaatcccagcagagtgagcg

SEQ ID NO: 92554 - DNA, 474 bp, Homo Sapiens
atgaagccaataaagctcctggaaactggcctcatattctgtgtacacagtccctgtacagggtgtctgatctgtgtttaaattaaattctattttttctggctacaagtttccaaaataagctgtgctttcctaaagccctatgaactgaaaactagcggtttcagcaggcgctgcctctaagccccctgaccatcacaggaggaaatctcttcactgctggtgctgacaactaataactgagagtgcctggaatcctttgcccgcacgtctagtgagtccatcacactcagggtaattgagacagtagctgttacaggaatcaacttgtggatacatcacactcaagtcaaagcctggaaagctgaggaaacaacccctgacaccccaaaggaacattctaaatatcaatgtaaagaaataggaaatcttaagctgaaaatcataaaaaataaaaagtaattgagaactaaa

SEQ ID NO: 92555 - DNA, 448 bp, Homo Sapiens
gtaggatgggttaaaaaaggcagcaaggtcaaataagaatgatatcacagggtgaacacccattgtgtcattacgagtaataccttcctaggatacagaatatactgtcacagagtacacacacatggggtacacccactgtgatattagaagcaatatctccctaaagtatgatgaaaaatatcacagggtgtgcatactgtgtgatatgaggagtcatatattccctggatatcacgactcatatcaagggtgtacacacaccgcgtacacacactgtgatatcaggagttgcatctccctaggatattatgaataatatcacagggtatacactatgtgtgaacatccactgtgacatttgaagtcatatctctctatgagatgacaaataatatcaaagtgtgtacacccctgtgacatattaggagtaacatccttctagggt

SEQ ID NO: 92556 - DNA, 1172 bp, Homo Sapiens
  misc_feature (960)..(960): n is a, c, g, or t
  misc_feature (974)..(974): n is a, c, g, or t
  misc_feature (1103)..(1103): n is a, c, g, or t
tttcaccatcttcccaggtatcatccagtaagccaggtcaccatatttgcaaccctgcatcgctcatagcattgtcagatcgacgtgtccacctctaatcattgcaaatgattcatcgctggagaacaaagaggctcctggaagaatagtaactgtttccttgcctgcattgatgagatctgcatcagcttcatgttgtcgtggatatggacccaaacccagaactccattttcactttgaagatgaacagttatatttgggctgataaaattgctggccaggagagggattcctatgcccaaattagcatacatgccatcctcaaactcaagagcggccctcttgatgattcgttcccttacgtcatctccaggtttagcagatttggcttccccatctccctctttccggattgataaacgctcaattcttttctcatatttttctccctttataaggcgatgtacataaatctgaggaatatggatgtcttctggagcaaatgctccaatatccacaatttcttcaacctctaccactgtggtttctgcagctttgcacattggcaagttgaaattccttgcacttttcctgaaaatcacgtttcctgctcggtccgcctaccaggctttcaccaaagcaaaatcccctgtaattgcttcctccaaaataaagtgctgaccattgaactccctcacctctcttggcttactggcaatggcaacactgccatctttgttgtatttgatgggcgatcctccttcttgtaccagggtcccataccctgttggggtgtaaaatgcaggaactccagccccgcctgcacggatcctctctgcaagtgtgccctgtggtgtcagctccacttctaattcaccagataagtactgtcgttcaaattctgcattttctcccacatatgaagagaccatgcgttttatctgcttggaccgaagcanaagccccaaaccanaattgtcaacccctgcattgttgctgactgcagttagtccttttactccagttttcagtaaagcatctataagattctctggaattccacatagcccaaaaccaccaaccaaaacccgtgcaccatcanggatgtctttacagcttctactggatctgtataaaaactgggtatgcgatgagcactggtggaaaggga

SEQ ID NO: 92557 - DNA, 689 bp, Homo Sapiens
tggagtgaatgggatggttggactccagaagcccgcgaagaaaggaagcgtggcatacagatgtttggacagctggcacgtttccataacatcatgtccgatgaaacaatcggtacccttgcctttctcacatcagagatcaagtcactctttgtgcatcccttcctgactgagcgcatcatctccatgttgaactacttcctgcaacacctggttggccccaagatgggtgccttaaaagtcaaggacttcagcgaatttgacttcaaaccccagcagcttgtatcagatatctgcactatctacttaaatcttggggatgaggagaatttctgtgccactgtgcccaaggatggacgttcctattccccaactctctttgcacagacagttcgagtcttgaagaaaataaataagcctgggaatatgattatggctttcagcaacttggcagagagaatcaagtctcttgcagacctccaacaacaggaagaggaaacctatgcagatgcctgtgatgagttcctggatcccattatgagcacactgatgtgtgaccctgtggtgctgccatcttccagagtcactgtggatagatccaccattgcaagacatttgctcagtgaccaaacagatccctttaaccgtagtcccctcaccatggaccagatacggccaaacacagaact

SEQ ID NO: 92558 - DNA, 365 bp, Homo Sapiens
aggcacctccaaccaccacacactccctgctgttttccctgcctggaactttccctcctgccccaccaagatcatttcatccagtcttgagctcagcttaaggaaggctttttgcctgtgggttccctcacccccatgcctgtcctccaggctggggcaggttcttagtttgcctggaattgttctgtacctctttgtagcacgtagtgttgtggaaactaagccactaattgagtttctggctcccctcctggggttgtaagttttgttcattcatgagggccgactgtatttcctggttactgtatcccagtgaccagccacaggagatgtccaataaagtatgtgatgaaatggtaaaaaaa

SEQ ID NO: 92559 - DNA, 480 bp, Homo Sapiens
agaagatggcaaaataagagagatatggtaataattcccagtcacacaaacccatacattctctggattttgccatggactcttgttctccaatgattccagactattagaacacttatgacattttggttaataataatccttcctataggccaaacttgggtaatgatttaaggaggtattaaaatctgggaatgccagacagtgtgctgaaacagagactcgagtcttgaacaagaaaatatcatttgtttaaccttgaataagtcttcttactagtcttgtgcttattttcctcccttataaagtaattgagtcagcaaatcatgggggtataagaattctggatctcgcaccactctccatcaaaagtatttaacacataccccacatatatgtatattaataacatatatttgtgtgttaattatatacatgtactactgtattaacttaatgggcacattacaaaacaaacag

SEQ ID NO: 92560 - DNA, 181 bp, Homo Sapiens
acttctcatcctggccaaatagctattgcaaatgctatttttgactctattgatatattgaaatgtgacgtttccatctacaggtaaagaatttgtaggaaaaaagaagaaaaagtgatgtaattttgaagtattcttttagtgaggtattctctcatctctgtaacaaacagaattgctg

SEQ ID NO: 92561 - DNA, 522 bp, Homo Sapiens
acagtcattagcttagcaagcattatgtgttgcccagaggtggccaagtcctgtggccatgaactactctctctgccttccccttgtaattatctgaaccctttagactcagcctggtcttctctgaaatggtttatcatcaataacagaaacgagttttgtttgcagtccattgacagtggctattcttaccaatgtatacttttcagcaatttaattagcaaaggaattgaaaggataaacgcaagcaagtggagaacattaactagcaaagtacggagatgggaaaactactatcttgggaaattttcttaagggtggttcctccaacaagcagtgaggctgctacatgtctggtctttaccgtcaactctgttgagatgaattccacaccactgcagccaaagatacttcaacagcgacctcacatggggtgctgcgagaactgggttgctcctaaggatgttggcaaagcgctttgagtttactagaagtttcattaaaatttgttggtaagttaaa

SEQ ID NO: 92562 - DNA, 458 bp, Homo Sapiens
  misc_feature (208)..(251): n is a, c, g, or t
tctatgttcaatctctggatttgaccctctagctccctttcagctttctgtttctcattgtttgctttcttttcttcttccagctgatgttccacttgtttcttctgttgtttcaaagatttgatggtgtcattcagtcgactgatttttatggacctcgagttcaggactgctgcttgttcttggcacgggctctgaggcgcatgcnnnnnnnnnnnnnnnnnnnnnnnnnnnnnnnnnnnnnnnnnnnnacgatcattagggctgggttgtgtgtgggctgtctcagctggcagaggggcacccagtccccgctgcgggaggaggttggagggctggcctgcggggtcactgcacctccgcccagagcctcctacctccagatcctccttagaaagatatgcaacctccaatgagtccctgatgataccctgaacctatcaagccacgtcaccggg

SEQ ID NO: 92563 - DNA, 618 bp, Homo Sapiens
gcggccgcggcctcggcctcctcctctggggcggcggcggaggacagcagcgccatggaggagctcgctactgagaaggaggcggaggagagccaccggcaagacagcgtgagcctgctcaccttcatcctgctgctcacgctcaccatcctcaccatctggctcttcaagcaccgccgggtgcgctttctgcacgagaccgggctggccatgatctatgggctcatcgttggggtgatcctgaggtatggtacccctgctaccagtggccgtgacaaatcactcagctgcactcaggaagacagggccttcagtaccttattagtgaatgtcagcggaaagttcttcgaatacactctgaaaggagaaatcagtcctggcaagatcaacagcgtagagcagaatgatatgctacggaaggtaacattcgatccagaagtatttttcaacattcttctgcctccaattatttttcatgctggatacagcttaaagaagagacactgtttcagaaatcttggatctatactggcctatgccttcttggggactgctgtttcatgcttcattattggaaatctcatgtatggtgtggtgaagctcatgaagattatggga

SEQ ID NO: 92564 - DNA, 534 bp, Homo Sapiens
tttattttttcgatctaaaaggcagaaaagactactatctcaaatgtcctcttggcctttatctgtataaaaatattgacttaacttgcatagccttgatgatcataaaatacttagagggatcttctcagcataatttcaacatctattcttctcagagctcaagtcattctctggttctatcttttacttgagcctttaaaaactactgggttatgataaatttcactgataatacatttagcttccagatatgatattaacagtaagaaagaaaagagtaagtaaaccagaattaactttaacccagcacataatatagatcagaaactgtgctaggcaactttacatgagctgttaaaaacacccctcagaagtatgtggcgtgagtcccaccttacaataaagaaatcaaaatacagagaagatagctcctgataagtagtatcctgataagtaggatctgaattcatgctgtctggccctatgcttttcccatcacatcataatgctttgcggaaaaaagaggctgga

SEQ ID NO: 92565 - DNA, 438 bp, Homo Sapiens
  misc_feature (200)..(287): n is a, c, g, or t
ggtagcacactcctccccttcaccatgcgatgcccttcactaccttgcgactttacagcgagtcaccaccagcaatgagacgctcatcagatatggatcctcaaccttgaaatgctcatctccatactgctttgaaataatcattaaaactatacatttaacaagatcggagtcatatggtgcgcatctgccagcacagnnnnnnnnnnnnnnnnnnnnnnnnnnnnnnnnnnnnnnnnnnnnnnnnnnnnnnnnnnnnnnnnnnnnnnnnnnnnnnnnnnnnnnnntttaacctgaccatgtggcagaaagccagatatgcaaagaaaaacatgggggaatggatcaagaatggtaaattgacatattattataaaagaatttaaatgaaaatttaagatgttttgtgtcaaataaatgaatgagagtcatcgtaaa

SEQ ID NO: 92566 - DNA, 390 bp, Homo Sapiens
  misc_feature (341)..(341): n is a, c, g, or t
ttttggttgctctacccaattttgtgtcacgattcaccataagtgcagggccaaggcagtagaaggaagtcacatcacttatgtaatggagctagataaaagccacaatgcttttgtaggcagggttcaggccaatatttcacatcagctgggcgctggtctcagtgatatgtaaaagtgccctcgattccattgccaaatgaggtgttatacattgcttggttgcttggtgtacatatgtcacaatttcaactgtgctctgggcctgtgtgcctgggcttgcaatatgtcactatccttcctttgtgtggggcccattccagagaagagggttatatcanctggttggatggtccccagtgatatataaaaagtgcccctttgtagaca

SEQ ID NO: 92567 - DNA, 501 bp, Homo Sapiens
actctccttcaccagcaagaaactgggaaagaaaattgcccctcttgagttgatcactcatatgtaaactgcccaccccactgcagttaacaccctgggttgggtttgcaaatggttgggggaatccccagggcatcagaaggaagtttggaggaccatgtggcggtggtctaatccattagcaggattctgcaggaaacgacaagtttaaggagccagatagctcatggccaagaggagagtcacagaaagatgatgacgccaacttgggccagccctgtactataggagtttgacaaaggggtctatagacaccaggccaggggtactccagtgtgctccacataacagcacctggacacaaaccaagcccctactgcaacaaggcatgctcagaaattgacagtgagtgtctagaaactgctatggaaacaggacgtcgtaattttatgtctgttgaatctaacaagaaaaaaatagagcttaccttttgcaagaaaa

SEQ ID NO: 92568 - DNA, 527 bp, Homo Sapiens
ccgggacgcccgtggtcctcaccccttgagctgctttggagactcggctgccagagggagggccatgggccgaggcctggcattcacgttcccacccagcctggctggcggtgcccacagtgccccggacacatttcacacctcaggctcgtggtggtgcaggggacaagaggctgtgggtgcaggggacacctgtggagggcatttcccgtgggcccccgagacccgcctagatggaggaagcgctgctgggcgccctcttaccgctcacggggagctggggccatggatgggacaggagtctttgtccctgctcagcccggaggctgtgcacggccctcgtcacaaggtgacccttgcagcacaggccgcgggtgccccaggctcggctcagttcttggaggtcaagggcatgggttggggtagtgggtggggaggtgaatgttttctagagattcaaactgctccagcaatttctgtatagttttcacctctgagaattacaatgtgagaaccgctcgaaaaaa

SEQ ID NO: 92569 - DNA, 565 bp, Homo Sapiens
tgcggccgcggtggcggcggcacctggggccttgggatccctgcatgctggcggcgcccgcctggtggccgcttgcagtgcgtggctctgcccggggttgaggctgcccggctcgttggcaggccggcgagcgggcccggcgatctgggcccagggctgggtacctgcggccgggggtcccgccccgaaaaggggctacagctctgagatgaagacggaggacgagctgcgggtgcggcacctggaggaggagaaccgaggaattgtggtgcttggaataaacagagcttatggcaaaaattcactcagtaaaaatcttataaaaatgctatcaaaagctgtggatgctttgaaatctgataagaaagtacggaccataataatcaggagtgaagtcccagggatattctgtgctggtgctgaccttaaggaaagagccaaaatgagttccagtgaagttggtccttttgtctccaaaataagagcagtgattaacgatattgctaatcttccagtaccaacaattgcagcaatagatggactcgctttaggtgtggtcttgaac

SEQ ID NO: 92570 - DNA, 501 bp, Homo Sapiens
gcggccgcagagcaagaggcccaggaaggaccctccgagcgctgtggggagcggcaacgccggtggctcggggccccgcggaaaaggagctgaaggtggtggatcatcgtctggaaatgtgtctggggttgcccctgctgcccctgcagggggctcgcgctcctcctcccggaacttagggtcttctggtggcgagaaggaagaaggcaaaaaggtccggcggcagtgggagtcgtggagcacagaggacaagaacaccttcttcgaggggctgtacgagcatgggaaagactttgaagcgattcagaacaacattgcgctgaagtacaagaagaaaggcaagccagcaagcatggtgaagaacaaggagcaggtccgccacttctactaccgcacctggcacaagatcaccaagtacatcgactttgatcatgtgttctctcgaggcctgaagaagtcatcccaggaactgtatggcctgatctgttatggcgagctgcg

SEQ ID NO: 92571 - DNA, 459 bp, Homo Sapiens
tttccaggggaaacagtccccaagtacaggaaacagccagtgcaaatattctgaggtaggcgcattccagcatgatgaataattttcagcctatgaacactttctaaggagtttttcattcaggccattggtccaaatactactatttgacaaaactgagaataaaagtaagtctctctcaagttctcaaatctctcccaagttcccaggtatgaggcttaacgtgccctgcttcagaaatttagttttcacattaggaggccaaatttatgagctaagacccttcctcaaaattatgctaaaatgtgagtgttgtataatactgcatttgtcttttcttaaattgagatatgcatagaagtaatcatgtttaaagtatgtgagtcttgcaatgtttttctcagtttttcaggctgtagaatcctctgcatctcagattagcttttagcagtaagatag

SEQ ID NO: 92572 - DNA, 838 bp, Homo Sapiens
tttaaaatctaagaaagaatttttattaatttaaccaaatgacagctttcattttaattataaactattatttggcatttatacacataaaatatatgtttaactgaatattttgtacaaactctatgagtattccagatacagaattatgattataaaataatcaagatatttcaaggagacatgtgattcagtgccaaaattacaattgtatatctgtcacaatacttatagcccataaaatgttcacatgaaatctctaatgtaggcaattaattgctagaagaataaatgatgttcattatatagaacatagaaagggacacaatgcaaaataaagatatgaaagccttcagaatttctttatgttgttgctagtaagatgacaaaacataaagctatgaggatctggccacgtaaaatatttatagtaagtatgccttgagtgcttgcatggaagaaatgctctgtcagccacttttggtagaaggatggcccaatatagacaccaggaaaacctcttcgaccacagccatgtccgtaactggtaattcccattacaaaaaatcttttatattctggtaagtagcacattaatggtcccccactgtcacccctgcaagtatcaaaagctccatcttcatcacctgcacaaaatgaagtgttaggaattattcccccataactcctctcagaattacacatctctcgagaaatataatgcacttctgcatcttgtaaaatatttgtagcgttaccttcttcttttgttcttccccagccacttataaaacactttgtgtttccgtccaggatttggaaaacatcagaatggtaa

SEQ ID NO: 92573 - DNA, 359 bp, Homo Sapiens
agcctcccctgctcttagtctatgtgattcggacacagccaactacattccccagatccagaaaagaacacgccattccaagtaaagccaatgagagacagctgcaggacttttgctggaactattgggaaagtggtgtttctttttctgctatggttacttatctgctatgctctaagcctggaactgctggaggtcatctttgctgcatgaaaatgaagtcaatattgaggacagcagaggtgagagggagagaggcataatcctgagtgtattgcaggggcacctggatccagccatacctgaaatccgagactttccattctaagaaccaatacattctctttgtacttaaaaaa

SEQ ID NO: 92574 - DNA, 353 bp, Homo Sapiens
ttttttacttatttcaagtgatcctaagttaacttactgcatctgcatcctaatcagttgtggaccatgcatgtgtctctacacaaaatgcattcattccagagatctggaaatgttcccaaagagtacgaaggtcattggttcaaaaccagtgctatggacggggaggaagaggctcctagctcatttcaattactcctcatatttggaaacaacaaagaccaaacaagaggggagtgggaatgctatgtgaaggctgagtataagcattagaacccaaatacaaacctttctaactaccaaaagatacacaaaaaatggagtgagtgaaataaaccatagtgaaaaaccta

SEQ ID NO: 92575 - DNA, 581 bp, Homo Sapiens
  misc_feature (204)..(204): n is a, c, g, or t
  misc_feature (292)..(292): n is a, c, g, or t
  misc_feature (553)..(553): n is a, c, g, or t
  misc_feature (566)..(566): n is a, c, g, or t
gtctggtttctctgaaacgacgtacctcctcatcgattttgtcttcgagggcatcaatatgacgttctttaagaaatcgctgtgttttttccaactggtatttcactaattcctcaatggcatctttctcctccttgtccacaaattcttgtactgcttcacccatccctctttctgttagcagtgagagctgcacattcttcntctgcggttgaaaagtactgttttacaaagatcttctacccttaaaggttgttccttctgaaggctttgtgattaagtttcccaaagnttgatctcttctccctgttttttccctttttgttctctatgcctgaaaaaatggataatgtcttttggattagctacccgatccacaaatttctggctaaagcgaagaacactgaaaggttcaaaacctccactatagtccactcgcagtcgtacaagaggcttctctggctggtgagaattacccagacgttcccgttcagcattttcaagcatttcttcaatcttctccaaacagaagctttgtatggcttggttactntaggattatctgngttaaaaatgtctga

SEQ ID NO: 92576 - DNA, 287 bp, Homo Sapiens
tcttaaagtttgatttctctttaatccaggattttttagcatatgtaaatttttagatagttaagagactttgttgtttccatgtttataataatttctagttttattctattttagagaatttaccctatagtatttcaacgttttggagttccttcctctattaatatataactaacttttgtaaatgcccaattagcactgaaaggtatatttcttttttccaagagtatcagttcttcttaaccctttttacttgtctattgcacaattaaaaaggtatgaca

SEQ ID NO: 92577 - DNA, 539 bp, Homo Sapiens
gctgtgcaatccatgttccggagtctcaccactgcatttttcagagacgccaatgggcttcttattaatgtttgacctcaccagtcaacagagcttcttaaatgtcagaaactggatgagccaactgcaagcaaatgcttattgtgaaaatccagatatagtattaattggcaacaaggcagacctaccagatcagagggaagtcaatgaacggcaagctcgggaactggctgacaaatatggcataccatattttgaaacaagtgcagcaactggacagaatgtggagaaagctgtagaaacccttttggacttaatcatgaagcgaatggaacagtgtgtggagaagacacaaatccctgatactgtcaatggtggaaattctggaaacttggatggggaaaagccaccagagaagaaatgtatctgctagactctacatagaaactgaacatcaagaaccccaccaaaatattacttttaaaaacaatgacaaaccacacaattgttgttgagtaaaccacgcccaatggcatgtc

SEQ ID NO: 92578 - DNA, 438 bp, Homo Sapiens
ggggccagggatgtgagaaagaagcgagccctcgagtttcctcggggcatgtgggaaggtttttttcaggatccaggcagaaccttacagagctgggagttttttaactttccattcctggcagtgacgccaggagctttaagtgatggaaatatgcgagtcaatcagtggatggtgaacaaaggaacagtaaatggagtaacttggctagaatatggcagtaactacaaggcatgttctgctctggcacgaagacaacccacctgaggcaccagacacatgagtgaagccatcttggacatcccagtcacagccaaactcactcctgagtgcatctgcatgatgaacccagcaatccccaccatggagcaaaggatccatccagtcaacccaaagaatcgtgaaaaataataaattgttgttttaaagttaaaaaaa

SEQ ID NO: 92579 - DNA, 457 bp, Homo Sapiens
tgcggccgccctctgctgcgcctgaagagagaggcgactctacaagcctcacagcatgcactgttactaaaaagacgatgcgtcctcctggacctgagatctgtgtgatcgtgggaaagcgacgaaaaacgaacaaaggaacagtaaatggagtaacttggctagaatatggcagtaactacaaggcatgttctgctctggcacgaagacaacccacctgaggcaccagacacatgagtgaagccatcttggacatcccagtcacagccaaactcactcctgagtgcatctgcatgatgaacccagcaatccccaccatggagcaaaggatccatccagtcaacccaaagaatcgtgaaaaataataaattgttgttttaaagttcttcagtttgggaatagcttgttatgcaacaatacataattaatacactggtctcccactttcaagtttgat

SEQ ID NO: 92580 - DNA, 419 bp, Homo Sapiens
  misc_feature (182)..(300): n is a, c, g, or t
ggcgactctacaagcctcacagcatgcactgttactaaaaagacgatgcgtcctcctggagctgagatctgtgtgatcgtgggaaagcgacgaaaaacgaacaaaggaacagtaaatggagtaacttggctagaatatggcagtaactacaaggcatgttctgctctggcacgaagatgcannnnnnnnnnnnnnnnnnnnnnnnnnnnnnnnnnnnnnnnnnnnnnnnnnnnnnnnnnnnnnnnnnnnnnnnnnnnnnnnnnnnnnnnnnnnnnnnnnnnnnnnnnnnnnnnnnnnnnnaacccacctgaggcaccagacacatgagtgaagccatcttggacatcccagtcacagccaaactcactcctgagtgcatctgcatgatgaacccagcaatccccaccatggagcaaagg

SEQ ID NO: 92581 - DNA, 196 bp, Homo Sapiens
attatattaaaatcaggcaatggtctgacaataaaaaggctgcttatggaatactgttatgttaaacttcacttacaggatgttaaatccttagaactaaggttttccccccagaaaaagattaatggaaacatcaattgcttttcagacttgatagttgctgcttcaaaaggtggttttacacaaatactaaatt

SEQ ID NO: 92582 - DNA, 464 bp, Homo Sapiens
atgtctcatattgaatggacagcattatcaagtctgaaaggaaaataaaatttcactatgaaaatcactatgccaaaagggaaaaattcagctgaaatctaagtcatgcaagaaactgttcttccttttgtccctaagcacacggctgcagataaaaggccagatatctccacaggtagctactctatgttcaccttatcttatgtaaagtgctgatttactgagcaccagacaaatacataattggcttttcccctacctgctccttttctcgtgcaacacgtggattcagtaatgtgaccacaccttctctctttcccctccaaactgcgtttcccctttaaatactgaagcctttttctctttggagaaaggcacacaggacagactgtttctgtgatttctgtgttcctttcttcaggggatgtccttaatgttgacaaaataaacttctaaattgattg

SEQ ID NO: 92583 - DNA, 643 bp, Homo Sapiens
cacctccacccctcatccctcacaatgcgcggaaaaccacaggcggctgtgcgcgcagcgtcggctcagccaccgcagctcctcccctgggatgaaaaagcactctgacgtcttgaaagctggcagctctctgtttggaaaatctctgcccagtgaaaaaatgtaccgacaagattactaagtaacacagtcttctgggaatgccttatcaatgccagctatttgaagagcacccaaagtcaaactagtgctccgcgctggcagtctggaaaaggcagatgtatatttcagtcagtaatggatattaccaccagcatttaatcaaggaagcaggaagtgatccatcactgctagctgctatctacaggaattctgtctacaggcagggcagaccagtcagccagtatcttcccgaagtaccttggtcttccaccatccatcccactgagagagccgttcctctaatgaggcatttctaagcagctgtccattgaactctaccccttgagatatcctgagaaataggaatctatggttcctattgtttggaaagtagtatatcttccttgaagattcacaatgcgtattaatatgcttagggctctgataagtcctgtattaaaaatgcttgttaaacattaaa

SEQ ID NO: 92584 - DNA, 421 bp, Homo Sapiens
aggcaaacggtttggccaatctctcaccagtatattaaccacatgggcaaagaaaatattttttcaaaatggatgtttttgctttagggtggagggatatgatatttttctttctatcttaatttccttccatgtttatgtttaaaattacttagtaagtaaaagtaatggttatgttagataaaattcattcaccacccttaatatgactcagtgactcaaagacaaagttccagagcaaagggtcaatcttgtgagagaggtcatgcagaatttacaaaacaaaatttatacagaacactcagaagtataaaaaagatgaagttcattattgtttataattactcacttactctgaagctacctttcctcctgctggcagagaaaaattcaaattaattaaattaattttaattaaggg

SEQ ID NO: 92585 - DNA, 535 bp, Homo Sapiens
  misc_feature (342)..(358): n is a, c, g, or t
gatggaaatacctaaggtgtggtccttacttccaaggggcttatagcagaacgaagactcgaaagcaagcacacccacaaccacaacacagccgctggcacacacagcaggaaagacaccgggtttaatggagcagagaaagggggcgtcatctccaggcacagctccatgaagaagatgacattgacctgggagctctgagccttcatataatgagtaagctttcagctggaagaaatcccaagtggagaaacaggaagctataaaagagcaatggttttggattcacaaaacctgcctgagtgaacctggttgccattctagcacagagatcctgtctcnnnnnnnnnnnnnnnnngaggcctgagagaacgtgtttatgtcttttcccatgtgaagacacagctagaaagcaccatccttgaaactgagagcaagccctcatcagtcagtgaatctgctgatgccatgttcttggaattcccagcttccagaactgtgagcaataaatgtacatagattgcaaattaaaaaa

SEQ ID NO: 92586 - DNA, 1117 bp, Homo Sapiens
taaagcaagttaatgtcaacatggggaggatcagtaacacattcatcaagtgagttccttggtacagtgctattgagaaggagacttaagaaagattcaaatccctgattataaatatcactacatgagaatactaacctctcctaatatattaaatactatgaaactcaaaccttactatagaaattcaaatatattacgtagaaacaacactaatggctgcaataaaggcagaaaacttgaaaattaaacatgaaatgattaaatcaggattatagctaataaatttaacaaatcttccagagttcaatggaaaaatatatgttcacacactggcttatttgcatactggtcttatacaaatttggagaaataatggagtgttctttctctttctgtgcaaacatttttttgaatttgtcaaacattatttctagactctaagcaagatcaggcctcaactctctatgctttttgaaagactcaagacaaccttaaaattcaatctagtcctatcactactatgtacacatacagtggtgttactaatctggatcacaaaatttcagtaagtggctaccaggtaaggaactgccaatctcagcctcacatggtagtattaatacaagtgagctagaatctggcctacttaggctactggaactaattaagatttgaagttcaagttctctcctgtctgcataaacctccatgtacagaaatcatctacatggagctggaagttgccaagatgagatattaacatttggcaagcatactaaattcattgtcctatgcatccatgggtatataatcagtatttgaaggaagggcaataaaccactttccaaaccaaatgctctttgtttatggtccttatttcccttttctcaatctacagcaccaaatactgatttaagaacgggagatctccaaaaatctaatttgaaaaacacataaatgggttccctgcaccacattttcagaactatatggggagtggggtgaaggggcatatgaggagaataaaaagcaagaccaaccagttttgaaatgtagtccagaaccatctgttcaattttcttcttttctacaccctgtaggtgtctcaaaaaat

SEQ ID NO: 92587 - DNA, 495 bp, Homo Sapiens
gcggccgcttcccccgcgccgagcgaggaggcaggttgcggcggcgagaggcggctgcgcggccatgggcgcgccagtgtcgccctagggcgggcgcacagaccacagccggagcggtggtggcagcctccgcagaaagccttcccgggcggcggcggcggcggcccctggagcagcgcggccgggatgagcgggagctgcgcggcgcccggcccgggctcgggctcctccccggccgcctgccgcttcgcgcactacttcgtgctgtgcgggatcgacgcggacagcgggctggagcctgacgagctggcgggcgaaaattttgaccagagtcctttgaaaagaacattcaaatccaaagttctcgcccactatcctcagaatatagaatggaacccttttgatcaagatgcggtgaacatgttgtgcatgcctaaaaggctatctttcaggacacaaacggacaataaagacccccagtttcactcatttata

SEQ ID NO: 92588 - DNA, 596 bp, Homo Sapiens
ttcttaagacataataataatgaaaatattacatatcagaacttacagaacactttcagggtagatatcagagaaaaattcatagaactaaacacttttattagtaaaatagtgaaaataaagtaaattctcagctgaaaagttaagaacctctccccagcaaagtaaagagaattaaaaaaccagagaaagaaacagtaaagataaaagtagaaattaatgagctatatatagaaagatagtagatctaagatacaattaacttgttaaaattctgtttcttgaaaacaattggtacatagaaaaaacaccagctaacttagtcaagggaagaaaaggagaaagaatacacatacataaacacaaataaagagatggtaagggtgaaataaacattgaaatcagaagaaaataaaaaaacaagagatattatcaaatatgactttttcacacttctaagccaataaatttgaaaacttagatggataattttcaaggaaaattttatttaccaaaattggactcaaagaagacagaaagcttagaaggatgctaggaaaatgcaataggctgataggctgaatgtgcaggggaaa

SEQ ID NO: 92589 - DNA, 783 bp, Homo Sapiens
gagactggagaccaaggtggctagaatccagttgggcctgatgtctccctgttgaaagggctccttgtggaatgaatagcacatggctcctgtggtggatctgatagtggcatagcaccaagtgatgcaggcctgccaggggccacagacacagaagatgctcccggggtcccccatgtactccagacacactgcaggccacctctcccagcaggttgccagtcatgggccccatcatcatgacttctgtccaaggtactgtgtgcagaaatgtgattgagattcaagtcagggcctctctgcccttttccctccagaaacaaaaccaagataatttatcctgaacacggtgaaaaaaggaagggagggaggagaaaaagtccgggtctcacctgggattctctgtctcctgcaacatgaaggatttagcctgggaggaggtggtgagaactctgggagagaaaaaagaaggaaagaatagttttacccatgctgaagttaatttaaaccttcacctagagaagcaacaaacaccacaacccacactttcccattcgggccctcccgcttcctcagagctcttccgccacaaggcaagcataagcataacagggattcaacccagcgcacatcactccctccaactccacacagtcgtgtcagacctcgccatccccatcaaccctccctcacctcctctcaccacgcagcgccgggcgacagcaacacggaggcacatccccgggagcccggccaacccgcaaggaccgcaggcacagcccc

SEQ ID NO: 92590 - DNA, 460 bp, Homo Sapiens
tttcaccaccccccaagtagctacacatgatgtgataatagtattggtggtggttttagagagttggagagaaaactgaagttggatttgggtaaaagaaaaaagagtgggaattattttttctccattctaaagcccataaagcaatgttaattgttcccacccctctgctattctgtctcctcaggtactgtgtgcagaaatgtgattgagattcaagtcagggcctctctgcccttttccctccagaaacaaaaccaagataatttatcctgaacacggtgaaaaaaggaagggagggaggagaaaaagtccgggtctcacctgggattctctgtctcctgcaacatgaaggatttagcctgggaggaggtggtgagaactctgggagagaaaaaagaaggaaagaatagttttacccatgctgaagttaatttaaaccttcacctagagaagcaaa

SEQ ID NO: 92591 - DNA, 1262 bp, Homo Sapiens
  misc_feature (918)..(951): n is a, c, g, or t
ttaaaatttagggggtaggaacgaggctctaatacaaactttttagtgcacgtttagctttcttgttgcgtccttaagctcttttaaataaggaaggtggccaatggatcatcctgtatgtattgttgacgttcttccatgttcccagttggtgactaacctgcagctcaactgtctattttcctctttaatggcacagtagcttgggtgaatgtggacagattcctgccataattgtgctttattatttgtagttcagctttgcactgtttgctttcatttgctagaagctttcagatagaagtaaacttttcaaaaacaaccctgcctttcctctggatgcatttgaaaaccataacgtatgatttctttttctttctttccctcctctctcatttaagatgaccttgaatgatgccatgaggaacaaggcaaggctgtcaattacaggaagtactggagaaaatggacgtgttatgactccagaatttcccaaagcagtgcatgctgtcccttacgtgagtcctggcatgggaatgaatgtcagtgtgactgatctctcgtgattgataagaaccttttgagtgccttacacaatggttttcttgtgtgtttattgtcaaagtggtgagaggcatccagtatcttgaagacttttctttcagccaagaattcttaaatatgtggagttcatcttgaattgtaaggaatgattaattaaaacacaacatctttttctactcgagttacagacaaagcgtggtggacatgcacagctaacatggaagtactataatttacctgaagtctttgtacagacaacaaacctgtttctgcagccactattgttagtctcttgattcataatgacttaagcacacttgacatcaactgcatcaagatgtgacatgttttatnnnnnnnnnnnnnnnnnnnnnnnnnnnnnnnnnntatttttaggtattttcacaaacaaactggcttttaaataaatttgcttccatattggttgaataagacaaaaacaattaaactgagtgggaagtgaataaaaaaaggctttaggtatcgattccatatttttcaaagccaaatatgtaaatgctaaggaaagtaaacaaagaggagattccaatcttgtaatttaatattgttattaaaactttaatgtatcctattctttaacatttggtgttaatataaaattacttggcaatgcttgacatttgaaataaacatttttctattgttttaatacaaaa

SEQ ID NO: 92592 - DNA, 444 bp, Homo Sapiens
tgctccatagcccacctctgggccctagtcttttccattggaactaactctagaggtgacctcttccagcccaataactttaaagcccacctatttgcccataggtgtctccagccctggccttcctgtggaaggaccataatcacttggcagccacaggatatatcaaaaatgagtcacaactcttgattccatccacctccaaaatccaggtattttccttaattctcattctttcacaactccacatatatccatatcctcattatctcaggacaacgtgaccatttcttgccacttcccacacttccatgcctaccaaagaagcctatcttctctcaccaggaccactgaaaaagtcttgcaactgatttcccttgtcctcttcttgcctctctacagtcaattctctatacaacagtcaacagtaagatttgtttaaaa

SEQ ID NO: 92593 - DNA, 723 bp, Homo Sapiens
tgaaagaagagatgattggacactctcaagcgtggtgctggagtttgtcatctcttgcacagccatctccacaccttagtgcttacctcaagttagttttttatattctgcaaagacgaaaccaaaataatccaaatttgacacaaatacctgggctacatcttatttgagatgtttaacaaatgtctggatcatcttttcttatatattacgcaggaaacactgtgaagtaagcaaagttggaatgcccaagtgaaagaccatttgaatatttacaagtagatttcagacaggaatactacagggtggtcacaggataacaaattctaggcagcagatttacatgacttgaggctgtgggctgttaagacgctgaaaaaccagggtgtggaccaagctggctaaggctgagtggacccaacgtggtgctggattggatggaggttttacctaggccctcattatatgctcattaacatactaaatcacacacccgccagtgccatgacagttctgagaccagtgtttgatgtaaaaatggcaccacagttccaagaaatctccacctttacccaggaattttcatgaacattccactccttggttaaagaaacccatcaagatgaaaccccagaacccattattctctcttgggtatgcccaagctcccctttcttgagagtgtactttttgctttgcaataaatctcttctttcactaaaa

SEQ ID NO: 92594 - DNA, 787 bp, Homo Sapiens
gcagtactctacggtttaaggtagcgaggcctgggtggcgaattcggcacgagggggacgcgtgggcggagcggggctggccagcctcggcccccatgacccgctgtcctgtgccctttcccagcgatgggcgtgcagccccccaacttctcctgggtgcttccgggccggctggcgggactggcgctgccgcggctccccgcccactaccagttcctgttggacctgggcgtgcggcacctggtgtccctgacggagcgcgggccccctcacagcgacagctgccccggcctcaccctgcaccgcctgcgcatccccgacttctgcccgccggcccccgaccagatcgaccgcttcgtgcagatcgtggacgaggccaacgcacggggagaggctgtgggagtgcactgtgctctgggctttggccgcactggcaccatgctggcctgttacctggtgaaggagcggggcttggctgcaggagatgccattgctgaaatccgacgactacgacccggctccatcgagacctatgagcaggagaaagcagtcttccagttctaccagcgaacgaaataaggggccttagtacccttctaccaggccctcactccccttccccatgttgtcgatggggccagagatgaagggaagtggactaaagtattaaaccctctagctcccattggctgaagacactgaagtagcccacccctgcaggcaggtcctgattgaaggggaggcttgtactgctttgttgaataaatgagttttacgaaccaggaaa

SEQ ID NO: 92595 - DNA, 442 bp, Homo Sapiens
tctgtagcagctcctcatacctcttcattgtaaagtggaaggagtaaagtgtaaacaaatgggcgtggctgtgttcctaaaaactttgacactcaagtgtgaatgtcatatatcttgtgtcagaaaatattctcccctccccccaaccatttaaaagtacaaaattcattctcagcttgtgggcagtacagaaacaggtggcgagctgaattgacccacagccttcccagcttttaaggaaaacagtcagcaatgagccagacaagtgaacaagataccgtatttcgcttgatagtgtatgtgtaaaataaaccaatagtctttttagaaaattgttttattgatgtggaagcaaactaggaaattatgtagtccatcatatccatcatgcattttaaaataatgcattcctggagactctttggctctgaagagaatcatc

SEQ ID NO: 92596 - DNA, 1084 bp, Homo Sapiens
gggctagtggtggtccctgtggctctgaacagcggtgtgtccctcctggtgcttgcgctgtgcctctctctggcttggttctcataggctctgcttgtgggatcagcagaggcttaagatgggatacatggcctgtgcagtgaggggacctgggtcctttgcttctgagaatgctcaactgaaagagaggccttctcatccccaagctctccagtcaacacagggctccctgtggtgacaccagtggagatgagggaacgggtagatggtgtgagtgaggggaacttttagagtggaactgggcatgtcctccgcctaccccccgagcctgtatttatttttgtataattctctggatgagggagagtggtcgtgagctggtcttggggcacaattacccagagatatatttattaacagccaacctgtgcaacctgctggagctttatttttaatttaatttatatagagtacctattattatatgccacaatagagctctatgagaaacagtgtcttgcggtgtagtgttctcctgtttgggcatgagtgtgcagggtggtcactttctgtgggaggatcacagtggggagttgggggtgggacgtggtcgcctgctgctgcttcaacatgtctttccttgaagatgtgtgtctcctcgtctcgtggtcctaatccatatggttctttgtcttttccacattctgcctgtgggaccctacaggtgtgtatttggatggtggtggggggagccagggaggaagagtggcagccacatgagggtttggtgtcagtcacatggttgcagtggtagctgtggtctcctgtggatgtggggacatcagttgtgaatcagccacaaggttttgaggttactgaaaaaacagcctttgacaccagcagggagaccccttagtccctgagataaggaaggcctcagaaaggaaagaggagttaatgtactgcagtacttggtagcacagttgctgtccacagacatcacatttctactaaaaacaggaagcccagaagctttgaaagaaagatatatatttattgcatgcaaataaaaaactgctcaaca

SEQ ID NO: 92597 - DNA, 455 bp, Homo Sapiens
  misc_feature (217)..(235): n is a, c, g, or t
atagatgtttgcttttgggaccactgagtaaaccaggccctgagaatccaagcatgaatccacttctgccctacttttaaggatttacgttccatgcaggaaagcagataaccataatttctgaataaataagacaacaaaatgaaatggatgctggtcaactctgatgcaaattttaagaaggagactatgcctctgtgtctcccagcttcacagnnnnnnnnnnnnnnnnnnngaaagatgctcagagtggggtacctacacttggaaaaaacgcaagtataagtctgccattcccatgaatccaagatgaatcctggcacagagtaggtcctcaaattttgcaaaattaattttgaatctttatcaccctggccaatgcactgccataatgcaaatcttactatctacctttctatgtcagtcacatttttaaaactgtgtaacctatgaaa

SEQ ID NO: 92598 - DNA, 469 bp, Homo Sapiens
attggggtttggaggaaaggggtgttgtcatgtattagtggaagagcacactgttcaaattttggagcagcataaattggcagtactataaaaattaaaaatctacacacccaacaatctagtaattccacttaattggtatacagaaatacttgcacaaattcgacaataatttatgtaccaggatatttatcagcagttttatttataataatggaaaactgagggcaatctaactataagtcaatacataatccatactctgaaatacaagtcattaaagttattaagtaatgtctgaagatattaacatagaaggatgagctcaatatattaatgaatgcaaaaaaatgtagaatggtatacagtacatatagcatagtaagctcaactaatggattcatggtacttgtttccattattttattgttgtagtagcagcagaaaagtagtaaaagtattttaaccc

SEQ ID NO: 92599 - DNA, 511 bp, Homo Sapiens
tatgtccaagactaggactgggttataaagattttcttttgtgaaggaaaataaaagaaaatttgccactactgcatttactttactattgtaaacttaagattcattccttagtctttggaattttgatgtctcaaaaccagatgagtggaagtgctgaatttgcaaaataaagctaagaatgcttaactctgcactttaagttctactctgaccaaattgaagatgagcagagcagccctgaacagcattttgtttatacagtcttgtttaagaatagaatttttttaactcttcattttttgtctctgtggaagctgtgtaactctttttaaaatgcaatttaaaacattttgttattctaacaattctctcaaaaaacagcatttccaatggtaatcggtattgttacgctgtacttatgtattccctgtacctgaacacttgttgctgcctcacaagaaaatagaacttttatgttaaaaataaagtctgttcttcttgaaaaaaa

SEQ ID NO: 92600 - DNA, 478 bp, Homo Sapiens
actatatctctttttattcacaacactatattctcagtgcttagaatgaggcctgacagactctcaatgagtatttattgaatgaataaatgtgtgagtaaatgaataagtaacatctgatctaaaaccagagccagattctttctgaccttcagcctaataatactttacttactataacctggagattcccattttgtaatgtcccctctatgaggcttgtcttaacaggtagatatgaacgaattgaagacacccacaatgccagctattgttttctatggcaacactgcccatctcagtgctggttcctggggcacatgacaagaatatctggttgagtccacaggagacagacctcatgggaagatgacacgatcatgaagcctgctcatctcctctactgtccagtgaacttgggcaaagtcactttaactctttggactttaatttcttgtttattaaacaagaaaaaatc

SEQ ID NO: 92601 - DNA, 499 bp, Homo Sapiens
gaggaggtctttagaatccccagccttcaacaattgcatctgcaaaggaatgccctgtgtgtgattcctcaagatttctttcagttgcttccgaacctgacttggctggacctccggtacaatagaattaaagcgcttccttctgggattggagctcaccagcatttgaaaactttgcttttagaaagaaatcctatcaaaatgttacctgtggagctggggagcgtaaccacgctgaaagcactgaacctaagacactgccctctggaattccctcctcagctcgttgtgcagaagggattggtggctatccagcgcttcctgcggatgtgggcagtagaacactctctccccagaaatccaacttctcaaggtttgtaggaggtgatttatgacaaatcacattaacgttgaagttacagctttttaaaatcagggcagaacctgtcttctctttaataacatcctgagaaatacaggagccatgggtcctctgaaa

SEQ ID NO: 92602 - DNA, 1015 bp, Homo Sapiens
ttgggcctgaagaacaatgactgctgtgggtgctgcggcaacgagggctgcgggaagcgatttgcgatgttcacctccacgatatttgctgtggttggattcttgggagctggatactcgtttatcatctcagccatttcaatcaacaagggtcctaaatgcctcatggccaatagtacatggggctaccccttccaccacggggaattatctcaatgaagagggccttatgaaacaagttgccgagagcctctcaaatgtggttccctggaatctgaccctcttctccaacctgccggtcgttagaagaaatccagatggtttctctgcgcaatccaggtggtcaatggccttcctgggaaccctctgtggggactgccagtgttgtggctgctgtgggggagatggacccgttttaaacctccgagatgagctgctcagactctacagcatgacgactacaatttctttccataaaacttcttctcttcttggaattattaattcctatctgcttcctagctgataaagcttagaaaaggcagttattccttctttccaaccagctttgctcgagttagaattttgttattttcaaataaaaaatagtttggccacttaacaaatttgatttataaatctttcaaattagttcctttttagaatttaccaacaggttcaaagcatacttttcatgatttttttattacaaatgtaaaatgtataaagtcacatgtactgccatactacttctttgtatataaagatgtttatatctttggaagttttacataaatcaaaggaagaaagcacatttaaaatgagaaactaagaccaatttctgtttttaagaggaaaaagaatgattgatgtatcctaagtattgttatttgttgtctttttttgctgccttgcttgagttgcttgtgactgatcttttgaggctgtcatcatggctagggttcttttatgtatgttaaattaaaacctgaattcagaggtaacgtaaaaaaaa

SEQ ID NO: 92603 - DNA, 442 bp, Homo Sapiens
ctccacttctgcatgcacggccagtggtcagccacgcctttcaggatcacgggcctccctggaaccaaaaactgctccctgaaatgctggagggacggacggtgcagccgggggactgttttttctaacttcacatctggaatcaaaccatggtccgcccttgctttctgtttaaaatcaaaacagaacaaaatagcaaccacctcaggaagtcgacatttgaggtattccaccaggaacctgtgtcaggggtaggagagcttagctgtcaagagtaccagtaacaacaatagacaacgtttgttattattactgctactattactatttgctcctcatgagatcaaggtggtttttttcttaaccatttcatcaaaaatgtttgtttcattataaactgctttcacagacattctgcaataaaggaaaacttactatctcc

SEQ ID NO: 92604 - DNA, 824 bp, Homo Sapiens
  misc_feature (154)..(208): n is a, c, g, or t
  misc_feature (244)..(325): n is a, c, g, or t
  misc_feature (737)..(745): n is a, c, g, or t
cagtcgacggtaccggacatatgcccgggaattcggccattacggccggggctcctgagtagctgggattacaggcgccctccaccgcgcccggcgaatttttgtatctttagtagagacagggtttcaccacagttggccaggttggtcttgnnnnnnnnnnnnnnnnnnnnnnnnnnnnnnnnnnnnnnnnnnnnnnnnnnnnnnngtgtgagccaccgcacccggcctctgagaaatattnnnnnnnnnnnnnnnnnnnnnnnnnnnnnnnnnnnnnnnnnnnnnnnnnnnnnnnnnnnnnnnnnnnnnnnnnnnnnnnnnnctcgttaaacacttattgattgctcagacgataaagaacttgctttggaaggaggagaggatagtcatgtgcttctgaatgtattgaacttcttgaaatctctttcctcatcaattttagcagagtttctattgaaactcctagggtgtgtctatggaagacagaactgagatgtgctgtcccagccttaggccctggcagtacgcattgccttttcacggcacacccactacagcctttcccacactgtgacactggagctggtgagtcaaagttgaagattattctctcttctaaagaaaatagaagaatattaggagaaaagacacttgaaaatgttcactcttttattcacattacatcatctgtcttgaataatgggtctatctctttcctgttgcttggcccctgnnnnnnnnnttagctttttaaggctgcttttgttacgtgtgcattttcttgtaatcctgtaattctgggatttaataataatagtatt

SEQ ID NO: 92605 - DNA, 837 bp, Homo Sapiens
gtgcaagagggtctcaaccccctgaaatggaagtggtgttcaaactgaccacggtttctaaagtgagccggcttttcttatgccatgataagccactgtgagaaactgcctccactcccagcacacacgtacacgtgcacacacagagcctacctgatgtgccacaaggcaccacaagaatagatccttctgatcagttctgttctggaactggttgcgaccagttcaggccttcgtaaagcccatgtccagtagtggcacaagtagcctgaatgtgccagtttctgtagcggagggaatggaggccgagcttgtccgttatctctgccgcgttcatagtattagggagatcctggagaaaagagtcacgtagcggctgatggctatcttcaagtagctgaaagtctatgatgtaaagaggatttaagcgttttatagagctctgtgaggtggactgaagatcagtggtgaaaactacagaagtcagcctagcagagtgtcagcagatgaagatgcaatggctgcctcagaaggcactcctgtcactggagatacttcgtttgtgcacaacttcagccacaattcatggggaccctgcagaagagacccttaagaggcatccaagtagcattcatagtgtcaggatataaagacaatactcagaaatgagcaagaagtcttagaaattccctcggttaccaagtataagcaggtaggcaaaatcttttgtttcgagaaggtatctgcacgcggacgcgtgggtcgacgatatcccgggaattccggaccggtacccagcctgctttttgtacaagcttgtttatattatatgcgcct

SEQ ID NO: 92606 - DNA, 429 bp, Homo Sapiens
  misc_feature (333)..(341): n is a, c, g, or t
gtgtgtttatggaagacaaactgagatgtgctgtcccagccttaggccctggcagtacgccttgccttttcacggcacacccactacagcctttcccacactgtgacactggagctggtgagtcagatgcatggcatgggaagccctctctaggaggatgctgtggccacacaagcgctggacgaaccgctggagttgaagattattctctcttctaaagaaaatagaagaatattaggagaaaagacacttgaaaatgttcactcttttattcacattacatcatctgtcttgaataatgggtctatctctttcctgttgctctggccctgnnnnnnnnnttagctttttaaggctgcttttgttacgtgtgcattttcttgtaatcctgtcattctgggatttaataataatagtattaataccaaa

SEQ ID NO: 92607 - DNA, 387 bp, Homo Sapiens
tttccaaaggaattcgctccactgtgttgagggcaatgaggacataaccagccacctcctggatggtctaagaagagaaaacataaatgcgtgatttctcttttgaggaactcaagaactcaaggtctaaaatgggtccagggagccctaggacgcccagttgaaccctaatgcacacgagtgctcaacaactgtaaaataggtagacgattgcagtcatggacacaggaggcagcatgtccacgatctgcaacaatccctgcacgttagcctttgacccctgtgataatgagcagtaagcattgttctggaacactgtgctctcatgcctcacggggttcaacactctccagtgaaaatggaaattaaaaagaattactttgaaaa

SEQ ID NO: 92608 - DNA, 567 bp, Homo Sapiens
ttttttagaacatttacaacactgtaagttttattcagttcaaatatcacatattagatatacaataccaattaattgaaatgaacagtacaagaatacatgaagtaaatatcataacatttaagtttcgtctcacttaggcaacaagaaatgctgagtagtattattacatattcaaaccagacttaaacttcagaaacagaaggccagatgagtgacctgtatcacaggatatgacaacacatcacctatctccaaacaagaaaaagcatgattattaagtttatctacaccagcttatttattcaaatttgctcttcttattaaacagaaaaaaaatacacattcaattcctaattggtaaaatcatttcacaactctaaaattaagatgctaatgacaccactctccactagcatgaaagaacaatatatgaatagagtacacagctttccaacctattaacaggttcttattttcagaattgagtgggaaattgtgtgtggggtaaacagcatgagagagaagtcggtcactggttgaactgttcacagtacaaaaaggtga

SEQ ID NO: 92609 - DNA, 484 bp, Homo Sapiens
tgaggttgccagcctccaaggtggccccagcaatcctcacattccaggtcatgcccttgtgtagtctcctcccacagtcaatcaggctggtctgtgtggccagtgaagtgtggcaggggtgacagtgtgacttctgaggctgggtcacagaggcatcatggcttcagcctttgcatcttcagatagcttgttctggggcgaatcagctactatattgtaaggatgctcaacctgccttgcagagagccctgtgtggagaggaactaggcccccagccaacaaccagcagtgactcactgtgagagagtgaatcatcttggaagtggatcctaagccccaatagagacttcagatgaaactgcaaccctggctgacatctgactgcagtggcataagaaacccttatgtcagaatcaccctgcaaagcccaaattcttgacccaccaagtgaaagagaataaatgacgattgttgtgtttaaaaa

SEQ ID NO: 92610 - DNA, 1003 bp, Homo Sapiens
  misc_feature (390)..(390): n is a, c, g, or t
ggggcttacagctattttgttacaaattaagtgtctagcagaaggaggagacctgaattcctttgaattcaaatcacttacagactcattaaatgatatcaagagtacaatagacgcttctaatatcagttgctttcagaataatgtagaaatccatgttgcacatattcagagtggcctgagccagatgggatacttacatgcctttgcagcaaataacaccaacagagactgagtaaagatttcattattccaactgcacgggacattgtttttgagaagttcttttcctttatataggcttccaacaccaaataacctaactgctggaaaacaagggaaatttaaatctccaaataaggcattttaatagactgtactgcttcttanaccagcattgctgaccagcattatatttatttttcttttattattcagatgcagtagcattgcttatgttacatatgtttatattcacaaatatttttaaactgaaatatctgaacataatataatttcgtggaagaatacattgaccattttttttaatgtgcatgaattcaccgcaacacatgcagacaactgctgcaatggagagtatgaagaaacctggtctttttattcatgtcggtggcagtgtggaaattccatccagaaaattacaactccacttgatttagttgatcaccatctcagtcttcaaaagataacatcatgaggtgtgggaagtcctagttttaaggaaaccactgaaatatagatgggaaatgtggactttacaagtatatgttatatatacttgcaatgtgacatggttctgtagatcattttataataataaatattttaatttatcataacatataaaagaaacctttgttgtttgttgaaagaaaatgaaggaacagggggaaaaaaggtgcaaaatgctaaatttctaaaaatggatttggcatgtcttcccatcagttcaggtcaaaagtgcattgttgtgagatttatt

SEQ ID NO: 92611 - DNA, 643 bp, Homo Sapiens
gaaacagcacaatacatttggagactctgtgttgcgcgacacaagttttacagactaaaccagtgtaacctgcaaactcagactgtcacagtgaacccaatcagcagcaggtcttcttcaaggatgtctctgcctaaaccccagccctacgtgatgcctcccccaccgcagttgcactataatggacattatacagaaccatatgcttcttcccaagataacctctttgtgcccaaccagaacggatactactgtcactctcagacaagcttggatagagcccagattgacttcaacggtcggatccgtaatggcagtgtctacagtgcacacagcaccaactccttaaataatcctcagccctacttgcagccctcgccgatgtcgtccaaccctagcatcaccgggagtgacgtcatgaggcctgactacctcccgtcccatcggcacagcgccgtgatacccccgtcctaccgccccaccccagactatgagactgtgatgaagcagctcaacaggggcctggtgcatgcggaacggcagagccactcgctgcgaaacctcaacatcggcagctcgtacgcctacagcaggcccgcggcgctggtctacagccagcccgagatccgcgagcaaccacagc

SEQ ID NO: 92612 - DNA, 481 bp, Homo Sapiens
gtaggttgataagatccatcgaagattgaatggctaggagtaattctgttctcgtataggcaacttaacttcactgtggaatccatttatctcaaagtttgagggctgtctactttattttcaagtttggggcggaaactcaaaatcccgagcattgccacttcagtagtttgtttgatttgcctattgtttaataatgagtacattcttattaagtgatgagtacattcttaattttaaggtatgtttttttcaagcagcttcattttattaggaaaaatacatactcatttgttgtaaacagtgattgtggggtttcattttctgaatgtactcaaaactcccaacaacaattgaacaggatgtttgctaatagaaaatctaaaacaggaatatgtgtatatggcatgaattagtcattgactttaagcttcttatccatacaaggaactaataaaatgtttattgacaacataaaaaa

SEQ ID NO: 92613 - DNA, 597 bp, Homo Sapiens
gcggccgcgggtgcacggggcactgagggacgccggctcctggacacggcctcgctctgcacctgggctcccgagggccccgccttgaacgcagctaagagccgtctccctcttcacctctggattcttcctcccaatctcatgtcagcaaatggcgagtggatgtcgctgctcgggctgagggcgcaggggcgccgctccaggggagcagcctcggacccgagcgtgcgcgttggcagccacctagtccttttctccgtcttcgctgcttccgccctgctcgatgtccgagtcggtcaagtgtgtgagggaaaagctggcaatgttggcgggagagatggagaaccgggagtaaggcgccgagtgcggccagctctgctccgtgctccgggccggtggcggcggagaaaagtacttggatgtttggagagaaggcttggagctgagcaggttacttgttgtctgtgacataaaaggatctggggagaagtcatcatcccactcaaagccaccaccttcttcggcggtggagctgtcggagttgatgcacctgctcaagtaaggagagcctggaggctgggctgggcctctcatgta

SEQ ID NO: 92614 - DNA, 574 bp, Homo Sapiens
gcggccgccccggggaaggcagaggccgatgactctggcgtggggcaaagctcggaccgcggcagccgttctcagtaggaggtatctgagagcagctcgagcgcagaccccctgcctaatagctacctccctgattcatcgtctgtgtctcatgggccagtggcagcgggtgacaggcggtcccccagcacttgtgcactctagtgcactcccagaccccaacatgctggtgtccgactgcacagcttcctcctcagacctgagctcggccatcgacaagatcatcgagtccaccatcgggcccgacctcatccagagtgagtcaggcagaggagccccacagggggtttcctgcagtgtccggcagccagctgtgcccaccctagctgtgtgaactcaggcagattactttcccatgtggaatgtgcagagtgggaacagtcacccctgtctcatggtggtaaatgaggatgtaatgagacaacactgtaaaggtctcagcctagcgcctggcatgacagactctcaataaatgatataaactgttgaaaaaataataaaagaacctcgtgcc

SEQ ID NO: 92615 - DNA, 580 bp, Homo Sapiens
  misc_feature (399)..(502): n is a, c, g, or t
catttttgagtatacttttattagatcagagaaatttggggttgttagagcagcataatccagcctatcctgactgattatccccacaggcatagaagggactaagttgctgttaaccgacggaagcagaattgtgaacccagaagggccattccctaggacatcttgacctcagtgatgtacattctccaaagactgtcctgaatctatctacttctcctaactccattccctacccctctgaccctccatttcagacttcctcctggatggttatgtcagggaggagaagcttttcctctgccctcttagattcagcatctggggcctgcaaattaaactgacaaaagacaaattagcaagagaaacggagttgtatagctttctgtgttttgtttnnnnnnnnnnnnnnnnnnnnnnnnnnnnnnnnnnnnnnnnnnnnnnnnnnnnnnnnnnnnnnnnnnnnnnnnnnnnnnnnnnnnnnnnnnnnnnnnnnnnnnnncaacgatagacatttttatatcgtgtatctaggaggttagaattgacgagcgtctgtaaaccaacaaaaggttagaag

SEQ ID NO: 92616 - DNA, 461 bp, Homo Sapiens
gcggccgccctgcgcgtgcacagcagagtccactgtaaggaccgtcccttcaagtgtgacttctgcagcttcgacacgaagcggcccagcagcctggccaagcacgtcgacaaggtgcacagggacgaggccaagacggagaaccgggcccctctgggcaaggaagggctcagagagggcagctcccagcacgtggccaagatcgtgacgcagagggccttccgctgtgagacctgcggcgcctccttcgtcagggatgactctctgagatgccacaagaagcagcacagtgatcagagtgagaacaagaactcagacttggtcaccttcccaccggaaagcggtgcctcgggacagctcagcaccctggtctccgtggggcagctcgaggctcccctagagcccagccaagacctctagctcagccgaagagggtggtcagctgtcggaacttctgacca

SEQ ID NO: 92617 - DNA, 614 bp, Homo Sapiens
tttttcagagaacgtttgtctgcctgatgagagccacttgggttaagaaactacctgtgaatagtcatcatttctgtccttcattggggaatacttttagaggccagtttccaaaaattctgcttaaaaaagaattctggttttgtcttactcttccagatgagatatcacagaggcttgggcctagattgtcatcagcatactgctatactattcgtttgttcttattaagccttattgtgtgtaatgctgttactttttcagagtgttgcggagataggaacatgggagagaaacaatctgggtaacatgaaagtgatgctggttgctaagggaaggcaacttgattctgtgggaagggctgtagctgatccatccgttgtctagatttgagtatgagcacagtggaagaggattctgacacagtaacagtagaaactgtgaactctgtgactttgactcaggacacagaagggaatctcattcttcactgccctcagaatgaagcggatgaaatagactcagaagatagtattgaacctccacataaaaggctttgattgtcctctgaggatgatcagagtattgatgatgctactcatggcgtatcagta

SEQ ID NO: 92618 - DNA, 538 bp, Homo Sapiens
atgcccaggtgccggtggctctccctgatcctcctcaccattcccctggccctggtggccaggaaagacccaaaaaagaatgagacgggggtgctgaggaaattaaaacccgtcaatgcctcaaatgccaacgtgaagcagtgtctgtggtttgccatgcaagaatacaacaaagagagcgaggacaagtatgtcttcctggtggtcaagacactgcaagcccagcttcaggtcacaaatcttctggaataccttattgatgtagaaattgcccgcagcgattgcagaaagcctttaagcactaatgaaatctgcgccattcaagaaaactccaagctgaaaaggaaattaagctgcagctttttggtaggagcacttccctggaatggtgaattcactgtgatggagaaaaagtgtgaagatgcttaatggtgttttgaggcatccctccaacctctgtgactactttatccatgaaaatgaagcaatggcaggtgggaggctcttcccaatgtgctttcttcatgcatgccaaaaa

SEQ ID NO: 92619 - DNA, 496 bp, Homo Sapiens
ctgagaaatgacgacctagatgtgggaagatggtctcaacgtattgttctgcaaaggagaaaaaaagcaggttgcaaaacactgggaactgtctgcccatcttcgaaaagtaagtcatatatctagaaaaatctggaagggtagtcacaaaaacatcatcagtaggtactgtggagagggtggatttcacgttattgttactttccccttttatattaatttttgtgcaataaacatgtgtatttgtaatcaataaagccaacttcttttctcttttcaagaaactgctctcttgcttggcctcatacctcccccaatctccttaatacaaaatgaaagattccagtggaccctgagagggacacccccgcagccctctcaggggcccccttgctagcacagagcaggtctccaccacccaaggggcaggtagaccagggatgggggtcgttgacagaccctcaccctgccccatgctttttttggatgatacaga

SEQ ID NO: 92620 - DNA, 478 bp, Homo Sapiens
tctatccacggccttctcaacagatgacttcaagttgatttcgtgctttatttcttaagaatagtgactaacctaagggatctgattcaatttattaggaacacagtgccaccttccaaaattacttacctaagaggactgagcctgctgtccctggagcagttagctaaaacagtgcctcagtacggagcgtacctgtgttaacttctagagtgctgtttccggcagctgctgaaatccacgctgaggttatcaagctcatcctacaaaataaagcaagttcttcgcaatttaaagcaaaaatctgggcttatttttagggttttgggggatgtgaaagttgtcttagataagattccaggaaagctaagaactaacgatgcaattacagtcacctttcaacaactttggggattgggttgaggaaggtgtgaaattgggaaatataataaaaggtattatattagtgactatcaaa

SEQ ID NO: 92621 - DNA, 860 bp, Homo Sapiens
tctcagttatgcagttgaaagcgttacaccagagagctgtgcctgttgtgccatttggagaagaaagctcggcaatggtgcagtgagagggacacacgttccccctttagtcctcctcctggactgagctggagagaaacagcacgaacaatgaagagtgtaaatttgaaaatagtaggaaacaactcgcttattttaatgtgtatatttaaaggcgttaattcaaaacatccagaagaaattaaaagcatccccttttcagtcagcaaatattaacaaagcccccactatgtttgagttgtgcttatggaatgaggtcttgaacatgtgtgaccttttttttctagaagagcaaagttgacctctccaggtcaaatgtttattttactcatttaaaataaaaaattcatttagaaatatatttcatattttccatgttccttaagtagactctatggaatataattagatcctagcttaatgatttaccacccacaatagtactgtctggccagtatttatgcttgggtacaacaatcctcttccgtctaatgagcagtctctaactatacggcacatttgctgtcatctaagaaatcagataaccctgattactagaactgtatttaaagtaagagtcaacatgacatgagtacgtgtcttcgaaaataatgtaattgagttttaatgaatgagtttcacaactgttctttcagctactgaatggctctgggtcaaagttctcaaagaccctggtgaggctgagaagtctaaccttgaactgtgtgaagtatttctgtacctaaaaatacctattcaaatatatttgaaacaagttattaaagatattaaacataaaa

SEQ ID NO: 92622 - DNA, 499 bp, Homo Sapiens
atctataaggttattttcatgattttgcaaatgggaaggatttctttaaagcaagacacaaaagcatacacaggaaaaaatgatgcataaacacatggcttctgtagaacaatagagactgtaaaagaacaagctacagacaaggaaatgtttgcaatgcatggaactgtcaaaggattcgtatctggaatacattaaagaagcaaaagaacctcatacaaaagtcattgagtaaatgacagccatgcattagaacagcaattctcaaaacttttggtctcaagatccctttacactcttcaaaagtgagaaccccaaagagttttcatgtatgtgggttaaatctattgatattttctgttagaatttaaaaattatgttaaaaaaataagaagaatgactatttttcaaaacaaaaaatgagaagagtggtattgttttacatttttacaaatctctttaacatttagcttaataaaagatagctggcctaaaaaaa

SEQ ID NO: 92623 - DNA, 612 bp, Homo Sapiens
tcactcaataaccagggaagagctaacaaaccagataatgcttgttaagaaagagcttccctatccatgctatgacccagccacacgcgaaggtgaccttacacttttacagctgacggaaaaagcaaaaattaaaaaatatgtgactatccttcatctacctaaaaagggggatgatgtgaaaacaggaaccatgtgccaagttgcagggtggggcaggactcacaatagtgcatcttggtccgatactctgagagaagtcaatatcaccatcatagacagaaaagtctgcaatgatcgaaatcactataattttaaccctgtgattggaatgaatatggtttgtgctggaagcctccgaggtggaagagactcgtgcaatggagattctggaagccctttgttgtgcgagggtgttttccgaggggtcacttcctttggccttgaaaataaatgcggagaccctcgtgggcctggtgtctatattcttctctcaaagaaacacctcaactggataattatgactatcaagggagcagtttaaataaccgtttcctttcatttactgtggcttcttaatcttttcacaaataaaatcaatttgcatgactg

SEQ ID NO: 92624 - DNA, 464 bp, Homo Sapiens
  misc_feature (242)..(242): n is a, c, g, or t
ctgaatcgcacgcagtaaagctggtgttctcctgaagccaacatttatggtatcaccttgctgatccaggcaaaatggcaaaagtgtagtgaacataaagccaggggctgagattgtggatgtcctctgtaccaagtttcttattatgaaaattccaagggccaattttgaaacaaaccaggcagagacccagatgcagaatcctgcaggctgagggatgttaggaagagttagcccaccanctgctgcgctgaaaccaggatgacgcaaacttggctcaggccagtagatcaataaaccaaactccctgtcacctcagactctgcacctgttaaagccctgtaaagagccgacatgtaaggacttatactgactggatacagagaatatggagcaaatcaaacgtatttaaatagtaaattatcatattgttataaataaaaatttacattgcatttcctttt

SEQ ID NO: 92625 - DNA, 430 bp, Homo Sapiens
  misc_feature (104)..(104): n is a, c, g, or t
caagaaaatcggatttaaagaaaggaaggatgtgcttgcatctgggagctcggtaaatctcttggcttctggtgtgcgtacaagggtgacgtctagctaccccnagcagtcgcgtcccagtttgctgttgatttttgcctgtttggatctgtctctgaggatggttaatacatcttattacaagcatttatctcatccctcccacaggaaatgtgttttcccagggatttgtatgttccctaaccttttatggaaagcagtttcttgatcatccatgtgattgtgtatctaaaatttcaagaatatttaagctgttaatcctgcttgtctgtagaagatgggtttatatttctatgatcttggaaatatttacaatgagcatgtataacaaggagaaataagcataaacatttatgcctgccacattcgt

SEQ ID NO: 92626 - DNA, 497 bp, Homo Sapiens
ccttacggaatcctccaggggtcagggagggacacagggccactccacaggctctccgagagcgccgcgccacgaggtgtaacctggagcaagaaagaggaaaaacaggaatacctgtgaaacccagcgcatgggtgcgttggtcaccaccgcacagcctccccgtcagacacccacgtttcgccaaaaatttattcaaataattactcctttgcttgttcctttcccaccgcccacttctgacatttttattcaaaagtaggaaatagaagagaaatatgtttgagtgctggtctgctgtgacttcattgaccttttaaatcctcaccatctagtacctaagcacagcgagttggacaaactctcacagtattcacaaagtaaattgccacaacctcatcagctcatccaacacttgtccatgcttttgattttgtccttcttaaaatgtacccttcttaaaataaaccactttatagacttgttttaagtgaaaa

SEQ ID NO: 92627 - DNA, 767 bp, Homo Sapiens
  misc_feature (28)..(28): n is a, c, g, or t
cgctatagtgactatagaacagttttanaaaaagcaggctggtccggtccggaattcccgggatatcgtcgacccactcgtcgcggacgcgtgggttggggttccaggcctcggccttcctgctccacgtgctcaagcccccacatggggctgcgacaccatctggctcctcacagggaggtccagccatgttctctgggctcccagtgagccccctgccctccagctacccccagaatccatccttcattcctccaccaagctcctgtgtgagctgcagcacccacacgggggaagccctgcactccagcagcatcttccagccttggcacagaactgatggcaaaggaagggctgggttttcagcttctgggacccgaggaagaccccacctcactcctccttccccagtacatcagactggttaggaggcatcccagaaggggcagcctcatgcccaggtttcagccctaaaggtaatgattgtcttgactctgccttggcatttcgctcggaatcacggcagacttggagtgtttcttcaaggcaggcatctgcttatgagcaaggtcaaagatttttcaaaatattgtgcattaattcattaaagctactgataaatatttgctgtttttagattggcgtccgtgctaattctgcaggtgtagcactggatattttatctcatttctgtgccaagaaagttcatctttatgtttttctaatacacaatcttgatcatgttttccaaataaagcttcagctcc

SEQ ID NO: 92628 - DNA, 495 bp, Homo Sapiens
tttaacaaaggaaaatttggtaactatttctggggtaaagattttacaatagcaagtattatcactagacattactttaaatgtggatttttttaaatcatggtagaaaacaatataaaaagtgttcatgtggcagttgttaagaatacacatcttcagggttttttaatataaaaaggggaaagaacagtctcattattatatgcatagtttctctgatttggaacaaaatttcccagtgatgtcattgtggaatgatccaagtgttgcctgtcagcagagataggagtgaagttgatgatgatggttagatggcctcacaagggactctagtgatagtaaaggttccagtggcaaacacacaagtgaaaagtttgaatatagtttcataatgtttgagagtgtaaaaaatgcattttaaaattaatgcattactttctgtactattttaaataagtgtgtatctaaataaacacaaaaaatgttatgagtaaa

SEQ ID NO: 92629 - DNA, 425 bp, Homo Sapiens
agatcaaaacatggtatgctattatggttgaactgtgctctccccctccaaagtatgttgaagtcttagcccccaacacctgtggatgtgactttatttagaaatacaatctctgcaaatgtatcaagttaacatgaggtcataatgaattagggtgaaccctaagccgatatgactggtgtccttctaagaaagagacatagacacacagacagaatgccatcatgtgatagcagaggcagaaattgaaatgatgcagctacagccaaggaacaccaaaggattgccggcaacaccagaagctaagcacagaacaggttcttccctagagccttcagagagggaatagctctactgacagcttgatttcagacttccggcctccacaacggtgacagaataaatctctgtagtattaagctaaa

SEQ ID NO: 92630 - DNA, 491 bp, Homo Sapiens
atggaatgtgatactccttgtgtagtagaaatgagttgactttcatatttaagagctgatcctatgaatgagtagacaataagctgaatagctgttacgatctgagttttaaaaatggaaaatgtttcatgttttagagaatgtaaacttccacaagggcagagattgttaatacgttgtccccccagtgacttaaaacagtactggcacatagtaagcactcaataaatagttgttgaatgagtgaatgtaggaaccatactggaatcaatattgaagctacatagaaagcaccacactgtggagttcaaacaatgtctttaagttgttctcttgaaaactatttaatttgtctgttactgccacttcttccatgcccagaggaacagccaaagttactcaagtctggaacacatgatttaaaaaataattctgggataggcttttggcttttggaaagtagcgcaaataaaactttttaaaatactgta

SEQ ID NO: 92631 - DNA, 914 bp, Homo Sapiens
gcggccgccaaggggccgtccagtgccggccccggtgagcgcggcagcgccctgctggagttcgcgggcggcacaagcttcggctccgagcaccaggccgcgttcgccgggccctcgggcgcctaccgggagggcgtcctgtgaggggcccggggccgacggcagcgcagcctgcagggccaccggcccctcccttggacggccggccccccgctcctcgggccccgggaggctgagggtcccagtcctgggtgcggtgccttccctcagccctcgccctgcggccccgggtctcatgcccgccgggtccgtgtgctcagccggagacgtgggggagctctggggagaagagcagcgcggaggcagcgaggccaggacgtcacccccacggagactgcgatatcccgtgggtgggcccgggctgtgaagcagggcggtagttggcgggcgatgctatttatttcactcggattccgacttgggtggtctggggagcaagggatttgtgtgtttgcaaccgggtgtggcggcgagggacggggcccggccacccaggtgggccagcgggcatgcctggcgaggccgcgtgcggttctggctgaccactctcttcccattcctcagctgcggagaccttggcgccctcccggctcactccgagctctgatcccgacaggcttttaactgcgccgcggcacagcgcggagcgcccttgtaggcttctccaaagggccggacgctcccagctgcgcgcaacaaccctctgcacaacctctgctcgctctgcgcgcatactcttactcttcacaacttcctctgtactggccctgcaacgaattcctagcgagcgcagcacacacaagccagactacccacacactctacggcccaggccatgcacgcggctcctcgcc

SEQ ID NO: 92632 - DNA, 118 bp, Homo Sapiens
ccgggagaacccgcttacacagctctgtttgtaatttttttcttcatgctaaaatcacacggcctatttgttgatgtaagttgcctgaattccgtggtatgctatcttcttttttaaa

SEQ ID NO: 92633 - DNA, 852 bp, Homo Sapiens
ggagcctttgtcgttgtgcacaggtgtgctggcattggaagaaccttgctgagctggaccagctctggatgctgaaatgtttacggtttaactggtacatcaatttctctccaactccctttgagcaggggatctggaagaagcactatattcaaatggtgaaagaacttcatattaccaagcctaagacacccccaaaggatggatttgtaatcgctgacgttcaactagttacaagcaattctccagaggaaaaacagtcccctttatcagcttttcggtcctcttcctctttaagaaagaagaataactcaggggagaaagcacttccaccctggcgatcttctgataagcacccaacagatatcattcgttttaattacctagacaaccgtgaccccatggagactgtccagcaaggaagaagaaaaagaaaccaaataaccccagacttcagccgacagtcacatgataagaaaaataaattgcaggacagaactaggctaagaaaagcacaatcaatgatgtccctaagtgccagctctcccctaaaagttccagctcatctcgcctggcctccccctgagtcagtgggactcccagacactgccaccacagctgaaattctcatgcagcatcctcacaggcaccctgggccccaagcatgactcatccaggttccagagccaaagtggactgaacatggaaagacttttattatagaaatgacaagatgctttgcacagtggagagctgaatttacttggctcccattagaaactctttcagcttaagtacttattgtggtagtgagtcctacggtatttcagtaaaaaggaattcatggcataa

SEQ ID NO: 92634 - DNA, 752 bp, Homo Sapiens
aacgtctcaaaaaataagaccaaacgttaatttccccccatacgtgggacttaccatgtaaaactccaaaaatccacatgctgtacatcaaatttttagatccaaaagatatccctgttttcttaataatgtaaacagtaaaactgagggtttcagttaaagggataattcgtaacaaaatcccatggttgaaacaatggtcaaacataaacatcttataattcagatctgcattcggtaacaggagaattgagagttttgatgctttgctggttttcccacagtgggagatgtagataccattgccccaaactatgcacttttcaggtaagctttacttttattttgtagcattaattcctatattgcaacgtaagggtgaacaatgaagctccaggcaagaaaagagaagtaagcagttttcctggacatattggccgaggtgaaaaatgtatagagaatcactggggcatcagctgcttgttgcgggaggggtgggggctctggacaccagggggtcctgacaaggctggggccagaaccctgaaccagtacacacggagacgccagcattcttccgtccagtgctgggggctcaggttatcagtgttagggagagtgtctgcgtgcggggtagaaatggaacattcgctgtaggttttttccttggaatcatcatcattattataataatcattattattatcttcattattctgaatactgtctcacatctttcaactccaaaaaaa

SEQ ID NO: 92635 - DNA, 487 bp, Homo Sapiens
tttttacccatcacctcaattttattttttgtggttagatatttgaaatttactttttgttatttaaatatacagtacattattattgactatagtcatcctgctgtgcaatagatttcaaaacgcatttctccggtttaactgaatctttgcatctgtgaacaacttcccatttttctccccagcaacacagcctctggtaagcatcattatactctctacttttatgaattcaatttttagacctaaatttaaatccaaaagctgtaaaacttctgtaaaataacaaaagggatatttaggtaactttgggtttggcaattactttgtagatacaacagtaaagtacataaaagacaaatttctaccatgaaagaagatattggtatgaagtcgttacaattaaaaacttttgctctgggaaaggaaataagagaatggagaaacaagccacagacggagaaaatatttgcaaaacacctgtctg

SEQ ID NO: 92636 - DNA, 477 bp, Homo Sapiens
tgcacagatcccaaggtccccttcagttggtcacaagaggaaatttctgacctgtacgatcacaccaccatcctgtttgcagccgaagtgttttacgacgacgacttgactgatgctgtgtttaaaacgctctcccgactcgcccacagattgaaaaatgcctgcacagccatactgtcggtggagaagaggctcaacttcacactgagacacttggacgtcacatgtgaagcctacgatcacttccgctcctgcctgcacgcgctggagcagctcacagatggcaagctgcgcttcgtggtggagcccgtggaggcctccttcccacagctcctggtttacgagcgcctccagcagctggagctctggaagatcatcgcagaaccagtaacatgacccatcgcctccaccaggcgcggcgtctcgactgttcttagagtgtatttctagtaaaatcagaagctcaccaaagcaaaa

SEQ ID NO: 92637 - DNA, 410 bp, Homo Sapiens
agtaaaagcccgtccaggggatatgagatcagtgagggataggaaagcaaggtgggtagaaacagcaaaacccttcccattgatgatggcagtttgtgcgtccggctggctggtttgcaggctcaacttcacactgagacacttggacgtcacatgtgaagcctacgatcacttccgctcctgcctgcacgcgctggagcagctcacagatggcaagctgcgcttcgtggtggagcccgtggaggcctccttcccacagctcctggtttacgagcgcctccagcagctggagctctggaagatcatcgcagaaccagtaacatgacccatcgcctccaccaggcgcggcgtctcgactgttcttagagtgtatttctagtaaaatcagaagctcaccaaagcaaaaaaaa

SEQ ID NO: 92638 - DNA, 627 bp, Homo Sapiens
  misc_feature (339)..(347): n is a, c, g, or t
cctccgcctccattagcatttaaattcactgtacagtccacataatttaaatgctaatggaggctggcaggacgcaacaactccatcttctgtgacttctcctacagaaggcccaggaagtgtgcactcggatacctctaactaatctctggccacacttttccctgagctacatgccttgataagtgcattcagagcaataggaggaaaaggaaagcgtttttgtagcccaccatctacagctttactgtaaaaccttgtcttattcgagaacttggtaaatctgttttttaaggaatcataatcatttgtatttatacttaaaaacacacaatgttnnnnnnnnntaaagcactttatccaattaggccaagatttaacattgttgacagtcctgtagctattttatcataatttattatcaatattttacattaatggtttcacagttgccaattacttggccttaagggtaaaaagtacaatatacactaaacctcaaccgttaaagcagatgcaaaaattcacctcacctaaattgaacttcttgcatatttccattactgacttggattgtctttctttcatatcactaatggagttggaataaagagctgttaaccaaaa

SEQ ID NO: 92639 - DNA, 867 bp, Homo Sapiens
ccatgtctccaagaatggccagacagtgagcggtttggacgccaactggttagagcacatgagcgaccacttccggaaaggaggcatgctggtgaacgcagtcttctaccttggaatagtgaatgattccttacatggcttgacagatggagtattcatctttgaagctgtttccacagaagatagcaaaaccatacagggctatgatgctattgtggttgaacaatggacagtcctggaaggtgtcgaagtgcagacagactacgtgcccctgctgaactcgctgccggcctatggctggcagctcacctgtgtgctaccaactcccgtcgtcaagactaccagcgaggggagtgtatccaccaagcagattgtctttcttcagagaccgtgtctacctcagaaaatcaagaagaaggaatcgaagtttcagtggcgattctccagagaagaaatgcacaacaggcagatgaggaaatcaaaagttacttacggcaataaatcatctatgagttagtgcaccgtgaggattgagtgtttatcgtgtcactaggaacagtcctggcctcatgtccaaaggattccagcccacaccccccattcactataagtttctaactcctggcagcatgatgacgtggtggaggaagacaaagttcccatggaaagctgcagagccagctaggcttgctgtgctttctcgtcatttgtagaaagagatggcaagtggaactcagatgccaccagtttcttcacagctctgagcatcaatcgcctcaagtgtgaaatggggtgaaatggcacccacctctttggatttttgtgaggattaataagatgtgaataaagtgcttggtccatggtaaa

SEQ ID NO: 92640 - DNA, 540 bp, Homo Sapiens
aagttctagtttacatgcatttttcttggggaaagtgcatagtttagatcagcttctcgaagtggcaaaagtatgggagttagggttaggaaccaccaggattgaataatcctggaatattatataattttctacttttgattttgctgtggtatatttctgaaaatgtgctgtggctcctaactagtaaaatgggctggtgagggactctggaattctgaatttctaagtttataacctaaaatgaaactgtaaagtcctcggtatttagaaaaatgcttaatctcagatttacagatggcctcatgataacttagattcgttaacagggtcaaactttagttcaacaaatttcaacccaatattatcacagtacaatagcttagaatgatcattagaaatggtagaaaatagaataaatcattaaagatcccaaaatgttgagttctgtagcatgaaaactctcttgctcctccatgtttgtagttcaggccagaacaaactaaacagaccaataaatataaaagtgatagtttaggg

SEQ ID NO: 92641 - DNA, 524 bp, Homo Sapiens
ttttttaaaacaatttatttcaataaatgtggagtaatactaagtctcatctttaaacctatgtaattatagttcacaaaattacagtcctcataacaaacaagtaaaaagaacttattaacagggaaaaagtacattggtaaaattggtgagtaaaataaacaaatgaaatgtatagttgctgagatcctatctttaaagtaatcctagaaacttctctaaaaatgattggggcatttttactccaacctctacaataaaatacacaatagtgcacttagtctgtactgccaccaagtgcttaaaccaattacttttaagattcttacagctactataagcagattctttcatgctatgagtagcaattttgaaaggctaaaagcaaaccatttcaaccatgaatggctgtaagagcattaaaattttgacatgaaaataaaatctcaaaagtgttaataaaacatcaaaaatcctaccagctcactggaagttcatggagtctaaaaatgtttttcagcttg

SEQ ID NO: 92642 - DNA, 459 bp, Homo Sapiens
ggggacggctgcagtagcgtggaaaggggggtgacgtcccgcggacttgaggcgggcagatctggggggccccgactccccagcggccctgtagtggtgcgggcgaaactctggccccagataggaccgggaactagatcaaacctacctggattcttgtgaaccattcatgtgaattatttggaactggaatttcacacagacccggggaatttctcaaagttcaagacgggtcatattccgtggaatacggaaggagttggagtgatttcacttttctgatcaagaactgatagccattaaaactcagctccgcaatatatccccccactccaagggagggctgaaatgatcacttcgttttctgttacggctacttttatatttttcaacattactgctggtctgtaagagaactaaaacatctgattttcctcatttccttgtaaagaggtgttc

SEQ ID NO: 92643 - DNA, 488 bp, Homo Sapiens
ctccagggtgaacctaactcatgcccatcttcaaacttggtccagatatcctgaaggggaaggggaacctgcttcagagtgaagaaaccagtttgaagtgtgaccctgcttcaaccaacagaatgttgcagaagtgaagctacgccagttctgggcttaaacgtcaatcaggcctagcaacttctcttctgtctggatgaaggtagacacagcataagaactacctgtgaccatgatgctctgagaagccagcctaactatgtgcagaggccacatggaggaaaactgaggcctccagcccacagccccagctgaatttctagatgcaatcagcactaacctgccagctatgagtgaggccatctttgaagtggatccctcagccccactcaagccacccagatgatgccatatgaactgcccctgccgagccctgcccagattgcagaatcatgagaaaataaattaaaaaggctttgtttaagtca

SEQ ID NO: 92644 - DNA, 542 bp, Homo Sapiens
tcaagaagtttggtggtgaaggaaagcagagaatccaagtgatagcttaaggatcaaggctggtttgaaaaaaaagataattggtgctttatttttcctctaggttaggacaggcttgagcacacttgtagctagagaggagagttgccagaaggacctgaagactgaaagaatggagattatttccggtcccataaaagtcaagagtgtatatgggatctacagcacagctagaaaggtttgacccaacagggagtagagacatttctttctctgtgacagaagggtaaggaaggagtaaagagaaagacgttgaagaatattatcaaatactgcagagattaatcgtacatttgcagtagacctgggatcccatgtagttctttagttacataatcaaggtagattttaagtatttgagtcaaatgaaccaggtttgtatgtaatcttaaaagttttttgcaaaatcatcaggacagtttcaataaaatattaatgaaaatgttataaaagcgttgactctgatttgggtaagaaaagta

SEQ ID NO: 92645 - DNA, 597 bp, Homo Sapiens
gcggccgcgagctgctgcgctcctggaagctggcctgtcgccccagctgactgcgaggtgttggagcctcatgattcaaactcatcgtgctccccgacatgattgttgcctccagttctctcagaattcctgactgtccgcaggtttccaaatcctccagcgcttgagaccagaagttctcctcttgttctgtctctgcactatcggcagcccctgcaaaaccactggctgtggaccggtcccagtcttcataactcagccccacatctgggtaagtctggcttcgaggcttagtgaatggggacaagctgcctctctgtttttgactcctccagccataagtggtgaaattgtattctgaaggctgaaaactagtgccctcagttccaatagctggtgtctattgtagaaccatcccatgaaatcacagcactggtcacacctggcacgtgggagggtaaatgtcggagagcttgcctcgcttctgtgctggtgaggagtcctcctcacatacccccagccctcaaatgggctaaaataaggaaatctttgggcgcgatgtgactgggcatctgtctctttctttattttcaaggt

SEQ ID NO: 92646 - DNA, 1975 bp, Homo Sapiens
  misc_feature (170)..(180): n is a, c, g, or t
  misc_feature (461)..(495): n is a, c, g, or t
  misc_feature (520)..(520): n is a, c, g, or t
  misc_feature (541)..(541): n is a, c, g, or t
  misc_feature (1340)..(1349): n is a, c, g, or t
ccaaagccaaggttttttattactggtcaaaaggtgctcgctaacaaaacagtgttggggagaggtacattccacagctctgtaggagccccagtggggccatcctgccccaccccgccccgcctttccagtgggcattgtaaggcatttcacacattggtgttttcacnnnnnnnnnnnatatatataaaaacaaaaccagtcctggagtagaaagaaagaccctgtgatgaacttttaggactaaactgaaatggaaaggattggagtgtgggattctgaggggctgggtcagtggccatggtggtccagccccccatggttggcaaaacccgctggaagggggcatgaggagagggaagggcacagctcacatgagggccaaactcagacaggtgcacccgtcttcatcattttttcacttttacatactgtagaaatttaagcaaaatagctatttnnnnnnnnnnnnnnnnnnnnnnnnnnnnnnnnnnnaattaggcaaataaagagttcaggngacactgagatggggcacccntaggggcctcctaggatgaggagggatgcaaggtctctggtgcccaggtcaccagcccaggctgggccaagggtttgttcattattgctgatttggggcctgggtctcagggcggggagcacctgcaggccctgccttccagcccttcctggcctcttggggctagggagccacccaggctggctagggtgaggccagggactgctgccctcaaatccacatgggcgttaccatcagtaccccctcctgcatctgtggatgggagctcccagaaactctgtgctctgctgggctggggcagcccccttctgttttgggctctgtggggccttggcaggtgggggtgtgggcagctcagataccatcgaggacttgatatgttgagctacaaaattctcccaactcaaagcggtctggcttcctgatgtcttaaaaataaggggctcttgccaggacacttttgtggcaagaaagcacacttggaaagctgtctgctaagtgcggtactaaaaatatttactaaacatcatggctggaaagaaatggagatcatttttctaaaaaagtcgaagaggctccctaggaggggccagttcctccctgggttgggggctggtgatttgcgcagcccatggcccgggccagccggcctgagttgtggtaactggggcaggggttccggtagggcccaggtccataatgaaggggcacgggtgacccggcgcacctgggggctggagagaacccaggtcagcccttcctccttccaaggtgggagtcccaagaaagtgtggggagnnnnnnnnnntaggaaaggaaataggaagggctgggaatgggctgggagaaagaccattcagtactaaattgagtgcattaatgaacaggtgggccaggctgtgcaggcgcctgtatttgttgcaagggtggcgctcagaagatgttggggcacatatgccagtcttgcttctccttggcctcccagtagccgcccttgtacacacaggccatctccccggtcagcggatccagcctcttctcaaaccacagtggcgtgtaggcatccgcctccttctcttcctccgagctgcagctgctgcccggcccgcaggcctccagccgccggcgccgcgacaggcgctgcttctcctccagccgctgcttctcggtattggcctcgtcccaacggcccttctccatcagccgctggtcgggccgcaggcggctgtcggttggcgctacgccctcctcgtgctcgttgagggtcagggccagctctgagaagtagtacatgttctccgcgttctccggcagcgggtacttcttccacagcagcttggctgacagggtctggtacactgtcttctgcttcccgtcagagctggggctgctgggactgctatgcatgaccttggagcactccatatcccggga

SEQ ID NO: 92647 - DNA, 575 bp, Homo Sapiens
cagtttttttaaactgtatttccactgtatttgcataattagggtaaaaaggatgtaatgagttagtagcaactcattacagcaactagcatgggtccttcttattgggcaactaaatagtgttacccaaatttaacagctgtccacatagaacacttaaacgggattgaatggctgagaaggggaggctagctatcaggctgtgtgttttcttttctccaaagctgccgattggtgactgaatgcagctttggaccatgccctgacactgcataaagggctctttggagccagctctactctaaacagcgtgctccgcttttgttttctccttcatctcaaacatatacctgtctcctctcccatgttacctaaggcaaagagagttgataggattatagtatcgttaaggcaacttaacttttctcaccattttaaataaaattactattaaaaatccacaggaagaaagtctatgaaatttgcagtttactttttaatcagatattaaatttcacttcattacttcacaatttaattttttcagtgtctctaaaagagagggattaaaaaaa

SEQ ID NO: 92648 - DNA, 812 bp, Homo Sapiens
caactcttttgctatcttccattaggaaaaaaataaatgaaccacagcgaagaagtagattatatgaggaaaacctttaaaaattagtggaagagaggatacagagtatccaaaaccagatgtttagttgatatatttcttttaaaatatacgttcacaaatctcattgcaacagaaggctatcccttttcatagtataaaaatggttaaaagcaatgatacatatttagagttacaaaaaataaacatctaagtaaagcagtttcaagcctaatgtacaagttatttggataagaaaatgggcattaagaaaatagcagacttgagatttaggttcactaggaccacttagtgtaagtgtattactggcaaattcaatagccttagagaggtcatcatggttagccttcttcaatccctctgcctagaatactgcaaggtatcaataaatgcttacttaatgaaggaatgccacatttgacatttggctttcccttcacttagcttccgtgaaacttttctgactgcctcgaaaatcacaggctatcacttggaattcagttatctgctattcttaaacaaatgtggacttttttattccttctgtggttcaactcagacactgcaactttgaactgaaataaatgattcactctctagtctaaatgtattcaactggttactgagaaaatttcagatttatactgcttcttccaacttgattacagtactttaatacctgcattccaaatgttaaactacctctaatcctttacatttgtaataaaaacaaatactttacatatttaaaa

SEQ ID NO: 92649 - DNA, 550 bp, Homo Sapiens
  misc_feature (149)..(171): n is a, c, g, or t
agtggagaccagattattaggtgcgagtatatcatatcaaatgctattacatttaaaatatctgaatgagagagatatttccaaatcttgtataaaaagtaataatagctagatggcagagtcacagtacattaaaattatatgtcccnnnnnnnnnnnnnnnnnnnnnnnttatttgtcccaattcccccacctttaattataatatagggataatggcctccaattctttatttagtatggtaggagatctttcaaatgatattgcatataaagtagctggcacttaagagctaatatttacaagggcctgttttctcttccctccttaaaacagatttattgtccatcagctaacttgtttaactttttaattacaataagtccttagtggagaccagattattaggtgcgagtatatcatatcaaatgctattacatttaaaatatctgaatgagagagatatttccaaatcttgtataaaaagtaataatagctagatggcagagtcacagtacattaaaattatatgtcccaaaaagtaaaaaa

SEQ ID NO: 92650 - DNA, 547 bp, Homo Sapiens
gagagagagatgatgggggatgaagggtatgggattgtatgctatggctgcctgctgtcgaagttctccaggaatcagctggctggaggaattttggaaggggtgaggcatacactttcttctatgttcctgaaaccacaacattgttaggactcatctgttcatgagaccagaccaatagaaaatgagcacttcgtggataaaaaatacagatggaaacttagtgaaatgtgacctccagtgctggagatggacctaatgggaagtgtttgagtcatgagagaatatcctttatgaatggcttggtgccttacctgtggccatgagttactacaagatctgattgttaaaaaaagattctaggacttcctgtccctctgtcttactcctcttttaccatgtgacatgcctgcttccccttcaccttctgtcatgattgtaagcttcctgaggttcccatcagaagcagagtagttgctggtgtcatgcttgtacagcccatggagctgtgaaccaaataaacttcttttctttataaattaaaaaa

SEQ ID NO: 92651 - DNA, 445 bp, Homo Sapiens
ctgaagggcaccccctccttctcccagaatgagtagctcattgccagaggacacacgcaggctggcaacaataactaatatgttatgagaggttagacaagtttaaataggattcgtctctgaactgaagggcaaattgtaagaaatttctttgtctgcttgtgatgctgttaaattgaaagcacaatgggaggtttggtggaagcaacaaaggttgaaatgatggcctgctgcttggagcaagcatcatggtttccccagtggtccagacatctgctgacaacagccactcctggtcaggttctgctccacatagggcgtgagaacactttacaccatttaactcatcagagtcttcgagctcaacactgtgctccacatcaagaatgtttttgtaataaaacagagctaattaaacatttcaaagggaaacattattttaact

SEQ ID NO: 92652 - DNA, 616 bp, Homo Sapiens
gagattgcaaaactgacctgtgtggttgaaagcagtgtattaagggcaaaagaggtcacctggtataaagatggcaagaaactgaaggaaaatgggcatttccagtttcattattcagcagatggtacctatgagctcaaaatcaataacctcactgaatctgatcaaggagaatatgtttgtgagatttctggtgaaggtggaacgtctaaaaccaacttacaatttatggggcaagcctttaagagtatccatgagaaggtatcaaaaatatcagaaactaagaaatcagatcagaaaaccactgagtcaacagtaaccagaaaaactgaaccaaaagctcctgaaccaatttcctcaaaaccagtaattgttactgggttgcaggatacaactgtttcttcagacagtgttgctaaatttgcagttaaggctactggagaaccccggccaactgccatctggacaaaagatggaaaggccattacacaaggaggtaaatataaactctctgaagacaaaggaaggttcttcttagaaattcataagactgatactgtctgacagtgcactgtatacttgtacagtaaaaaatcagctgatctgtgtctctagc

SEQ ID NO: 92653 - DNA, 589 bp, Homo Sapiens
gactgtttcggacttatgatgactgtgtgacgttccagctatttaagagtttcagacgtgtccgtataaacttcagcaatcctaaatctgcagcccgagctaggatagagcttcatgaaacccaattcagcagggaaacaaaattaaagctctactttgcacaggttcagactccagagacaaatggagacaaactgcacttggctccaccccagcctgccaaacagtttctcatctcgcccccttcctccccacctgttggctggcagcccatcaacgatgccacgccagtcctcaactatgacctcctatatgctgtggccaaactaggaccaggagagaagtatgagctccatgcagggactgagtccaccccaagtgtcgtcgtgcacgtgtgcgacagtgacatagaggaagaagaggacccaaagacttccccaaagccaaaaatcatccaaactcggcgtcctggcctgccaccctccgtgtccaagtgagctgcctgctccttctcgataatagccgtctcctctttatcatgctttttccccctgttgtttgtcaaaaaaaattgcctttaaattccaaa

SEQ ID NO: 92654 - DNA, 526 bp, Homo Sapiens
tttcaaaggcacagtagataccagatgctcagagcagagcagccatggagctgctgggaccaaaccttgcctgacctagccaccaccacaccccagacatataaatttaaattttactgatataaagaatgcaaaacacaaaatttacaaagatcataaaacatacaatgttgtgtattgtaaattagtcacctgattctcacagaaaacttgttaatttctgctgtactccaaagccactaatggatgaaacttacgattagttccaacatgaatattggttgacatttttgtttatgttaaagtcaaagctgaaagtgatacaatggagacttcagaacttcacttgtcagttatgtgagtgatttctttgctaaatgtttagtaactttgggatggtggaagaagattcattttttggtgctatttacaatgtaatgaatctgcattattaatattttctcttaagtctaaacagtcaacaaaacagtaagcgcagccccaactcatagtatttgccaattct

SEQ ID NO: 92655 - DNA, 465 bp, Homo Sapiens
agaggattttgttagagcagtgaaactactctgcctgatgctgtgatggtggagacatcattacacatttatccaaacccatggaatgtacagcccaagagtgaaccctgctgtacgctatgaactttgggtgatagtgatgtgtcactgtgggttcagggattgtaataaatctaccactgtagtgtgggggtgttgatagtggggaggctgggggcagggggaggagcaaagagacacatgagaactctaccttctgctcaattttgctgtgaacctaaaactactctaaaaaatgaagtctgactctttttcagcatgcattggtgcccaagtaaaaaccaaagacaatgtgctttgtatttggtattaggaggaacttaagaattttatgtatttgatgttttataatccattgtagtcattagtgctttttcaatttaaaatgctatcataaaaaaggtg

SEQ ID NO: 92656 - DNA, 482 bp, Homo Sapiens
ttcctcaggaatctgtggtctgtagatgccctcaagggtcaacatgtgctttctttgctaagatttggggatttctgacttcctgccagcttggtacggcaacaaggtgattctggctagagtctcagtagggctgccacctctcagcatggtgccaggagagggagccctggagtcatcagctctggacaggcctggaggtggcctttcaagtcctctgacctgcgcatcctgtgtgttgcaagtgaaggatctgacactagccttcattttcactcagtcatcaagctttctccatctccactgggtatagggtttggacactcagaaaggtacctccacctgggagacagcccaacttttctgtttccaaaaccaacatgaccaacctcccagatttgagacttcatgactcccttctctgtcaaccagcaccacaagggcatggttaacatttattaaatactcactgttctaaaaaa

SEQ ID NO: 92657 - DNA, 279 bp, Homo Sapiens
tttgtataactgatgatacatacatttattttttccaatcaagggttaaaagtttgatgaaagcgcattattgttaccaaaagtcttcaggcaataacagagataaaacttaacacagacaaacaatgattttatcccatagtctctgggacttgagaacccatttgagtttcagaaagaatactaaattaatgggggttatgtcaggatgccaatgtccatgctgaggcttctcctgatacaatcttttgcaacataaccaacaaagatcaggagctt

SEQ ID NO: 92658 - DNA, 1078 bp, Homo Sapiens
ggggacatactctgtcctgggtcaaaccccactggcagcaggaattctgaatgtattggggacccctccttaggcctcgttaagtctcaaacacagtacagctcacccagcattgctgacgactgaagattcagaaacaaaacctacacacagcactgaggtcttaatcatagcaaaatgtgataaaccatgttgtgaaaaacttttatacattgaagccatgaccattttgtgtctatcttactctagcacaaaaattgggggatgttaaaagatagttgtgtggaagctataaggttctgtctgtcgtgttactctctgtggaaatgagaggggtctcccatttacactaagcaaatttccattggtcaattttaatgatgtcttgaagcacaatttagctgagcactgagtagccatatgctttctgagtacaagtgtgtctgccttcttcaacatgtagggttgatcaagctaatacttaattgcaaatatcccttgtatgaggttaactaaaaaaattttgctatgtctgatccacatgtttgcattttgttcaactaaattaatatttgtagattgcaagttttgtttaaaataactttattgagtttttaagtcctgatctgttctaaggtgccctttctcacctcccattgattcagtgattctgaagttctttaatttgcaagtaaaataagtctactagagaggaggaaatcaggcacaaattgaccaattctcatgccatttgcaaagcaaaactgtaaggatgatgaaacctggctaactaaattaatggatcatttcactaaatcagatagaggaaatatcataaatattaacttgtctccctagaagctgagatttttcgccttaaatgacatggttgtgtttttgtaagagaaacttaatctaatctaataatgtgcatttaagtaagcagttctaagtcatgtatgacaatgcaattgtctgtttcctgaaaacaaataaatcgggaacaccatatccatttcaagctatcattaaagtgtaatttcctttgctctcttttactgggattatttgttttaaa

SEQ ID NO: 92659 - DNA, 1241 bp, Homo Sapiens
ggggctccaagatggctgcctccatagtgcggcgcgggatgctcctggcgcggcaagtggatcttcctcagctctctcctgcaggtaaaagatacctgctttcttcagcctatgtagacagccacaaatgggaagcaagagaaaaagaacattactgtcttgctgatcttgcatctttaatggataaaacatttgagagaaagttgcctgttagttctttaacaatatcacggcttatagacaacatttcctctcgggaagagatagatcatgcagagtattacctttacaagtttcgacacagccccaactgctggtacctgagaaactggactatccacacctggattaggcagtgtctaaaatatgatgcacaagacaaagccctatatacccttgtaaataaggttcaatatggaatttttccagataactttacattcaatttactgatggattctttcataaagaaagaaaattacaaagatgctttatctgtggtttttgaggtcatgatgcaagaagcctttgaagtgccttccacccaacttctctccctctatgttttatttcattgcctggcaaagaagacagacttcagttgggaagaggagaggaactttggtgcatccctattgcttccaggcctaaaacaaaagaactcagggggtttcagttcccagatgtatggctatgcacttcctgggaaggtggaaatgcagcaagggctacgggctgtgtaccacaacatgcctctgatatggaaaccaggctaccttgacagagcccttcaagtgatggagaaagtggctgctccccagaagacataaagctgtgtagagaagcgctcgatgtgctggatgcaagtgctgaaggctctgacttcagctgatggggcttcagaggagcagtccaaaatgatgaagacaaccacgggtccagaaaacaactgttggagcagttcagacatcgaaggaaaccagagcagtacaagcttactcaattacctggcaacgattctaaaggccttaacattctaaagcttcaaagctctggggacaaactgtgagtcagaagtctatataagatctgaccaccaagcttgtcaagggagcaaatctacacactggtgaaagccgaggccttcgccaccctatgattcagaatctggacaagagggatttacacctgacaggggatccagtaaagaacagcacaatggaaaagggaaaagagataca

SEQ ID NO: 92660 - DNA, 677 bp, Homo Sapiens
atgctccttctcctggccttcctaattgagcttgcatgactgcaagcccacgaaggttcgaaaggaatatttctgcatgtcacagtcccacggaagattaagtcaaatgacagtgaagtttcagagagcaagatgatctacatcattacaattgatggacaaccttacactctacatctcggaaaacaatcattcttaccccagaactttttggtttatacatataatgaaactggatctttgcattctgtgtctccatattttatgatgcattgccattaccaaggatatgctgccgaatttccaaattcatttgtgacactcagtatatgttctggtctcaggggatttctccagtttgaaaatatcagttatggaattgaaccagtagaatcttcagcaagatttgagcatataatttatcaaatgaaaaataatgatccaaatgtatccattttagcagtaaattacagtcatatttggcagaaagaccagccctacaaagttcctttaaactcacaggtgactgtcatcattctgatgttatgacatactagaacattgcctgtgtagttttcttgtaaatcatgaaaggaatttagttagctgttgagtaggaatattaaattttatgtatttttctacctttaaataaaacattgaaacttcaaaaaaaa

SEQ ID NO: 92661 - DNA, 545 bp, Homo Sapiens
ctggttgacgctcttgggccactctgattggcagcctgctttgccaaagagaactgtgtgaggttttggtggttagtaagagaagggggagatggccagcctgaagtcacggtcctggcccagcacaggtgggcagcagcgagctggcaggtgaagtgtgagcagcacgcaaagtgtcacgtgggccttagccgtcacccaccagcttcctcaccaggcaaggaggccccggagccttagcagggacttgcccgacggcacagctgattggtgctcgactcccagcatgcatattttgttgtaaaaacccaggtttgtaattcacatccacaaccctaagccttttaaagcggaggcaaacgttaacgaaccccatcgtggtccatggagcctttcaaaatgggtgccctggaggggcctgacagtgggttccttccatggcggatactcccttgaaatttcacattccatcaaagtttaaagcatttacttcagaataagttatttatgtgtatatgttcaataaatatagtttttaatttaaa

SEQ ID NO: 92662 - DNA, 463 bp, Homo Sapiens
  misc_feature (243)..(285): n is a, c, g, or t
tactctacactttttttaaccctaagaattaccactacagtaatgtagtggagtgggaagagtgcctggaatcagaagaccctgttgaggctgaatttagctgtatgacctcatgcaagccatttaaactctgtgcctcagcgtcctcatttttaaaaggaggtttgatctctatgtttacttccagctctgattctgggattctaatccacaggacttgggtgttagggtggaacctagaannnnnnnnnnnnnnnnnnnnnnnnnnnnnnnnnnnnnnnnnnngagcacttgcaatgtggctagtacaaagtgagatgtgctatcaatgtaagatacataccagattttgaagactagtattaccaaaagaatgtaaaatatcacattaataattttatattaattacatgttcaaatgatattttggatatactgaattaaaacatttaatttagaaaaa

SEQ ID NO: 92663 - DNA, 412 bp, Homo Sapiens
gagttttctataggaaataaatagctttctatatatgagttgctggggaccttcacattctcttttagaaagctgtggcatgcagtctcattgcaggactcctggaatattgtctggttcttggtatttactgtatgtaagcaacaacttgaaaggtggcaatatggtgtcgatttggactatgaatcaaaagacctttttcaggttctttcactattgtctgggggactcagaacaagattgttctctgtatttattgtttgtccatttaggtaacatctgtcttaccttcctcacagactttgtacagaccaaagcaacaaatatttattgccatgtatagcagaaaatgaaacatgcaacaaaagcactttgaaaaatatataaggaattgttgagcctgtctgaaaaa

SEQ ID NO: 92664 - DNA, 464 bp, Homo Sapiens
ataactcagaagcagtattcatggcttattcatttcgaaagccaccacaagtgatggtttaagctgttccaactttgtgttgttgtttttgaaataaaagaaaggctttttcttttcagtgttagaaaaagggaagacattcaagagagctgaaccaagcgctaagtatcctgaagatctaagatctaaggaccctgaagaccttagatctggctaaaaattataccaagaagcaagtgctgttataatcagagggatagggcaacgctgagcagtgaactcacagagcactcatccattcctttctgacatttgtcattttttatctatgttgtatttatttaagatcatgttttagttacatattgtaactaaaatatctcaaaacagagattgtgtatagtatttctcaaaacagagattgtgtatagtatagaaatactataaatatctcaaaacagaaa

SEQ ID NO: 92665 - DNA, 770 bp, Homo Sapiens
tcagctcggtaccgactgtatccaatgatcgcttgatgactgcatccaacgcgtgatgactgcatccaacgccgcttgatgactgtatccaacgccgcatgatgactgcatccaacgccgcgcggacgctacgccgcgacgagtaggagggccgctgcggtgagccttgaagcctagggcgcgggcccgggtggagccgccgcaggtgcagatcttggtggtagtagcaaatattcaaacgagaactttgaaggccgaagtggagaagggttccatgtgaacagcagttgaacatgggtcagtcggtcctgagagatgggcgagcgccgttccgaagggacgggcgatggcctccgttgccctcggccgatcgaaagggagtcgggttcagatccccgaatccggagtggcggagatgggcgccgcgaggcgtccagtgcggtaacgcgaccgatcccggagaagccggcgggagccccggggagagttctcttttctttgtgaagggcagggcgccctggaatgggttcgccccgagagaggggcccgtgccttggaaagcgtcgcggttccggcggcgtccggtgagctctcgctggcccttgaaaatccgggggagagggtgtaaatctcgcgccgggccgtacccatatccgcagcaggtctccaaggtgaacagcctctggcatgttggaacaatgtaggtaagggaagtcggcaagccggatccgtaacttcgggataaggattggctctcgggctagtcgggg

SEQ ID NO: 92666 - DNA, 432 bp, Homo Sapiens
aatcagctcgctaccagttagacggagactctcttcaaagttgaaaagaacttgaagagagagttcaagagggagccgccgcaggtgcagatcttggtggtagtagcaaatattcaaacgagaactttgaaggccgaagtggagaagggttccatgtgaacagcagttgaacatgggtcagtcggtcctgagagatgggcgagcgccgttccgaagggacgggcgatggcctccgttgccctcggccgatcgaaagggagtcgggttcagatccccgaatccggagtggcggagatgggcgccgcgaggcgtccagtgcggtaacgcgaccgatcccggagaagccggcgggagccccggggagagttctcttttctttgtgaagggcagggcgccctggaatgggttcgccccgagagtctccgtcgaact

SEQ ID NO: 92667 - DNA, 545 bp, Homo Sapiens
cacaggctccccgagtcagaacgtgacctggattcccttagcccggaggactgagggctgagagcctggcaacagcgtctgattgctgcccgtcagcagcttcaccgcgagctaatctggactgcagtccgacctcccgggctccctcatgctccacgtgattgccatggtcaggaaggcaggaagcaaaaaatgcagctcaccatccagacgccctgcctcgtgctcccgcgggctggctgcgccccagactcgggtttcagtagaatcaggatgagcctgctgggcagccgggtcacaggcccctaactcacctgcagacccacgcagatcagtcttcgcagtgagctcagggcagacctcagctttgctcaagcccggccctgccacaaacatgcctcacctcctgcacctaccctggccgttcctccagccaactgggcatgagaatgaaaactcccacaagttccatgggaatgcatatttgatgaactggaaaaatatcaggctaactaaataaaagttggatttccctgagcctcaaa

SEQ ID NO: 92668 - DNA, 758 bp, Homo Sapiens
  misc_feature (151)..(151): n is a, c, g, or t
attgtgccatccagttcaacctacaagcccatggatggtacctacagctttggcaagaacccccactttacttccatacagatttgaaaccagacatagctctttcacactaatgttggatccatgtcaaatacatagaggactacgaagntcaatgaaatgtattcttgcccaggctcatctcgaaatcctgggctcaaacaaaaattagctggatgtgctggttgaaacattctgttcttgaacagaggaaaaacactcttcacacagtgcttacgagtttatgaagtctttattggtactctgcacaccttcacacctccgtgagaagaaaacagtagatttatattagaaactgtattgaaaaatgtctacttcaaacacactcaaaggactttccggttgttttattgctatgccagaataccttcatgtaactgaaataacttggactaagcaagagagaaaaacgttaacaggccaggcctgggtccaacagtgaagaacgagaagattgttcttgaggcctagtcaatatcaatgtaagcatcacaatgaaggaaaacatgactacataaaaaattaacaacaaggaggctgatttccttttgagaggaaaaaattttaaaaacctgaagaattgagagcatagaaagaaacccatgtaatcatgtaagtacagtgcctgccacaaagttaacactatctgttcaatccatactgaaagaaaaaataaatgttgagacagtatctttaaa

SEQ ID NO: 92669 - DNA, 1359 bp, Homo Sapiens
cgctagtacgaggcctggtgtgaatcggccgaggggcgcctgcattcatgagcagatgctgggcaagggctatgagacggtggccgtgccccggctactcgaccaccagcatgcccacatccgcctacccgtctacagataaggcctgccctgcggacatacggacatgcggacagggcgcagagccgggaggcaggccgcagaacagggtgggcggctcgcaggggcgctcagccccaccctgtgcctgctgatgcccacaggggagccaggctggctgccgcctcgctgtggccggatggagggtggcagggcaacctcacataccaaggcccctccccaccatcggttgccccaggacacagtgagggcctgggggcagccactgacgcccatgccttcctttatctaagctggcagaggcagggagagagaaaccactcaaaaacaggaatggttctttctgggcctcctgggacaggggcccaggccaaggtggggtgcaggaggaaacaggcgcaccagagtcagggtgggggcagggcagcccccccagggtcaggcagctgtgtctccccacactggctccccagtattctggaaaaggggtacaggaggccgataggaagtcactgggcccaaagtgtctccccaccagccaggtgaagaccactctgacagaggctccaggactataccagtccccctgttccttcttcccctacccccacattccttctaacacagagttgcacccccatccccatttctccaaaaccctggactaacatattccccccttccctccaatacatcttatagggctgctgggtacagttgttcaggctgtgcactgcacaagggcaccttgtccaaggagacaccactttcacccaaacttgtatatttattacaattttctgcatcttgaggaaggggcgtcattttcctgttcgcacaaaggcaccacaggggctaacagtgggcctgcaatcttagatcccatccttgccttcttcgagggatctcttgggaccctcctggttttaactgggaggcccagaccaactcctttcctgcaaaccaccctccaaggcctgtcccacacgatcaaggcagggaaagataggcaggagtcccctcacgaagtcctcaagtcctggcccctctggcgctctggaagcggtactgtatctctctccaaggcctggtcaagcactaagtgcatttacaaatctctgagaatgttttttttatactaaaattgaccattatattctactgtgagaagtgcagtctgcactatattgttttaaaaacgaagagaaagaagaaaaaggaaaacccagatggtgtctc

SEQ ID NO: 92670 - DNA, 366 bp, Homo Sapiens
gcccagagtttgcaagtggcgagaaagtgagcattctcatacacagatgcaggtcgtagcttagatatcaccttccttgggaagccttctctgtctcctctgtccactggacttcaggaaatccaggtcccatatctggatcaggccgctctggtgaatgcaactttcctcagccctggtgcccagcccagtgtagcagtggcagcagttcctggagccactggacagaatcttctgcggcaaacctgagaaagaaaactgaaattactgctttgaagtgacgggttactcagaaatactgaaatacatattctataaaatgtaaacttttgattttgactctaataaaatgttaagcctttgaaa

SEQ ID NO: 92671 - DNA, 538 bp, Homo Sapiens
  misc_feature (112)..(147): n is a, c, g, or t
ctgcaggcaacaaggtttagggccgcggaagtcaagaccactgagcccggaatagcccagcactcgaggagagacttgggttcgagtcccgatgctgcacttgccgttcgcnnnnnnnnnnnnnnnnnnnnnnnnnnnnnnnnnnnncttgaataaaatcacatgcaaggcttccattcttacactcagtgctggaattaggacaacctcttcattccgtggggttgattctaagatttcagcctcgcttcagtcctgctctaaggtcgacaccacgcttgcttgatagttgaccgtgccttagttttcccgtcagtcaagtgggaagagcagcccatttcctgccgctccccgggccctgtcccgcctggacgcctccctccaggagcctgcgccccggccccggggtcagggttgggatgcgggctctgcaggcgccccggcgaacagctctacctggaggctgtccctgccccgcttagtccaagggccttggtgtgggggcctccgctgtcaaggcgggggaaccggttctctc

SEQ ID NO: 92672 - DNA, 1402 bp, Homo Sapiens
  misc_feature (411)..(437): n is a, c, g, or t
  misc_feature (982)..(982): n is a, c, g, or t
  misc_feature (1008)..(1008): n is a, c, g, or t
  misc_feature (1038)..(1058): n is a, c, g, or t
  misc_feature (1097)..(1097): n is a, c, g, or t
  misc_feature (1156)..(1202): n is a, c, g, or t
cagctggggatctataaatccaatcctggcatcattggacttggaggtcttgtgtcctctatagcaggcatgatcactgtggcatatcctcagatgaagctgaagacccgttagggtgtttttaggcttggaactagtactactttaaaagatggcctcttggtgggacagacatttgtataagtcacaggccatgtcatactgtgcttaagttcttgttcatgtgagcatttaacaacctgtgatgtgggcagagatgaggccaagaacggagaagggaggagcatgaagagttgtatgtttttggagtgctggagtgacttgtgaatttctgaatattttcccttcatctaacattgattgaacatctcttatgtgcatagtgggagcttagtatttgctgaatgaatnnnnnnnnnnnnnnnnnnnnnnnnnnngaatgaatggccctcccaacaacaactcccgccccaccctctcccccgaccgcccctcggcacgcacgtcctcgcacccaactagacccctctccaccccgcccgcccctccaacacaccccatcccgcctgcgcctgtgaaaatactctttctactcggataagggagtgcacgatgccgggcggcgccccggcccctagcccacaccacgcaaccctcctccgccctctcacctcaccaattacggtggggtagagggctggggcggggtggaagggtgtgttttgtgctcgtcgcacagacctactcggtcgtccgcgccaacacacacccctgcccacgacatgcactctgtgtctggacgcctgtcttcccgcccccactccctgtcctgctccatgatatccttcctcgtccatcctcccgctctagcctcctccgtctcaccctccctcgttcttttctttcacgtcgctcgctcactcaaagcgaaacatataaagagatatatagcaccacacctgtgagcaaaccaaccccacangcgtcatcaacggcccaactggcttngtgtatgtgatattatcgtgaagcactctnnnnnnnnnnnnnnnnnnnnntttctctcctggctccagtcgcttatcaccaccaatctngctacgccgcaccaccgcccacgtgcgccaccctccctctcgctccctccgaccggccnnnnnnnnnnnnnnnnnnnnnnnnnnnnnnnnnnnnnnnnnnnnnnnatacacagatggtcttgcatcgctggagtctaatgtacttttagaaaaaataaaaccgttgagacaggtgaactagtagaaattagatactgcgctgggagcagaaaaataaaaccaaagagacgacccattccgcgagcgcacgcaccccacacaactgagcgcctcttctcccccgctatgggcgacacgagtctgct

SEQ ID NO: 92673 - DNA, 582 bp, Homo Sapiens
agcgaggccgtgcccttgcccaacgaggagaagaacaagctcacttctgaggtggtcagcctggcgcacaatctcatctacttcggcttctacagcttcagcgagctgctgcggctcactcgcacactgctgggcatcatcgactgtgtgcaggggcccccggccatgctgcaggcctatgaggaccccggtggcaagaatgtgcggcggtccatccagggcgtggggcacatgatgtccaccatggtgctgagccgcaagcagtccgtcttcagtgcccccagcctgtctgctggggccagtgctgctgagccgctggacagaagcaagtttgaggagaatgaggacattgtggtgatggagaccaagctgaagatcctggaaatccttcagttcatcctcaacgtccgcctggattaccgcatatcctacctgctgtctgtcttcaagaaggagtttgtggaggtgtttcccatgcaggacagtggggctgatggcacagcccctgccttcgactctaccactgccaacatgaacctggatcgcatcggggagcaggcggaggccatgtttggagtgggg

SEQ ID NO: 92674 - DNA, 423 bp, Homo Sapiens
tctcaccactggtggtgcagcccccaagccaaagccacgtcttctgcctccttcaagaggagggggagggcaagtaccgcgctgagtgcaaactggacaccaagacaggcttgaggcccgaccaccggcccgaccacaagcttggagccaaaacccagcaccggctgctggtggtgcccgagaacgagaacaggatggaggacaggctggccgagacctccagagccaaagaccatcacatctccggagctgaggtggggaaagcaagcacctagcatgacaatggccccgttgtgtgtggtgggggtcggggttggggggcatggtgcagtcggccttcacgtaaactaagtaggcaggtaggatctgaagaaggcacaggtgcaagtaaaattcgtcaattaaaccactattttgattaaa

SEQ ID NO: 92675 - DNA, 1094 bp, Homo Sapiens
atcagatccaacagttaaaacagatcgactgtggcacgacaagtatactttgaggaaatcggatgattccttcgtttatgacgatggatcagtctaggaaggtcctttgataggaaaatcaataaatttcttgcaccaagttgtcatgatcagactcccactacaaagatgatagctgtgaccaagtctgcagagatcaccccaggacgctgcagacctaattcacagacttggaaaatgcatttcaggggaagattgatgctgcttatttatgagaccagcaaatacctgttggatgtactcaataaaaagtacagcattgctggaccacatgcaggcaagtgaggcggtaccatgcttcataggtcaaggagactttataaggcacttaatggacttgctaaaaccagaacttgtccgtccagactacgacatatagtatacagcataacattgactggaattctagaaaccgctgtcagagccaccaacgcacagtttgacagtcctgagatcctgcgaaggctggacgtgcggctgctggaggtctctccaggtgacactggatgggatgtcttcagcctcgattatcatgttgacggaccaattgcaactgtgttcactcgagaatgtatgagccactacctaagagtatttaacttcctctggagggagaagcggatggcaatacatcctcaatgacatacggaagggacacatgtgcaatgcaaagctcctgagaaacatgccagaggtatccggggtgatgcaccagtgtcacattttggcctctcatatggtccatttcatttatcagatcacgcatcacctaccacttatggcgactcaatgttcttggtatgagctctggaaccaagtccagcaggctcaggatttggctcatatcattgctgcacacgaggtgttattagacaccatcatctcccgctgcatgctggtcagtgaatccagggcacttttaaatcaacttagagttgtgtttgatcaaattattgaactccagaatgatcaagatgcaatatacagaggtgttatggaagcctcgcaaaatcaaaccagggagagaaaaacac

SEQ ID NO: 92676 - DNA, 527 bp, Homo Sapiens
  misc_feature (49)..(86): n is a, c, g, or t
  misc_feature (257)..(376): n is a, c, g, or t
cacaggcacggctgcgggggcactggggaggaagtccgcagggatgccnnnnnnnnnnnnnnnnnnnnnnnnnnnnnnnnnnnnnncagctgtcctgtaaaatatatttacaggaagggtatcaaggggagggtgtcccatggagaggtggcccggcacgggaactcagccagtcggagaacagagacccgctaaagaatggggagctctgggagcaggcggggaggtggagctgagggcgggtcacagcaggtagnnnnnnnnnnnnnnnnnnnnnnnnnnnnnnnnnnnnnnnnnnnnnnnnnnnnnnnnnnnnnnnnnnnnnnnnnnnnnnnnnnnnnnnnnnnnnnnnnnnnnnnnnnnnnnnnnnnnnnnnatgaggacgtcctgtgcacagctggcctgctgcctcccacgtgtcaaggctggctcgggagtcatgagaggctgaggaaccttccagcccaaggagctggacaaggtgtggcagctgcaggcagccgggatagggacgcagactttcctac

SEQ ID NO: 92677 - DNA, 459 bp, Homo Sapiens
  misc_feature (257)..(281): n is a, c, g, or t
acgcgatttatactttttgtcttctaattaattgtcgaccctgaataaggtggtacaactaaggcatattatggaaaactggcattattgcttaatgtaacatgagggattggaatttctttaaagtaattttaagatatgattatttagcagaaatattcactggagcattttacttttagaaattatcgtcacacaaggaagcctttataggaccgactacctaattgcagtcaaagatctcttgaatgaatgannnnnnnnnnnnnnnnnnnnnnnnnttttaagaatatagtggtcctatatttttaaaaatttttgccacattttttatatctgaacagaacgtatgtgtctaagcagatgttttaagttatatccttcatgtaggtgagtctgtaaatgtaccatttaacttaaatggctttgtgggaaggtagtttgaggagtttaaaaagg

SEQ ID NO: 92678 - DNA, 320 bp, Homo Sapiens
ctgacacatagcagatcttcaggtgcaagagattcagactctttgtgctctccttcagcaaggcacaggttgaactcaggaaaagtaagtcagagattaaataaatgtcttcatataaaggtgtgagtttacaaagaagaatcaaatgaggaacccaagcaactgttgctttcacataacttggaggtttctaaggcagtgtttctcaatgtcaagatgtcacgtttcaaaagacaacctgaattctcagatgatttcaatgcaagattaattttcacttgcctccattttacaaataaataaatgccatactgtgaaaa

SEQ ID NO: 92679 - DNA, 493 bp, Homo Sapiens
  misc_feature (109)..(109): n is a, c, g, or t
cactatccaatagacatagtaacaaccccttgttgtgacaaccaggttgagaaccacagttttaaggaagctttctgctcattactgaagtcaggcaatgctgtcagcnccacattttctgctggctgtggaaccacctggtgaatgctgcacagtgagagagggatgttattataaatcgaaaactcaaggcaccataccaataaacatgaataaaaactgtaggaagatgaatgtttggtgtggcaggcctcctgagaaaagtagctgatttttctgacatggattagatacttactcaaccgtcccagaaacatctgagtgtttatatatggatgaattccttgtggacagatggattggtcactttgcaaattattttagcgacttccactacctcttgctcttaccccttccttttatcatctgattctgcactttctaaccaaaatgtggccccaagcctaataaaaatactatttctatattcaca

SEQ ID NO: 92680 - DNA, 500 bp, Homo Sapiens
ctctcagagcaatgtcatgctgggggtccactcctccctggccatgtgtactgtaaggagttcttctctcaatgtgtgacctgccctgtctatcaccagtgggtatctgagcttaaggcctctgtaatgagatgtgaaaagagagaattgatgtccctgactaacagcatcagaccttttgacacctgcttgaccaggatttggataaaaggagaatttctgcaggaaaataactcttagaaaagaaacttaggaatacagagatttgacagagtggctgatgtcaaggagaacaaggatgcagaagaaactcaagatgtatgtattaaaacaaaagaacaataacctgaagggaccatgattctgttattgtatataacacaaggaaatgccccagattctcctttaaaagatataatgtacatattaagtatactagcctttatagttactgctatctacatgtttatcaaaataaaagactatttttttctaaaaaa

SEQ ID NO: 92681 - DNA, 2010 bp, Homo Sapiens
  misc_feature (926)..(926): n is a, c, g, or t
  misc_feature (1628)..(1628): n is a, c, g, or t
ggcctgggtggcgaattcggcacgaggaggagagccaccagcaagagacagagcagttttatttcacaaaaatgaaagagtacctggagggcaggaacctcatcaccaagttacaagccaagcatgaccttctgcagaaaaccctgggagaaagtcagcggacagattgcagtctagccaggcgcagctcaactgtgaggaaacaggactccagccaggcaattcctctggtggtggaaagctgtatccggtttatcagcagacacggactacagcatgaaggaattttccgggtgtcaggatcccaggtggaagtgaatgacatcaaaaatgcctttgagagaggagaggaccccctggctggggaccagaacgaccatgacatggattccatagctggtgtcctgaagctttacttccgggggctggaacaccctctcttccccaaggacatctttcatgacctgatggcctgcgtcacaatggacaacctgcaggagagagctctgcacatccggaaagtcctcctagtcctgcccaaaaccactctgattatcatgagatacctctttgccttcctcaatcatttatcacagttcagtgaagagaacatgatggacccctacaacctcgccatctgcttcgggccctcgctaatgtcagtgccagagggccacgaccaggtgtcctgccaagcccacgtgaatgagctgatcaaaaccatcatcatccagcatgagaacatcttcccaagccccagggaactgggaaggccctgtctacagcagaggaagaagcatgggaggattactgtgataggccctcatggagagactacctccgttgaagactcaacccaggatgtgaccgcagagcaccacacgagcgatgacgaatgtgagcccatcgaggccattgccaagttntgactacgtgggccggacagcccgagagctatcctttaagaagggagcatccctgctgctttaccagcgggcttccgacgactggtgggaaggccggcacaatggcatcgacggactcatcccccatcagtacatcgtggtccaagacaccgaggacggtgtcgtggagaggtccagccccaagtctgagattgaggtcatttctgagccacctgaagaaaaggtgacagccagagcgggggccagctgtcccagtgggggtcatgtagccgatatttatcttgcaaacatcaacaagcaaaggaagcgtccagaatctgggagcatccggaaaacttttcggagtgacagccatgggctgagcagttccctgactgactcctcctccccaggggtgggggctagctgccgcccatcctcccagcccatcatgagccagagcctccccaaagaagggccagataagtgttccatcagtgggcacgggagcctcaactccatcagccgccactcatccctgaagaatcggctggatagtccacagatccggaagactgccacagcgggaaggtcaaaaagcttcaataaccatcggcccatggaccctgaggtcattgctcaggatattgaggcaacaatgaactcggccctgaatgagctacgggaactagaacggcagagcagtgtcaaacacacccctgnacgtggttctggacaccttggagcccctcaaaacctccccagtgggtggcccccacgtcagagccctccagccctctgcacacccagctcctcaaagaccccgaacccgccttccagcgcagcgccagtactgctggggacatcgcctgcgccttccggcctgtcaagtctgtcaagatggctgccccggtcaaaccaccagccacacggcccaagcccactgtcttccccaaaacaaatgccactagccctggtgtcaactcatcaacttccccacagtctactgacaagtcttgtactgtctgagggataataatttaattgttctagacaaggggactatagggactgcctgttattaaaatcttcctatttaaataaa

SEQ ID NO: 92682 - DNA, 470 bp, Homo Sapiens
  misc_feature (83)..(91): n is a, c, g, or t
tttttgggtaaagaaacagttttatttttggttaaacgagttatttccaagaccatttgaccatggaacaatccctcccacannnnnnnnngcatgatatctattaaagttccacaaaattcatgttctttggaaaataacttgggaattactgattgagcccaatttctgaattttattggtaaagaaaaaggtcctgagaggggctgaagttcttacaggaagttagtgggggaggtaggacgacaaccctatttcctgagtgtctggcccaaccttgtcaaccacacgcaaatacggcagcattctcaaaggtgggttctgggatcccagccatcatgggtactgcttgagatgatacgcaaaaaggacatgaacgttttcctccctaatgggtcctttgggggcaatttgctaaaacataacaggttgttttagatgcttcttaaaattggtaatcatatcccatt

SEQ ID NO: 92683 - DNA, 452 bp, Homo Sapiens
ccatttggaagtggtcccttcaccagtaacaattctggatgattacagttctgctgacatctggactgtaacctcttgagatatcctgaagaactatagagctatgttgtttctgaattcctgacctacaaaaattttgagataacaagtgtttttgtttgaagccacaaaattttggggggtaatttgttacacagtagcaggtgattcatacatcttgttagagtttgctcatgttatctgaggcatgaaagatcaatgaatgcttttcccacagttactgaattcacatttgcctattatgcattctcgtatgcacagaaaggtaggagttacttgtgaaggatttcccgcaataattacattcatagggtttttttccagtgtgagttctcatgtgtttcttaacggacgagagaacattaaaggattttccacaaaacctgcaaaaa

SEQ ID NO: 92684 - DNA, 517 bp, Homo Sapiens
gctgtagcttatgctaaatgttggttggaacagacaataagttatggagaacttcagaggacactaaggttggatgggatcttggaagttgtgcaggtcaatgccactccagctattggctgagtttcactaggttaatacatgaacaacaacaaaaataacctagatcagaagttaaagatcattttattgactatctgccgtgtctgtgccattgcagtgtactaggtgcacttacgagtcctctacttacaaactgcttttcacaaaatatgaaactccaggcaaaggttcagacatacgacgtttgtttttaaaatctttctacagccttgtatcctttttcctttccttccttttaccctttttaaaatgtgttatgagttttatcttagactaacatcatctgtaatgttgatatacgccagtattcagttgctgtgtttgatgaatcataaaatggtgtaaaacttcaattagtgtactttttaaataaagtatctatgaatgcatccag

SEQ ID NO: 92685 - DNA, 441 bp, Homo Sapiens
tctttttggaaacagggtcattgcaactatagttagttaagatgaggccatgctggagtaggccgggcccctaatccaacatgactggtgttcttttaagaagaaatgatttggacacagataccacacaggggagaacaccatatgaagataaaggcaacaatgggaatgatgcctttgcaaaccaagtatgccaaagatcaccagcaaaccaccagaaatagaaaggcatgaaatagagtccctctcattgttttgagaaggcaccaccaccctgtggatggcttcatcttgggcatctggactgtaagacaatgtggttctgttgtttgagtcacccagtctgtggtactttggtacagcagccccagcaaatgaatacactgagaaatgtaacaattgaaaaataaatttttagaaatacgtttgtcctaaaaaaaa

SEQ ID NO: 92686 - DNA, 454 bp, Homo Sapiens
taggccctcattggaggatctaaacgcctctcttcggcgtggagacgggaagggacgactcagacgaggacaagaagtgggcaggggagaggcggttgttttgcttcagccgcgggtggggcgcaggcgagagtgggaaactgggaaggccgggctctggggaggtgttgcggggaggggaaaggcccggatgttccctaacaatgaaatcatcgccgacctatcagagccgccgagctgggatacctgcctgacctgtaccccggagggagaagagtgggcgggaaattggggtgtcggaagaacctggaaagcaaagtgagaaagtgggacaggtgttcccttcaggaggattttgtgctattagagattatttttataccagcccttgacatttccgtattttgtttctcagtcggcattgatattaaaactcccagcctagtctcttgac

SEQ ID NO: 92687 - DNA, 459 bp, Homo Sapiens
cgagggatacaagaaaacgcttttctgtacagagtcttactgtagctacgctaatggttaacctgatagaattaactcgtatttttctatggttttaacctgatgctccactgtctccgtcatggggttgttttgctgtttggggttgggccttgtttccctttcctttctccagtccacgtgtagactttgcgcttgtttggatgaagaagcagatcggaagtaactgctccctcctcaaggttgtcttcagacgtcttggagacgttcctaaacactgagggggaagacagccaatagcacccattaaaagaaatacctaaataaaacctctctcccactcagctatgctagggcttggctgtaggtgtgcactgtctatttacatccgtccttacaaccatccttgtcctccttggtaccgtatcaagctctttcccatgacatttggttaaaaaa

SEQ ID NO: 92688 - DNA, 449 bp, Homo Sapiens
gcggccgccagactaggcccaagccgcggtctctagtaggcccgaacggccgggccgaggggaatgttgtggaggaggctgctctgaagcaccgttgagcggctggcgccgcgcgacccagcggggggctcgaggggaaggcgagcgaggttcccggcggtacggggactatcccagaattcgacgcgcgtcgccgtaggggccggaactaccggacgagcctccgctgaggcgcttcgcagtcccggagctagcccggctgccggcgtgtcgctggggctgagctccgcgggcgtggagtccttgcagcccaaagcatgaggaggtccctgtaggattctggactgaagacgttcttgtcaggtttggggcgtgaggaggttcctgtcagttggggaagcgttaagattcctgtaagttttgggggctgcgaggctattactgtcagt

SEQ ID NO: 92689 - DNA, 464 bp, Homo Sapiens
cccacctcatttactacacatttttctctctgactgtgttccagccacagtgatcttagtgattttcaagcatatcaaatttgttcctgtgtcagagcccccttctccctggccaagccctcgccaccagatgttctcccactggttcctcatcaggtagctcgtagcttgcctggtatctaaaggaagccttcctgcctataccgccgcatctgaagaggttactgtgtccaccctgtcttgggtttttttccatagcacttgtcactacctgaaatacttatgtgctatctccctccttccattcattccatgaggccacaagtgtgttttgctcatcagtatctctcattgcctagcgtagtgttgggcatgttccacagcatggagagccagtgcttctgggcattgcagtaggtaccagtgagaaaaaaggggaaaatctgcatattgagtatttatta

SEQ ID NO: 92690 - DNA, 641 bp, Homo Sapiens
  misc_feature (151)..(160): n is a, c, g, or t
agaatgcacaaaacattgttagtctgtgggtttagaaagactgaagtgacagattaagagttcttgatattagataactccaacttctggctgtagagcacccagccaagagaataagcagtgctttgaaaggatccactgggtgggttgnnnnnnnnnnaaagtgccattctagaatgtccaaagggaatcaggattctgtggctgtagactgatcacagagtcaaggaagcagtggcaattctagatatctgagattttgctggttccagtttgcccaatggagttgagaatctcaatgattctagatgacttcttgtggttctgtaatgccaaaaggaatgaaggctccagggatacagagttgtccattaccaaagcctggaagttctcatcacctccaggtggactgcttggcagtgctaggaggtggactcaggacttcagaagcaacatttctggcctgactgtgtcactttggactcctcttcatgtcagtttccccatctagactccaagtgtccagggcctttgagcaggcgcagaggtggctgtaccgcgtggctccgcctccgcgcgacacttttccggggcttctcattggagagcaagcctgtcaagtgctttctgttgtttcggag

SEQ ID NO: 92691 - DNA, 463 bp, Homo Sapiens
gtttcctctttttctgcatcacatttcataagtggtcaaggcatttggacatattcacctcctattacctattaaaaatacttcttaaagattgcttccttcgaaaaactgcttgtcatggagaggctgaggacatttgtaatttaaacctgtattttccttttcccagttgatacctgcccccagagaacactttagttcttgtctataaggcttaccaaaagtttgcgggaaaggtggtcctgtgctgttaccactttgaccaagagaagaacctggagattgggatgtttttgcatgtcaggatttattaattcaataacagagagggatgatgcttctcacttattctgatgaatcagcaaagattgcaaagcataatattaatgcttatgtcttgaattggcacattaaaaatgacactagcattaaaataagccactgttttcaaatgaaaatgaaa

SEQ ID NO: 92692 - DNA, 865 bp, Homo Sapiens
agagagccgtgagcttgtccaggggccccaatcctgaggccgacccggtttctggcgcggtgcgatggaggtagtggaggccgccgccgctcagctggaaactctgaaattcaatggcaccgactttggagttggggaaggtccggcggctccgtctccgggctctgcccctgtgccagggacacagccgccgctacagtcgtttgaggggtccccggacgctgggcagaccgtggaggttaagcctgccggggagcagcctctgcagcccgttctgaacgccgtcgcggccgggaccccggcgccgcagccacagccaccggctgaatcgccggcctgcggagactgcgtcacctccccaggagccgcagagcctgcgcgggcgccggactccttggagacctcggactcggattcggactcggacagtgaaacagattcagatagttcaagttcatcgtcttcctcttcatcttcctcatcgtcgtcttcttcctcttgtatatcacttcctccagtgctgtcagatggagatgatgatttacaaattgagaaggaaaataagaattttcctcttaaaacaaaagatgaattacttcttaatgaactgccttctgttgaagaactcactattattctgcctgaagatattgagttaaagcctcttgggatggtttcaagtattattgaacaactagtaataattgaatctatgactaacctacctccagttaatgaggagactgtaatttttaaaagtgatcgacgagcagcaggaaagatattcgagatatgtggacctgttgcacattcatgttatgtggtacggtgtatttcttcagatcacattgagagtgaaggtatt

SEQ ID NO: 92693 - DNA, 970 bp, Homo Sapiens
  misc_feature (134)..(194): n is a, c, g, or t
  misc_feature (268)..(285): n is a, c, g, or t
  misc_feature (389)..(389): n is a, c, g, or t
ttaatagcttttaaaagaaaagcaaaatgccaataagtgccagttttgcattttcatatcatttgcattgagttgaaaactgcaaataaaagtttgtcacttgagcttatgtacagaatgctatatgagaaacnnnnnnnnnnnnnnnnnnnnnnnnnnnnnnnnnnnnnnnnnnnnnnnnnnnnnnnnnnnnnacataaacataaacttcaaaaggtttgtaagatttggatctcaactaatttctacattgccagaatatactatnnnnnnnnnnnnnnnnnncttactttgtgggttgcaatacaaactgctcttgacaatgactattccctgacagttatttttgcctaaatggagtataccttgtaaatcttcccaaatgttgnggaaaactggaatattaagaaaatgagaaattatatttattagaataaaatgtgcaaataatgacaattatttgaatgtaacaaggaattcaactgaaatcctgataagttttaaccaaagtcattaaattaccaattctagaaaagtaatcaatgaaatataatagctatcttttggtagcaaaagatataaattgtatatgtttatacaggatctttcagatcatgtgcaatttttatctaaccaatcagaaatactagtttaaaatgaatttctatatgaatatggatctgccataagaaaatctagttcaactctaattttatgtagtaaataaattggcaggtaattgtttttacaaagaatccacctgacttcccctaatgcattaaaaatatttttatttaaataactttatttataacttttagaaacatgtagtattgtttaaacatcatttgttcttcagtatttttcatttggaagtccaatagggcaaattgaatgaagtattattatctgtctcttgtagtacaatgtatccaacagacactcaataaactttttggttgttaaactg

SEQ ID NO: 92694 - DNA, 940 bp, Homo Sapiens
gggtatgccaatggcatgtctcatcagagctgggcatgtcctctttgaaccgtttgcaacttcgtatgtcaccattggatctctgacgggccacgttcaaaccatggtgataaagtaatttggctgtttgtttctgtaaaatgaggaaatcaatccaagttctaatggattccgaaacttactgttgggcaaactcccacatgtaagtctgaaggtgagtgataaattgcttagtgaagtccaatccaaggaacaggatgatgagagagtgtatggacaggcaatcactcatcaatcaatatgtcccacttaaagatggtaggccgcaataaaagcatgctcagtgtcatctctggctttcaacgtccgagtctcttgactgttttgcagatacagctgttattaataaagtgacttcaatatcatggcactccttgggagaatatttaatgctgacgctcacagctattgacgatgttggaaaataagacactcagatgttcatattttagcaggatgtttttctttcccctttttaaattctgaaattaagcaattggcaaagtcagacaactgaggtatcttcatccactcataaggtcagggtaaagtgtacttgacagaagagtgggatgtgaatacaaagaaagctcccaagctgcagttttccagcaaaagtgacttcacacaggcacttttaaatgataaaccttgtttagctctgcctgtccttcccatttacagtaaccccaggaacatctggcagaaccaagtggccgaggcttctccaccgcatcatgagaaagaaacttccatgtaaatagttctcattccctgtttattgtactctgaaagccgtctgccgtatctggaaaattttaccttcagatgatgaagcaaagacagtctaaactctgttgctgtaagctgcagcccttcc

SEQ ID NO: 92695 - DNA, 1577 bp, Homo Sapiens
ggttgcctgggcggccaccgcagcttggttggcttggtgctgcgcagctttgattttggcctgcaagtgtgcaggagggtgaaaatatttgcatttctccctcatgcaacgcccctttatgtaatccatacaaacggttacggtgttgtcacttgtgtcgatcatggtgctgtctgcggggtgtgcaaagcggcagtcggtctctccccgggcacagtttcctcgctggaactccctgcatacctccagtttgtcagtcctgagaagtttctgagttgcagttgagcccgggacagtgaccggtggacttccgggaacaataacaggcgtggtgggcagaatttccgttgggaccaacccaactccaggggttacaggtgctaggtaaggagcaaagctaatagccgtatttgtccctatcgcgggacctacagggaaagtgggcactggatgaagtggtgttcctggaaacataaattgcatctgctgggcaagcattgctgctgcagttttttgctgaatcaaattgttccttccattaatttctagttgagtttttaagtgtgtcggagggtgaagatacttgcagttctctctcgaacaacggccctttagggaatcaaagcaggcaattactcttccattttcaacctgacaacttttggggggatgagcaaatttgcattcttcatcagagcgtgagcatgttcctctttgaaactgtctgcagacttctaatgtcagccattttgtatctctgactggggcaacgttcaaaggccatggtgataaagtaatttgggctgtttgtttctgttaaatgatgaaatcaatccaagttctaatgattccaaaactactgttgtgaaaactcccacatgtaagtctgaaggtgagtgataaattgcttagtgaagtccaatccaaggaacaggatgatgagagagtgtatggacaggcaatcactcatcaatcaatatgtcccacttaaagatggtaggccgcaataaaagcatgctcagtgtcatctctggctttcaacgtccgagtctcttgactgttttgcagatacagctgttattaataaagtgacttcaatatcatggcactccttgggagaatatttaatgctgacgctcacagctattgacgatgttggaaaataagacactcagatgttcatattttagcaggatgtttttctttcccctttttaaattctgaaattaagcaattggcaaagtcagacaactgaggtatcttcatccactcataaggtcagggtaaagtgtacttgacagaagagtgggatgtgaatacaaagaaagctcccaagctgcagttttccagcaaaagtgacttcacacaggcacttttaaatgataaaccttgtttagctctgcctgtccttcccatttacagtaaccccaggaacatctggcagaaccaagtggccgaggcttctccaccgcatcatgagaaagaaacttccatgtaaatagttctcattccctgtttattgtactctgaaagccgtctgccgtatctggaaaattttaccttcagatgatatcccg

SEQ ID NO: 92696 - DNA, 529 bp, Homo Sapiens
catttcctgttgaccaggctcattctttaagcattctccatgcttaaaccagttccataatccctaggcctgtactccagggattgagactgaaaggatcatttatgccatgtttctctaaaagcatcattgctggaagacttttgataagtctgatgtgtctcaagctattctcaggccttttttgtagagtttagaaatgaagtatttgaatcaatttagcatctcctttactatgtttctccttttaatctcagccaaccccctacctgcaggtaaacccagcattcattaagagctgggttggggtactctattctgtatgcatcataatagcttaacattatttagtagctgtaacttacaggtttaatgctagatgaggatgtctcaacccgtgagtgtgcttgtgtaaaaatggtggcaacatcatctcgttggtaggaattttttacttgaattgttattttgggaaaatgttaacagatttcttctggataaagaaaataaattggatgatgtatatttt

SEQ ID NO: 92697 - DNA, 2238 bp, Homo Sapiens
  misc_feature (2152)..(2152): n is a, c, g, or t
  misc_feature (2208)..(2208): n is a, c, g, or t
  misc_feature (2210)..(2210): n is a, c, g, or t
ggagactctggaggcgcgaatcaatagagccacgaaccccctgaacaaggagctcgactgggccagcatcaacggcttctgcgagcagctcaacgaggactttgaggggcctccactcgccacccggctgctggcccacaagatccagtccccacaggagtgggaggcgatccaggccttgacggtgctggaaacatgcatgaagagctgcggcaagcggttccacgacgaagtgggcaagttccgctttctcaacgagctcatcaaggtcgtgtctcccaagtatctgggctctcggacatcggagaaggtgaagaacaagatcttggagctcctctacagctggacagtgggcctgcccgaggaggtgaaaatcgcagaggcctaccagatgctaaagaagcaggggattgtaaagtccgaccccaagcttccagatgacactacctttccccttcctcctccacggccgaagaatgtgatctttgaagatgaggagaaatccaagatgctggcccgcctgctgaagagctcccatcccgaagacctccgcgcagccaataagctcatcaaagagatggtgcaggaggaccagaagcggatggagaagatctcgaagagggtgaatgccatcgaggaggtgaacaacaatgtgaaactgctcacggagatggtgatgagccacagccagggcggcgcagcagctggcagcagcgaggacctcatgaaggaactgtaccagcgctgtgagcggatgcggcccacgctcttccgactggcgagtgacacagaggacaatgatgaggccttagcggagatcctgcaggccaatgacaacctcacccaggtgatcaacctgtataagcagctggtgcggggtgaggaggtcaacggtgatgccacagccggctccatccctgggagcacctcggccctgctggatctctcaggcctggatctcccgcctgcgggcaccacctacccagctatgcccacccgccctggcgagcaggccagccctgagcagcccagtgcctcagtttccctgcttgacgacgagctcatgtctctgggcctcagtgaccccacacccccttcaggcccaagcctggatggtaccggatggaacagcttccagtcgtcggatgccactgagcccccagcccctgctctggcccaggcccccagtatggaaagccgacccccagcgcagacatccctgccagcaagcagcggtctggacgacctagacctcctggggaagaccctcctgcagcagtcgctgcccccggaatcccagcaagtgcggtgggagaagcagcagccaaccccccggctcacactccgggacctgcagaataagagcagcagctgcagctcccccagctccagcgccaccagccttctccacaccgtgtccccagagccccccaggcctccgcagcagcccgtaccaaccgagctctcactggccagcatcactgtgcccctggagtccatcaaacccagcaacatcctgcccgtgactgtgtatgaccagcacggcttccgcatcctcttccattttgcccgggacccactgccagggcgctccgacgtgctggtggtggtggtttccatgctgagcaccgccccccagcccatccgcaacatcgtgttccagtcagctgtccccaaggttatgaaggtgaagctgcagccaccctcgggcacggagctgccagcttttaaccccatcgtccacccctcagcaatcacccaggtcctgctgcttgccaacccccagaaggagaaggttcgcctccgctacaagctcaccttcaccatgggtgaccagacctacaacgagatgggggatgtggaccagttccccccacctgaaacctggggtagcctctagaacagaggggctggggagaggaaggggcagagggaccggtcactgtccagcctggagggaggcattggtggccaaggacaccctttgttgcccatggccattcacccccaggcctggtgcttctccccacacccctgtaggcctcaagtgactcttccccctcctgctccggccccgcccctgctgagccaaacccagtaggaggctgggcctgggtttgtgccgctggggtctccatcaccggggacctgnagagggaaggggctgtgtagccttggaaagaacttgggtcatggggaggaagccancntggttgggggaaagggccaggacctcag

SEQ ID NO: 92698 - DNA, 459 bp, Homo Sapiens
  misc_feature (300)..(327): n is a, c, g, or t
atctttgtatacaacctgtcccccgattccgatgagagtgtcctctggcagctctttggcccctttggagcagtgaacaacgtaaaggtgattcgtgacttcaacaccaacaagtgcaagggattcggctttgtcaccatgaccaactatgatgaggcggccatggccatcgccagcctcaacgggtaccgcctgggagacagagtgttgcaagtttcctttaaaaccaacaaagcccacaagtcctgaatttcccattcttacttactaaaatatatatagaaatatatacgaacaaannnnnnnnnnnnnnnnnnnnnnnnnnnngaaagagagagaaacaaacttttcaaggcttatattcaaccatggactttataagccagtgttgcctaagtattaaaacattggattatcctgaggtgtaccaggaaaggattttataatgcttagaaaaaa

SEQ ID NO: 92699 - DNA, 153 bp, Homo Sapiens
cttgcattaaacttctgtacctgagacaaatgcatgtatggcattattctaaagataggaaagtcctcctttagtaggatattacagaattaacatttatctgttagctgtttaagttctctctgagataggataggtctgaatatcaacttt

SEQ ID NO: 92700 - DNA, 378 bp, Homo Sapiens
acatgagcatagaagtacacagtgcttgatgatctctgcagtgagagtggagtcagcgtttcttcttgctattgagcttcgggataggcatctatcacttgcgctcacacagttccttccgttgaacatctgcaaggtgacacagatttgagggaccgtcacacttgattagagcccacttgggtgctcctggaacctggaacagacaaactccaagaggagattgaagattttccgcatcctgggactccaggccgaatcactttgtgtggcctcggagggaacacctatccaatgctgccaagaaataaacctttcagggaaaagggagtttgattgtaattcagtcgcaatttattctgttgtattttggccaaa

SEQ ID NO: 92701 - DNA, 905 bp, Homo Sapiens
  misc_feature (58)..(125): n is a, c, g, or t
  misc_feature (839)..(839): n is a, c, g, or t
gccccgcgaggaggatgaagccaagcagctggcgctggccggcctcttcccttaccannnnnnnnnnnnnnnnnnnnnnnnnnnnnnnnnnnnnnnnnnnnnnnnnnnnnnnnnnnnnnnnnnnnacctgcagttccagatcgcgcactgcggccagaccaccatgcacctgcagcccggtcaccccacgccgccgcccacgcccgtgcccagcccgcaccccgcgcccgcgctcggtgccgccggcctgccgggccctggcagcgcgctcaaggggctgggcgccgcgcaccccgacctccgcgcgagtggcggcagcggcgcgggcaaggccaagaagtcggtggacaagaacagcaacgagtaccgggtgcggcgcgagcgcaacaacatcgcggtgcgcaagagccgcgacaaggccaagcagcgcaacgtggagacgcagcagaaggtgctggagctgaccagtgacaatgaccgcctgcgcaagcgggtggaacagctgagccgcgaactggacacgctgcggggcatcttccgccagctgccagagagctccttggtcaaggccatgggcaactgcgcgtgaggcgcgcggctgtgggaccgccctgggccagcctccggcggggacccagggagtggtttggggtcgccggatctcgaggcttgcccgagctgtgcgagccaggactaggagattccggtgcctcctgaaagcctggcctgctccgcgtgtcccctcccttcctctgcgccggacttggtgcgtctaagatgagggggccaggcggtggcttctccctgcgaggaggggagaattcttggggctgagctgngagcccggcaactctagtatttaggataaccttgtgccttggaaatgcaaactcaccgctccaatg

SEQ ID NO: 92702 - DNA, 639 bp, Homo Sapiens
ggagggcggcgcgggcaccggggccgggccggggctgcagccgcagcggccatgggggccctgacgagccggcagcacgcgggcgtggaggaggtggacatcccgtctaattccgtgtaccgctacccgcccaagtccggaagctattttgccagccacttcattatgggaggagagaagtttgactcaactcatcctgaaggttacctgtttggagagaacagcgatctgaactttctggggaacagaccagttgtgtttccttacgccgccccacctccccaagaacccgtgaagactctgagaagcctggtcaatatccgaaaggacacactgaggctcgtcaaatgtgctgaggaagtgaagagccctggagaagaggccagtaaagctaaagtccactacaatggtgagttcacctttgacacagatgctcgggtagccatcaccatctattaccaggccacggaagagttccagaatggtattgccagctacattcccaaagacaacagcctccagtcggagactgtgcagtacaagcgaggagtgtgtcagcagttctgcctgccctcccacaccgtggatccctccgagtgggccgaagaggagcttggctatgatttagaccgagaagtt

SEQ ID NO: 92703 - DNA, 539 bp, Homo Sapiens
tttaatgcacagaaagtttccctggacacactacccagtttcccccagtgataatatcttgggtaacatcctgtatacattcacattggtgcattcctcagagttgtcagattttgctagttttacgtgcacttgtgtatgtgtgtatttgcaattttagcacgtgtagactcttgtaaccactacaatcaagttacagaactacactaccaaggttcatctttttaaaatctttgatgttacctttttcggaacagtgaccatgagaggactttcctcccaaaattttgagaactactgaaccagaatatagtctgacactaataggtagaaatttaaccaaaggagattatgaagctctgcacttcagttaacaaatcacttctcagcttccagttccatctcagaaggaaggaaagggattaaaatccagagaccagaaatgggagcaaagtacaaggtggtgtaatcattacagaggtttcctgatgtttccaagtcagtcgtgtgtggagctgctaaactctaaagtaatttta

SEQ ID NO: 92704 - DNA, 454 bp, Homo Sapiens
  misc_feature (284)..(315): n is a, c, g, or t
ttgaagatactcatgtcctaattcccagaacatgtgaatatgctacttcaacagcaaaagggacgttgcagatgtaaattatggacctcgagaccgggagattattctggattgtctggtggacccactgtaatcacaaggttcatataagggaaatagggaagcaggagagtcggagaaggagatgggatgatggaggcagaggttggagtgatgcaattgctagctttgaaggtagaggaagagaccttaagccaaggaatgtgggtggcttctagaagctnnnnnnnnnnnnnnnnnnnnnnnnnnnnnnnncctgcaacagattcttccctagaccctccagaaggaacactgccttgctaacaccttgattttagcccagtaaaattcattttgaacttctaacctgcagaaccataagataataaatgtttgtcattttaaactaaaa

SEQ ID NO: 92705 - DNA, 526 bp, Homo Sapiens
tgaatctgtgttcttgaccaaggaaacagctgagatattaaaccatgtggttgttccacggttcatctggctaccgttctgggtcccctctgaccacctcaaaaagaaaatgaaattgggagattaaatcaagcttgacctcctcttttaatgaggaactttcacgttgacttcctatctcaggatattcttcagtttcatactgctgaggagaaaggaacaagctgcagacactgtaactggtctccagatgtgtgtatatgcgtgtaaaacttcacaccgtgtgtgttgtgttcaatgttgtgtcaatctacaaactgactcaaacaacagtttaacgatagagaagacagtgataatggcaaaaaaaacacccaaccacctttttccgtcaaagtgcttgctatggctttcatagctgggacaagtaacattaagtattcaggagcaaagtgttcttgaaagaaaatggtgtgttgatctcataagaaaatgtacaaccaataaaagacattttaaaaagcgt

SEQ ID NO: 92706 - DNA, 651 bp, Homo Sapiens
gcggccgcgccggctccaggaaatggttactgctgacaggaagtttggcatccacctcccccagcctcctgagtggacaggggccctgggcaccacttcagagggccatgaagcccccaggaggagaatcgagcaatctttttggaagtccagaagaagctactccttccagcaggcctaataggatggcatctaatatttttggaccaacagaagaacctcagaacatacccaagaggacaaatcccccagggggtaaaggaagtggtatctttgacgaatcaacccccgtgcagactcgacagcacctgaacccacctggagggaagaccagcgacatttttgggtctccggtcactgccacttcacgcttggcacacccaaacaaacccaaggatcatgttttcttatgtgaaggagaagaaccaaaatcggatcttaaagctgcaaggagcatcccggctggagcagagccaggtgagaaaggcagcgccagaaaagcaggccccgccaaggagcaggagcccatgcccacagtcgacagccatgagccccggctggggccgcggcctcgctctcacaacaaggtcctgaacccaccgggaggcaaatccagcatctccttctactaagagaagccactgctccacc

SEQ ID NO: 92707 - DNA, 1373 bp, Homo Sapiens
  misc_feature (862)..(862): n is a, c, g, or t
  misc_feature (1203)..(1203): n is a, c, g, or t
aaggtagcgaggcctgggtggcgaattcggcacgaggccaaaatcggatcttaaagctgcaaggagcatcccggctggagcagagccaggtgagaaaggcagcgccagaaaagcaggccccgccaaggagcaggagcccatgcccacagtcgacagccatgagccccggctggggccgcggcctcgctctcacaacaaggtcctgaacccaccgggaggcaaatccagcatctccttctactaagagaagccactgctccacccggagccagaccagaaactcaagagatagggtagccatgttttcatttccttttgcccaaatgagcggggtgggaagagggttagtcttatgtgagcctggctgctcagcgtctcctggccgtcatgacagctgcttggagacccgtgccttccagatggctgggagatgcctctgtggggatgaaatggggcacccctggccatcactcatgtgtagtccaggtttgagaggaactggaaggggggtgcagggtggggaaggtggggcagggcatggtccttggatcaacagcccgccagctgattggatgtctaggaatgactgaaagaaaccaaaacagcctgtccactgctgctgtgggatggaggaggcgtaagcagaaacactaacagtatattgacctcttagcagaaccgcttccattctggagatcacggctgctaaatccagcatccccacttcattttacccccagcatattggtctggagtcttttcttgaaacatcttgattgcttttcctcggcagctttcaaaaaaccaaataataatagttatccgtcttctacttcatggaagattgttttgggtgccctgnaccctctgaagtgcccagttcctgccatctgaaacctcggcctgatctgatctcatgtttggaatctgcctgtcttttcacacagggctggtcttggtcctttacatgccagttttgcttgtgaattcttgcttttttcctctcatcagccttaagtttaggcgtttgttgttctccagtgatgtagacagttcccttcacaagtcacagttcttcccataaatgaggcccgctgacctctgcgggactttaaaaatctattcagatatttccgagtaagtgggttgtttaaattcttcctgtggctttctttattccttaattgggtgggtggaaagaanagatgcttggggaaccttggggttctttagggttgggattcctttaataataatctaaaaaagctaaatttttaaataccaagctttacataaaaggattggtggactctgggtctggtttctgacaaccttttccaggaaaaaaggccaattggggtcagggtacaccc

SEQ ID NO: 92708 - DNA, 686 bp, Homo Sapiens
tcttagttctaagatttcctttaattctatgattctctggatttaaatgcattattcatatttcttgaagcttagatacagtctaattcatagcaaccatatctgctttatcctaggtgaagggtagcagtccacaatggaatcagaagaaaatcccattataacaaatgacaaattatatatcatgaatccttctgtctgactaactcaataactttctataaaagccaagtggaattcaaataggagctaggagacaacaagttatatatgacagtggaggttgtattccttttatattgctgagaaaactagttaaatgatcagattcttgctggttaagaaacaatttcgtttaatgggatctgtacaactgattttaaaaaaatgctacaaaaagccccaaagcatataatctctactccttacagtctctagaattaaatgtactcatttagacaacatattaaatgcatattttagccactttagagaaacctcataggcacagagtttccaagattaattttaagaatatcttcacgaacttgaccctcctactccacattgcaacatttccatcagacagcatttcaattccagtattatgtatattgcaaattaaacattttaaaatatttttttccaatttatttctcaaaataaaatgtcttttgttaaaatta

SEQ ID NO: 92709 - DNA, 447 bp, Homo Sapiens
gaccaagtgtgttggggacttgagatgcgtacatgagtgtgatgtttcctgctgaaagcacaggtgagacgtggtcttgtaacacagtggttaagaatgtgactttggagccagcctgctaggggctgaattctgactcagccatttactaactgtgtgaccttagtctgtctagtgactggtgttgtcataagaagagagggacacagagggaagatggccacatgaagatggaggcagagattgcagttatgctgctgcaaactaaggaatggctctggccctccaaggattgctgataaccaccagaaactagaagagacaaggaaggattcttccctagagccttcagagggagcatggccctactgacacctggatttcaaacttgtagcttcctaaactgcaagagaataaatttctgttgttttaagccaaaataaaaaa

SEQ ID NO: 92710 - DNA, 449 bp, Homo Sapiens
ataagtctgaaaactcactttttttcacactaactgcagaggaaacataggaaaaaaattgtatatattgcaagatgaaaggtatatttagctatacagaagagccttataaaagcaaagaaattgttataaaagtcatgagaaagttgctcttgacagaggaaagagcctgtggaagtacacacacaggagagacggggcctcttaggtgtcaccacattccatttcttatcctggatgggtttgggtgtttgtcttagaactgttggtaaatgatacaagtgcttttatgtacttttctgtatgtatatttcctaatatttttagagccttgtaacagagattaaatgtctgttagatgtttggaatttctgtcggaaatcttgaagaatttgattggagtatgttattagtaatacagataaaataatatttcctgcaatagcaaa

SEQ ID NO: 92711 - DNA, 631 bp, Homo Sapiens
gggtctgaatagcaccaggggaggcggcagggcgggcctgtcctacctgcgcccgagcactgctgagacgacatcccttccagcgccgccacgtagtccagccccagccagccgcggtcctggaagcaccgcaggcagacgacctgctcctcactgggctcaggcagggtcacccgcccagtgccgctagctgcaaattgctttacatacagtgacccaaagagcaagtcatttcagggccccaccactctgattggaagtcataagcttgacaactgattggcctctgtcacccaagcgggtgtggggacactaggcccgcaggtgccactggaagaggcgttcagaagcactgcggtgctccagctcctggatgcagatatctccccacaaacctaaacaatttcgagagggacttgtgttctgcaaccagtcacagaatatcaggtgagctgggcgtgtcttcactgacccacccgcccagggatgctgcactcctctccaccctgctcagaatcactagaatgaccgttctgtggctacagccctaaaagagctactaaaaagaccagaagtagtatgagaacttatgaatacgaatataaataaaggacatctggagaacttaaaa

SEQ ID NO: 92712 - DNA, 500 bp, Homo Sapiens
tttgatttttgacaaatgtacttattttctgctgtgtaacttttttcccaatctagagaaccgcatcctatcccatgctgtttactattaatagcggcacaggcgtcaaattttaaggttacatttttggggacccctctttcttctgtcctagctattacttcacttgtgtcacctagaaaaggaccagtccttagtcttacttcaaagactgtgatcatgggaggttcagaggggtcatagcacacatcggactggtcacttcctggattacatactttgtactgaatgttattgtacgaacaggttccttttggagttcccaggcattcataaaaactataaaataatagggctgtagcactcctttgtcctacctcagtgacctgatgtatatactgggaacagccctcagtctgaagaaggtcagttgaagtccttactgtacaagtccagattttaaggaaaatgagtcccgcgatgagtttcctcatgctttg

SEQ ID NO: 92713 - DNA, 481 bp, Homo Sapiens
aatacttctcccctccccaactactcactgcccagcctggcctctccccagactccgcagcagcctcctcgctgcccccttcactttcttattcctgagggtgtagatgagcgggttgagagcaggtgtgaccacggtgtagaagagcgatacgaacttgccccgtgcctggttgtagcgctgcgcgggctgcaggtaggtgtagatggccgagccgtagaacaggcagacggctgtcaggtgggacccacacgtgcccaccgccctcctccggcctccgctgaaccgcatgcaacagacagctcgggccacggcaccgtaggaggccaggatgacggcaaacggcagcagcaggatgaccacgcgggcggcgaacatctggttctcggtagtgtctccgtcgcctccgcaggccagcttgagcaacgccggcagctcacagatgaagtggtccagcaggcggggcgcgcacagcggccgc

SEQ ID NO: 92714 - DNA, 400 bp, Homo Sapiens
tttaaataaataagctgtattatctgtacaaaaaatacaaatacagttttgtgttttagaggagaaagtgcctccttccacattagccagcagccttcattgtcttgtggtgctgctgagttgcaattcacagaacaaacattaaatgtacattcatttcatgcaacgagcattctgcttcccacccaaacctaggttctgccagctcactgagacccactgccaactgctccaacccaacatggagctggaggatgcttgctctttaggaaatgtaaatagtgaccactgattttcaatcactatcgaactagaaataattaaccacattagtagtagtatggaatttgtctgtctttatcattccgtgcataactattatgccacaaatgaattccct

SEQ ID NO: 92715 - DNA, 663 bp, Homo Sapiens
aatgtcttcttttcctgtcacgtcggtaaggtaaatcgatttagtaaggtggaagccagagcattttttgtcactgaccgtcacctgtataaaatggatcccactaaacagtacaaggtgatgaagactatccctttatacaatttgactggtttgagtgtctccaatggaaaggaccaacttgtagtgttccatacgaaagacaacaaagacctcattgtgtgcctcttcagcaaacagccaacccatgagagtcgaattggagaacttgttggagtgctggtgaatcatttcaagagaaaccatctgcttatactctgaataaaattcaagaaagcatagattctacataaacaggcccaagattacatggcaaactgagatgaagaggatgctggctgagaaacaaacaaaagtgttcaattatttgaatgaagtaaggaaagatattttaaaatgtaaatcaccattaaaatctgaaaatggcccagttgatattgcagaaaatagaattgatgtgaaaggaaagtttgaagtctctcagtgtgcagaatttactgttataatgggcaacatgttaacttttttagcaatatacaaaataagggtacatcttacaaagaaggcatcttatattcaataaaatatggtaatttaaaacat

SEQ ID NO: 92716 - DNA, 496 bp, Homo Sapiens
  misc_feature (438)..(446): n is a, c, g, or t
atctctccacagtgctggcctctgctggggaaggcatctttcccaaaggtatccccaagtaccatgttgaaaatgtcctcagtctgttgctccatctttctgagcctctgcttggtatgtcatgtttatggtcactacggatgagtgtgtgcagagtttgggttgattcttttaaatgctacaaacaagagctatttcttttcaataaaaaaggtttggattcggcctcttcctctgagcccacctcccagccctccagggagcatcagtgtacctgagtcactttgtctgcatctcttcatcccacaaaacacgaggctgggtctcattcagcggcctctcaccaaccttcaagatccagaagaaaacaggaacgttcagctctgccctgtgtcgtatctaatcacatacattaatttatctaaccacataagttannnnnnnnnatttgccagaaataaacctttaaaataacacatgaggggtctatcaaaaa

SEQ ID NO: 92717 - DNA, 438 bp, Homo Sapiens
tagtttaaaatgactcctgtctcaaaaaaccaaaggataacctttaagggattggtaactttgactcaaaactgctttgtaatcttttcacaatgtactgaaaagtgtggctagttatgtttgatccacattctagagaaatttgtaggttttaatttcttttctcttggtcctctcttcatgtataatggttgcttttaacagctgttcgctgatgtggtcctgctctgtcccagtctagcagctttagtgtatggaaaaattgaactaggaattgagttttgaagaaataaaggtgtaagagcaaacattcaacagttgctgtccccagtaatgaagttcatacagacaaaagatggcatgtcactgtacatcataccttgcaataaatattctgttaaattgtgctggtgcaatttaacatgcttttgtcaaagt

SEQ ID NO: 92718 - DNA, 460 bp, Homo Sapiens
cgccaatttatcctctctgtattaaagtgataattctgggcccacagaaatcagtcagtacctgcggtgtgccttaaggggactctcatgatcatcattcccttctagagaacattctagatgaagaaatgcaactgttgaccttctggttcacccatctccccctcgaggcattcttgataccccttctcacctgcatttctgtcccagggataccagatgcagccactacctaactaggcttgtcctgggggagtgagccgtgaacctggagacatggctttgacccacagctactgttcatttcctcaggctttgcgctgattccctcaataatatgacagtaaggcaagtagtctccttgcctttctcctgaaaggtatgagatgtggacatttcagtgtttgaattattttaagagatgttttatagaaataaaacgttttgtagctaaaaaaaa

SEQ ID NO: 92719 - DNA, 534 bp, Homo Sapiens
atccgtctgccttttgatgccgtactctgctggttgcgcagccacctcgggatactgcacacggagaggagggaaaataagcgaggcaccgccgcaccacgcgggagacctacggagacccacagcgcccgagccctggaagagcactactggatgtcagcggagaaatggctttgagctcagcctggcgctcggttctgcctctgtggctcctctggagcgctgcctgctcccgcgccgcgtccggggacgacaacgcttttccttttgacattgaagggagctcagcggttggcaggcaagacccgcctgagacgagcgaaccccgcgtggctctgggacgcctgccgcctgcggccgaggtacagtgtccctgccattgccaccctgctggggcacctgcgcccccgcgggctgtgccacactcgtccttctctctctctccgcctctttcctctccccagtgccttgagagtttcacctgggctaggtcagttcggaaacttgaaataaagagttttaacaaagtaaaaa

SEQ ID NO: 92720 - DNA, 434 bp, Homo Sapiens
aaaaaaaaggcctttttaccttctcatccttggagccactggcattagttatgggcctgatagtttaagaaaacttgaaaatgaactatgtgaaccggtattctccaaagtaatattttgataaatagtgtaattctttattacagtaaaaccattgcttaagtgggcaaaactctagaggataggaaaaaacactcttgaaaacaggtggtgatgccctgaaattcagcaaactgcaggggcacgtgttgttctacccaaggtcagagtgtgtcactcaccacttgatgccactcacagaccaccaacttcagaatatctaggtgtaaagctctgtacaaaagttataacagaataatgtaaataaattattatttatattacactattacataatgtaaaggctattaaaacatgtttgtcttcaaaaaaaa

SEQ ID NO: 92721 - DNA, 458 bp, Homo Sapiens
gtcacatagtgctcagtcatttttattaataatagtaatattattgccttaaaggtataaaagcagcattttcccaagtggtttctttctggaaatgtagttatttactgttaattgtatcttttgacttgatagcaacatttacatcataattattcttgaattgttggcagaagcaccatgcccgtcatttattggctgcctccgactctggttttagttacactcaatttaataaattgatggggcatatccaagtcctcaccattttaacaatttgtgctaacgcatttgaaaaaaattttacttccaacctctaaatccattatctctgttaacaggaggcatttctgaacacagtaccaaggctcattttacctttttacaatgctttcttaatgtttgacctttatcagagttatgtttaaagaaacattaaaaatttaatgttaatgaaa

SEQ ID NO: 92722 - DNA, 497 bp, Homo Sapiens
gatcttatcaaatttaatgggcacatctgaagaaggaaacttgctcagcaccgtgagccccacagtgaaagcactttttggcaagactagagtctcacccattttccctttctctcctcgatctcactttccagcctcttattccccggactcaatggctcaccctggggccccgtgggtccagcttctcccttgggaccaggctttccaatagggcccatggggcccggtaaaccagttgggcccaaaggcccaatgttgccccttggcccctcaggaccagtgggacccacgtcacccttattccccttctgcccctgaggcccagtctctcctcggaggcctttctctcccatgggccctgcaagccccttggggccatgttttcctggggatcctcttgagccttgatcacctttgatgccttttgcttcaacttttccatctgctcctaaatagagaaagagcaaataaagagatagtttgtgaaagaaaaa

SEQ ID NO: 92723 - DNA, 699 bp, Homo Sapiens
agggcaggaaacactgcaatgtttaattacaaattataattaaaagaagctgttaaaaagagtcaacacttgtttttaagggcaggaaacactgcaatgtttaattacaaattataattacaaaagattatataggtaaatcacaacattccctttcataaagcaatcattctgtaaaataattaactttctttacatgactttttaaccattgaaattaatatcagagttaacaggtaacattttcttgcaaacttgataatcaactgttttatgcatcaatttacatatttacttgaataaacttactggcagattaaaatccagtttataaactggagggctaattttaaaaaataattcttaaattctttttttatggactaaactacttttctctactaaatagaaccggaaaaaatgaaaatatcatatgaacattaagtaatgtgatttcaagtcatacaagttttcctctagcaggttcccaagttatttgtaaacaaaggcttttctgctccagaactttcctcagtgccttgcattcttctttctcaaccgaacgtccggtgaacaggatggtggattaaagcaagtcacggcagagaggaaatgccttggtaaagcactgaacttcaaaagaggaatgcacaacagagaaagggaatggacatttgctgagcacctactatgtaccag

SEQ ID NO: 92724 - DNA, 361 bp, Homo Sapiens
aatcaaaccaggcttgtaatagataaataacaatttcttattgctatacattaaaactgcacacttctgaatggagagatcagttatcagtgaattgcttttctatgacactggatggctgcataggagcagcgctgacctgaatttatacaaactctcaggagatgtgaactcaatgtgacgagtgacggcagcagtggtcaatacaggaatgcaaaccaggtgtcccgtcccctttctaggaagggcataaaatatgacatgatccctcttacagctccaatttaaacaaaacagccacaacaccttccctcacccctgtctgggatgaggttatttatgaaaatgagccaatgcccaa

SEQ ID NO: 92725 - DNA, 449 bp, Homo Sapiens
cgatatttgtggttctggcgcagagtctccaacactggctggcagctcttctctgggtcagaagtggctaggtgcaggtcctccagcaagaagaggagggagggtttagaatcctggtgatgcccaggctgtgggctggcttgtgtttggccctggattcctctgctcagcaggagacggaggtgggaggaactgaaggcagggtggatggggctgtatatgtaagggtgatgtggctctaccagcacctccacaaaggctgacttccctgttgctgcctctccagccagcaacactggctgtccccctgacagaagcaggtccaccacatacaagagccgttcagtctgcaagacagaagtgggacttactgcagcacctccagtataagacagtaatctagctgaaaataaaagtctaagggacttgtcctagagctgtaaaaaaaa

SEQ ID NO: 92726 - DNA, 443 bp, Homo Sapiens
cgatatttgtggatctggcccatctttagataccttcataagggattctattagtcgcctctccaactaccctgagccaccaccctcagccttggtgtttgatctacatgtaagccctgaagatggaacactggtccccttcactggccaatacctgagcagccacatcaaaggaactttgggcacctttcacccttctatccagactgaacggctcttgtatgtggtggacctgcttctgtcagggggacagccagtgttgctggctggagaggcagcaacagggaagtcagcctttgtggaggtgctggtagagccacatcacccttacatatacagccccatccaccctgccttcagttcctcccacctccgtctcctgctgagcagaggaatccagggccaaacacaagccagaaccacaaatatcgggggatcctcta

SEQ ID NO: 92727 - DNA, 413 bp, Homo Sapiens
cgatatttgtggttctggctgatcgaccagatcgacagcggcaagtaccccgggctggtgtgggagaacgaggagaagagcatcttccgcatcccctggaagcacgcgggcaggcaggactacaaccgcgaggaggacgccgcgctcttcaaggcttgggcactgtttaaaggaaagttccgagaaggcatcgacaagccggaccctcccacctggaagacgcgcctgcggtgcgctttgaacaagagcaatgactttgaggaactggttgagcggagccagctggacatctcagacccgtacaaagtgtacaggattgttcctgagggagccaaaaaaggagccaagcacctccacaaaggctgacttccctgttgctgcctctccagccagcaacactggctgtccccctg

SEQ ID NO: 92728 - DNA, 781 bp, Homo Sapiens
  misc_feature (126)..(126): n is a, c, g, or t
  misc_feature (706)..(735): n is a, c, g, or t
ccagaattgcggaggccggatggggccttgccccgggaaggggggttgcctgcttgactttgaccccacagttccatacagatggatttatcttccccgtacagtttgcaccaaccgcatgatctncagacatttacacgccattattggtgcttcccctgtctccacataccaggtccagagtacttcatggatgcgtcatccgccatacgttatgcaaccaacaggtgctgtgattacaccaaccatggaccatcccatgtcaatgcagcaagccaacatgaagggcccactggacacagcagatgaatcaccttttcgttgggcacaacaaggaacgattcaatcccaagacaggattatgatactcccaccagctgttgtgtcagtatatgactgctgctgctcctatgcaagggacctacattcctcagtacacgcctgtgcctccgacagctgtttctattgaaggtgttgttgctgatacctctccccagacagtggcaccttcatcccaggacaccagtggtcagcagcaacagatagcagtggacacatccaacgaacatgcacctgcatattcttaccaacagtttaaaccataaacaggactgaagaatgtctgtctgaatctttgccttgaatgaagaaacttcattgaacaagaagttggcttccagtttgcacagacgtcaatggaatgcannnnnnnnnnnnnnnnnnnnnnnnnnnnnnagtgttataccttacccaatgaaagcaaagtttttatttgctgtgc

SEQ ID NO: 92729 - DNA, 484 bp, Homo Sapiens
gggcttttgttccccctccaactaaatccaggagaacagcttccccaaaccctgttctgagcaaatgagcgtgtatctgctcactgtatagactcagatgacgaaggcgggaagttcttcttggacacctcagggagccagagatgcagagacgggagtagatcgtgtcaccagggaaatgaggaggcctatgtgcccactccctgctaatctgggactggcatggagaggctcaggactcacctgcttgactgtacagctgcatttctagtgaggaaaagttccacattcaaggattccaggatgaattgcctgtttggaaaatctgaatttttaaataaaggctttgcttaagcaaagacatacctgtctctctggccagggagagcctgtattctccctcattcctcacccccaccctgtgctgggccctcattcccgtctctactccaggtaggaaaaataaataaatttcaaagtcaaa

SEQ ID NO: 92730 - DNA, 306 bp, Homo Sapiens
cagagcagagtccttcttacaagaggggtttcattcctgtgaagcattcctgtataagagccttcctctctgggatggcctctgttgtcggtcacagttccttcagcttgtgagatggattccttttagtagctactctgaggtgaaaccacttctttttgatcgtcccgcacagcccttctttacatcagccatttatttcaaggtaacaaaaactttagatttaaccactgttgctagtggtacacaattccaaactgacatttgaatcaaagtataaatgaatagtatttttaaagtctaaaa

SEQ ID NO: 92731 - DNA, 473 bp, Homo Sapiens
gagacttgacaggtgtttaaaggcagtaagaaaagaacgaagtaaagagagtgatgacaattatgacaaaactgaagatgtggatattgaagaaatggctttaaaactagataatgtacttcttgacacataccaggatgcttcttcatgacatgcgaagggtttcttcttgatcatttgaaagaaatgataaggctgtagtacaagcaagcagtttaaagataagacttgagatttttgaattgagaatttcatgggaatattcagtcaaggagcagactttggtctgaactagccattgatgattgttaagtttcccattcttagactgcatcaatccttgtgatccttaacaggttataatatacaattagcatttttctaattgttagaatatctgtcaattaagcatcatgactcagataatttttactagtgtaatgacagtaaaattacttcaattctctttgaaa

SEQ ID NO: 92732 - DNA, 1060 bp, Homo Sapiens
gtagcagcagcagctgcggcccctccccgggaaacccgtgtactcaaccccgtccccagtggaaaacacccctcagaataatgagtgcaaaatggtggatctgaggggggccaaagtggcttccttcacggtggagggctgcgagctgatctgcctgccccaggctttcgacctgttcctgaagcacttggtggggggcttgcatacggtctacaccaagctgaagcggctggagatcacgccggtggtgtgcaatgtggaacaagttcgcatcctgaggggactgggcgccatccagccaggagtgaaccgctgcaaactcatctccaggaaggacttcgagaccctctacaagtgactgcaactaacgcaagttcttagaccgggaaggcctcctaggaggactcaaagtgtcacctccccagagaactctcacatcatgccgcattctgtccctggtctcatgtctcctgggataattccaccaacaggtctgacagcgagccgctgcgagcagctgctgctgctaccaatgcagctattgctgaatgcaatgaaggtgcagcaaatcaaattagaagccatgagcaactatcatgccagtaataaccaagcatggagcagactctgaaaacggggacatgaattcaagtgtcggactggaacttcctttttatgatgatgcccccaacctcttattcctgtcagctacctccagcaatctgtcaccatggcaatgaagccagattgaaccacctcagccacgattgccaatattggcagccagcagcaacaaagttcagaggtcccccatccagagttgagaacatcaggttattgaacggaaccgttgttcccggaattagccccctcaaccggtgcccccctctctggaaggaggggacaaaaggcctcgtcagagtgcacgcgatcattcacatttgcaagcaacacgtgtgtgccggacccgggttcggcagcggaaaaatcctcttgcaaaaaaccccggccaccaaaagtggtcttgtcctgaaacacaaatctgagggggactatcaca

SEQ ID NO: 92733 - DNA, 440 bp, Homo Sapiens
ttctatgtataaagtccagctttattagatgtttctgattcccaaaataatagtattaggatattccttattttaggctttaaataatttgtataataaaatagtgtcagtaggtccaaagctgaaatgcaaagttcagatttctaatacaaaggagaggagtattttgtttcttttggtacagccatggttcccaaactgtgtagcagggcaccttagcaaattaacatgggtgccacacaatattttaaaatttttgagaaaaacatagcaacacctgttggacatcacataaactactactttgaggtagtttacattttcaacattaaatagcattatattcctttctataacaacatatctttacaaaactgggttttcagcagtttgataaaaagtactgtgcaagaagcagagaggaaaagaaaatgatactg

SEQ ID NO: 92734 - DNA, 563 bp, Homo Sapiens
  misc_feature (83)..(163): n is a, c, g, or t
tgaaacattccatttaattccaaggaataatcatctccaacatgttatcagtatgaaaatcattagtaagaatatgcaatatnnnnnnnnnnnnnnnnnnnnnnnnnnnnnnnnnnnnnnnnnnnnnnnnnnnnnnnnnnnnnnnnnnnnnnnnnnnnnnnnnaggtagtagacagtacagctctaaagacttgagccccatctctctctttgcaaaaatggttttaaacttgacattttaattgacttttggctgcagtaaaagaatttaaaacagtcttactaaatggtggaaagtaatacctttcaatgaaggtatggtgggccaaaacaaagaggtaaaagagagatttgagtcagaattatttattgaaaaatctccccatgtttcaatttattcatttaaaacaaacttttatttctaacttgaacaaacactgtcaaatacatttgtgaaagataaaagttagatgtcactagatatcacttttaaggtaatgaactttggaatgatatgtgttaaaattctcacaggcatctgaataaaatccaataaaaacaaa

SEQ ID NO: 92735 - DNA, 522 bp, Homo Sapiens
agtcaaaggatttcaatgctctgaagtggtcatgggaagggtccttagagaggagaagactggcagcaaaacaaaggagagacaaactcacaagacccacctgttggaatagaaacatgccttgcacaaaggatcagaagtcctctactttaatgtctctttatagggtgagagttctcctgagggagcagaaacttggtttctaaccggagcctcttcagaccctcccccaggaaatttgggcaaagtacttctatagcacacccaggaatctcctgcctctaagttcacagcagcacctagaacagggaagatagcttgacaacttcaaaagaaacccaagtgtagaaaaaaatatgctccatactacaaagagtgatcagcccttggtactaggatgaggcaatgaagggtaggaacaggatggggactaagatatttaccatttgcttctaagaatctttgttgtttcagtttttataacaaaggaataaaaagaaatatattcaattctaaaaaaaa

SEQ ID NO: 92736 - DNA, 296 bp, Homo Sapiens
gcccagtgggggccagaggatcaggccccgggagcagccggcagacagaggcaagacgggggctgcggccctggctcggcagctcgggccagcactgaggcgggacgagggcctcacccaaaacctcgtggtgaggcccagagttcatgggctgccctggcccataccaggcagggccctggggggaaagtgtatccatatacacgcacaggtgccaactgaggtgggaccttaggaatgaggactggggcacctggaaaatgccattttttggaaaataaaatttaagaacagct

SEQ ID NO: 92737 - DNA, 383 bp, Homo Sapiens
  misc_feature (88)..(88): n is a, c, g, or t
agtggttcaggagtgggcacataagctaagtcagcccagcaagaatgaatcttaggacttctttcaaaaattactggaaaagacactntgctctttcctgctgaacttgaatagaaagctggagtcactggagctctcatgccactatagggaccatcggaatgaagccaacacaccaaggaaagccagaatgctgaaagacactagttactgctgaaatagcttgaagcaagtaaccagttttaccactggacttttcctattcctaggtataagtccaactagtagagccacgtctctaggaaggtcagcaagacaggagccttttttattgttattctttagcattaaataaaggctggagattggacatttcaaaaaaa

SEQ ID NO: 92738 - DNA, 535 bp, Homo Sapiens
aagatttcatcatcggatgcaaaaacgattccgaaacataatatcaattttatcttcagcttctgttattaattcttatgacgaaaatgacatccgtcattccaaacctctgctagttcagatggattgcaattataatggatatgttgcgggtattccaaatttctcttgtgactctccagcgtatgttcaggactcagggggaacaattgcagctgaaaaacatcttcatatggaattgaaccgatggaggctgtatcaggatttatacacaagatttatgaagaaaaatatgctgacactaatattctcttagaagaaaatgacacttatacttggtttaattcagagtatcaagtcagaaaaagttcagaaaaaactgactttattaagttattccctcgatatattgaaatgcatattgttgtggacaaaaatttggagtgtcagcagctatagtgaagtttcaagaagggggaatgctgtcgggactgagcaggcaatggcctaaaaacaataaaaagccctactaaaa

SEQ ID NO: 92739 - DNA, 313 bp, Homo Sapiens
gtgaagcagaccattagcagataattgtcataatcttgatactaaatggagaccagaattaagttgaagtcagaaggcaaaggatcctttgatgtagtccattcagagcagaaggagaagaatgcagagtggatctgcagggacaaatagaagatgcagcgcaatggagatactgtttaatgccgcaggggacctgggctcttttcgtctctcctatgtaaagagaatttcctccatccaagtaaaactgatgcgatcggtcagctttctagacaacagaaataaataattctctctgtgaggaatgacaaaa

SEQ ID NO: 92740 - DNA, 320 bp, Homo Sapiens
tcaccctaaggatatccacagaaatcaatggtgatatttgaagaaagaagaattcagtctcactcagtgaatgtcgcaggccatttctaaaagtgctacagaggacagacagggttttgaggccaccctgattattgggatgcatctgcagcacatccaggacttgaatttcattacgagttcctaatagttgtatttctaaagatgtgtttcctagagaatgtacagccttatgacactgtagtgatgtttttataatttcctaagtagatttttttatattaacaaattcatatacagaaaaaataaggtgttacaaa

SEQ ID NO: 92741 - DNA, 478 bp, Homo Sapiens
ttcctaatatccagtttctcctctaacggagtaagctctgcgataggagtgaagagtgtcactaagtgagaatcagctacggtggcagctcgtcctagaaatgtcacgtctcatcctgcctccgtgtgctggcctatccaagttcaggtttcaggcaggcagctggactcagcaggaagagtctctttttctgaaagctaaaatgactcttcagcttgagagcggctgtcctccttgttttctttgaaagaagatcatttcctgaaggccgagagatccaggctctccaaaagcctctctctgtgggtgagacccgccaaagaatgcaaggatgagaaacaaaaccaaatctcagaggaatgaaagaatccttttcacatggacattagttacattcattaatggctcacacatgagttcaggcccatgttttgatctgtaggattgttttcaattgagctctagaaacagaaaaaaa

SEQ ID NO: 92742 - DNA, 436 bp, Homo Sapiens
  misc_feature (139)..(139): n is a, c, g, or t
ctctgctctcacactgccatgatcaacacagaagatttctgtgacagcaaaatacatggggaaattttccccgtcagcaagcaagcaatcagttctgcagcagacaccaagctgggtgtccccccaattcagttccaancacttctccaccccagaggtagcatcagacaccgcagagtgagggctcagtgccataagaccaccccccttctgcccgctaatcacaagtctgggcctttggaacttctgaccaaatggtttcaaactggggttcccacaaccccctctttgggctcaattactctgctagagcagctcacagaactcagggaaacacttatgtctattggtttgttatgaaagatattttaaaggatgcagataaacagcctgggtgacaaagcgagactctgtctcaaaaaacaacaacaaaaac

SEQ ID NO: 92743 - DNA, 438 bp, Homo Sapiens
gtatactacccaccactacctaatatactaccctgtgtaattactaatatacccagtactgcctaatactaccttgttaattgcctgcatttgagagtgaaggaaaccacccaaatttcaggctgtgtttaataataatagagttgtgtctttttctcatttaaattcatagacccctgattctatccctggacccattcttgtagatctcaggtttaaaattcctgtgaaaaaaatgtaccgtttaaatgaaaacaaaattcaatgaaataagcatgatacataatagataatacataaagtattatgaaagcgcagggaagctttacaagtcgaaatacctcttgagagtcttactgcgcatcacacaggtggacaacaggaaagtggcattctaggaagacagaaaaacctcttgccctcctgtccaactccaaa

SEQ ID NO: 92744 - DNA, 401 bp, Homo Sapiens
tttaaaggtcagcctctttgtataaaagcggtgatgggcgatagctaagtatctggtgacactgatgcagaagagcatgaaagcagtgtggaaacaggacaaaacccccaaaaaggcaatcactttgcaagtcagagtcccataagtccaggtagagccatttttgacagagttgaacacaaatgggaaacaaattgcagatctgaggatatctgaacagcaaagatccaacaggaagtagtaaggtgctctatgcaaggtcttatctttcactagcaaaatggagatcaggaggttgcccaccacgctgactcctattatgaaacccaaggaagtcagtttcagaaaggctgttagaggcgagagattttgcaaaatgttgtcagctgcatggctatagt

SEQ ID NO: 92745 - DNA, 673 bp, Homo Sapiens
caggccataggagaaagcagtgaaaaagaaacactgtgacaagcaaggaagaaacttcagaccaagttgacaggcagcccttcagtttactgactgccgcttcttacctgccaacgccaagcacaaagctgcctgcagagccagcctctatctgtggtccttgtgccaattatcactgccccactcatgccgcaggatataaagcagagtgacagggtcacaggactgccagaggaatacaggtaggggcctgcagagtatgcggattactgccaagtgatcaactatacaaaggaagtcccatgttacgacactaactcatatttttctactattagcattagtccctggtatataaaatttccatatattggctgaactgaagtgggatccctgtaggtaactctggttatatttaacaaaaataagatgtagaacctgttgaggggcaaatgaaggaaaacatcctcgtgggaagtccaactggactaagaaccctggactctagcactggtttcaccttgcccttgggggttcctggtattatcactaccgtgactctactgcctgttggagaggggtggtcctcttccactttgtcactctgatccaagcatgaaagatttcttcctctattctccatagaacaaaataaaatttacttatgtccaaa

SEQ ID NO: 92746 - DNA, 880 bp, Homo Sapiens
  misc_feature (44)..(78): n is a, c, g, or t
aacggtacgagcgcagcgagtcaggtgagcgaggaagcggccgnnnnnnnnnnnnnnnnnnnnnnnnnnnnnnnnnnncagtcgacggtaccggacatatgcccgggaattcggccattacggccgggggacgtagcagccatcttttccctggctttggtgattcagccctgacttctcaaaaagcactgcacagaggaggaggcagcagaaccccacttcagcttcttaggactctgcacttccccagaagaaagaataaaaatgatatgttcaaggaagcagtgaccttcaaggacgtggctgtggccttcacggaggaggaattggggctgctgggccctgcccagaggaagctgtaccgagatgtgatggtggagaactttaggaacctgctgtcagtggggcatccacccttcaaacaagatgtatcacctatagaaagaaatgagcagctttggataatgacgacagcaacccgaagacagggaaatttagataccttacttgtaaaagctcttttgctctatgacctggctcaaacttaaacttggatttgaagttagaagaaatgttggaagtcatttatatatgaagaaatgttggaaggactcatatatgcatacattccttgagtgactatgaatgactgccgggcagtaacttctgggctgtggttgtaaactgtgagcactacaaaatgtttttccttattgataccatattatggtaggaaagacatggaataaaaaatttagatagtatgtcaagtaagtggtgtttttacactgggtttcattagtgcttagcaattgcgagctgggtggaccatctctgggtttggaccatctctggggttctgtcagtatgtaaccagaaa

SEQ ID NO: 92747 - DNA, 341 bp, Homo Sapiens
agctagagcagacccaggaaagctttctggaagagattgcatctgaggaaattcaggaaggatctttgtagattggggggagattctaaattgaaggggtgatagggtgaggggccagagggaagtctgctgtgttctcatgtaggatgtcagccctccctgcaacttctctttttggccaatgtcttttcactttcctgaccctttagaatcatccccagccagacgcaatcatggaagttgccttattgtcactggttaagaacttggcgagattgaagggcttttgttattgttgttggatatttttgtttcccataaaagcacatcatttcaaccct

SEQ ID NO: 92748 - DNA, 586 bp, Homo Sapiens
  misc_feature (376)..(376): n is a, c, g, or t
  misc_feature (441)..(441): n is a, c, g, or t
  misc_feature (561)..(561): n is a, c, g, or t
gcaggcgtcaggagggtgctgcccgctggagtctgcaaatgctgccttccaaaagggacctggtgggttctgttctccctggcaacacatctggctgttccagccaccagcgagagcccaagactggtaactgtccacaggcaacagggagtcatgtcgcggttctccaggagcacccagagtctgcaccacagacacgtccaggtaactggccataggctggtaggttcccggatatcccggatagaaggcaaactcaatggggcgactggggtactcttccccggccgtggggagtctccgcggggtacgcggccaggggtggctgcctgggcaccaggggtttcagcgagctccgggacactcggcaggaaantagtacccgcctcccaaagtaaccataaggcacgggagctggggacgtcccctggggcaccccanggcatgggtggcattgctttggcggctccgccgagcctggcagatccaagggggcatagttgacagcaggcatcagcgtaggcgccgctgggtggctggtcaaaagggagtggcgaccanattccgcccccctcccgcttcccag

SEQ ID NO: 92749 - DNA, 426 bp, Homo Sapiens
  misc_feature (112)..(112): n is a, c, g, or t
  misc_feature (153)..(153): n is a, c, g, or t
tttagagcctgcacagttgttctaaaaaaggcggtggctcctcctaacgttggatgggctcttgctctgcatggtgataccagaaagcatgccatacctaagacctactacncctgagaagcagtgaagtgctcctggggcccaccaagggcncacacaaagtcaaggagtggatggccttgctccagctactgctcagatcacctttgcaagatgacattgtgttgggagatggtcatcagagccagggccatggaagatgctgtcaggaggcacgaggaaaggctatgggagcacaaagcaagaaagtggccttctgcaagccaggaagagaggcctccccagaaaccaactctgtgagctcatcgatctttgacttttggcctccagaacattgagaaaataaaagtctgttgttaaaccaaa

SEQ ID NO: 92750 - DNA, 424 bp, Homo Sapiens
tttaatgccaacacctaaagcatttatttggatatctttaaactttttacatatgatacattccaaattttacaagttgtccacagatattaaagttatagccaatttattaaacagatatgattttccctgatatggaaagcgtatgttatataaacatttctacaataaacataaaacatgcggaacaaatcataaaactaacatgatttgtaaggtaggaaagacaactagcttaacaccagaaaataaaaaggtgtgtatgttgcaatttcatgtaaattcatcttctcccaggctctgtgatattctcagagaatgaaatccagagacaacctttgctaactccaggctcctaggaagtcggaccggaaagctggagtattgttatgatttggtgaaaatgtttataatccacttgtag

SEQ ID NO: 92751 - DNA, 1976 bp, Homo Sapiens
  misc_feature (1645)..(1645): n is a, c, g, or t
  misc_feature (1742)..(1742): n is a, c, g, or t
cgtgcaggggccatggttacgccctccccccgatcgtcattcctcccaaacttggagctgctcaggccctcaaaattggctccaagacatgttctactggcaatgaagcctcctggaggagacttgcatctgtttcgtgcccgccacttggctttgggcagagggaagccacttaccacttcagggatgacttatcctccctccagtggagaagctgaaaacggtgctgcagaagatgaaagacgttccacatcaacttcctggagaagtacgcgtgaggacgcctgagccaccagcgggagacctgtccttggctcttcctcccaatgcccgtcaggctgaactcgcctcccccgtgactctgcctcgggcctcgcagaggccgctggtcacttcgtcatcattttgcccctggagacgtctttctttgtgccttgatgttgagagcgcctctcttttgagcaaacaagcattctatatgcaaccagagtagaggggacctgctcagcaggtgtgaccagggttctctgaatctgttattgtttttgcttctggaaagttcatttggggtttacaacaactaggatgtgttgggtgagatgtttcagatctggagaaatgagcaggtgtcgggaaatgtgtgacttaaccgtggtgagggctggaaatccaaactcaccaccatgatctgtgaaataaagcccttagcggtgtgaagcatccggtcctttgaacagaagggcctggaaggcccctggggctgagaaagggtccgcccggtggcctggaggcaggcgccaggagcgcagtagcacgtggactgggcaggatgttgccactagcttggggtagatgctgggggctgcggccacggtcagagggccccactgtgaggcgtgggtgtgagccaggctgcaggaggaactgggcctccgcttcccagcaacgcagccaggcctgagaattctgtgcgcccggcgggctttgggaatgaggggttcccttgaacatgcgtaggctggaaccccgtctgagaggtctccctgaatttcagtgacacatagtgcagcccggcagtgtcccacttccgtggagagagccgctggaatggtgtggacccatcccgcgggtgaccggtgcctgttctcccctgaccgagcctgtgagcacatcgccccctgctggcgacagcggggaaatgagggctgaaaatatcctccccacaagggcaatccccgggacctgccgagcagccaaggccctgtcctttcttgaatggtggcgagctgaatctggtcggtttcctagcttttaggtggtaaaagtgcctggcagcttggctgccgtggaggagtcagtcgtggttggaggttcattgccgtgctttcatgcagagtgttttgccttcatgttagcttccggctcccctcccaggctgcagactctgacctgtggcatcaggcttctcccagtacaggagggtgccatcccccagcatgcggcttctctgccattagcagccctgggcgggccgaccacactcgaggctgcggtgctacgggcttagccctcgcctccctcactgggagcttccccatcctccctgccttccccagtgggaagttagggaagctcaggagcctgngaccccgcatgtcccaaaatgggattggagaagctggagagaaagcaaaagaggccgaggagtgaggcagcagcctctatgcttgatttccacaccngggtccgtgcagaggaaacagaaactccccactgtccttacccaccgacatcacagcccctatgaagaaagtagcccacatctcaaataacaaaaggggaatggttcttaaactttttcttcccttaaaaaatgggagaaaattgcaccttgtgcctggctgggtgggatataaaaccaggaattagttcccaggggtcgtggaggtttcctgggtgaaaaggggttaaatccg

SEQ ID NO: 92752 - DNA, 1030 bp, Homo Sapiens
gtatcggtgatactgccagagtgttgaaaaatcagctggcgcggtggggaataccggcgaacgtcaaccacgcgtccgtccacgcctccgggcggcggggggccgcggagccgctggccatcgattctccccgccatgtgacgccgtccttagccctgcgacccccagcgcgtcccgggcctgcgcctccgccccgccgcgcagcgcacgatgcttctgccgggacgcgcacgccaaccgccgacgccccagcccgtgcagcatcccggcctccgccggcaggtagagcctgccggggcagctcctgcgcctcttctactgcactgtcctggtctgctccaaagagatctcagcgctcaccgacttctctggttacctaaccaaactcctgcaaaaccacaccacctatgcctgtgatggggactatttgaatctacagtgccctcggcattctacgataagtgtccaatcggcattttatgggcaagattaccaaatgtgtagttcccagaagcctgcctcccagagggaagacagcttaacctgtgtggcagccaccaccttccagaaggtgctggacgaatgccagaaccagcgggcctgccacctcctggtcaatagccgtgtttttggacctgacctttgtccaggaagcaataaatacccccctggcctcctttaaatgccaacctaatgaatttaaaaaacaaaaccgtggggtggaagaccaaggagctggaaactgcactggccattgaatccaaagttcctccaacatcctactctggcgaccctacggggaaggaaggacccccgggaaaggggaacatctggctccctcccaaggcagaaacgggctccccccccttttccattggcttgggctttactccaccctctggcaaggtgccttattccccgaaagggggcctatcggggaaaacaaaaggttggccaaaaattcttcgcgtcaaaaaaattccaccgattttttgggaaaacccccccgttctttgccccaggcgcgtgg

SEQ ID NO: 92753 - DNA, 882 bp, Homo Sapiens
ctccagctcgtcgccgtcctggctgcgagagcttgggcacggcgccggggctcagtctcctcttctgtggaatggcgataactgttacctaaccaaactcctgcaaaaccacaccacctatgcctgtgatggggactatttgaatctacagtgccctcggcattctacgataagtgtccaatcggcattttatgggcaagattaccaaatgtgtagttcccagaagcctgcctcccagagggaagacagcttaacctgtgtggcagccaccaccttccagaaggtgctggacgaatgccagaaccagcgggcctgccacctcctggtcaatagccgtgtttttggacctgacctttgtccaggaagcagtaaatacctcctggtctcctttaaatgccaacctaatgaattaaaaaacaaaaccgtgtgtgaagaccaggagctgaaactgcactggccatgaatccaagttcctcaacatctactctgcgacctacggcaggaggacccaggaacagggacatctgctcctccaaggcagagcggatcccccctttcgatggcttgtcttactcagcttttgcaagtcctatcccgaaggtgctatgggaagcagagatgcaaaatcatcgtcaacaaatcaccatttgggaagcccctgtgttgccaggcgtgaaaaaatacctcactgtgacctacgcatgtgttcccaagaaacatactcacagcgatttgatccagccatgctaatctaaaaccttctttgaagcagaaagatgggtgactattggtataaaacttcgacccaagcggatcgaagggttctgagggaaagatggaatcttgttagcactctctggcagcttgcttacttaaagccac

SEQ ID NO: 92754 - DNA, 383 bp, Homo Sapiens
tgtggctcctggatacattgaatcctcccaaggcattggaagggaacttgtactatagtagcactagttcctgacttattatttttaaattctaccaagatggcagcatcatctggagtcatccctaatcgaggctcttttctagagactacactatcttgaatacaccagagaaagagatctatcattcctatgccctcatagggagatctaactgaaagagcagactggggagggcatgcacatgacaatcccatcttagaaaaaccatgaatgggaaattctatagccagaggtctagtctggattacaggcttccctctccttgaaagatcaggacttactatttctattatgatgcaacaagggtggaaggcaactgt

SEQ ID NO: 92755 - DNA, 458 bp, Homo Sapiens
  misc_feature (55)..(55): n is a, c, g, or t
cagacttgcagaaacctggaattggtgattggctttagaagtggagagacaaaanaggaggcatagaaagtgccaacatttggctacacagggaagaaagacgtaaaataataaaaacattggcatcacctgtagactcaaatcctgtgagtgaaggacctgagcaatgaaggatggattgaactcgtgattagccttcttcagcatatgtaaaatgatgtctgcttttcttctctatttgtcattttaccgactttttatatatagtagtttccccatatccatggaggatgtatcccaagacccccagaggatgcttgaaaccacagataataacaaactctatgtatcctatgatttttcctgtacatccttacctatcataaagtgagtgtataaactaggcacaggagattaaaaacaataactcataataaaatagaacaattagtacaacc

SEQ ID NO: 92756 - DNA, 408 bp, Homo Sapiens
tttcaggagcaaagcatttaatgtaggcagctcacaaacagaaatttatcttacccggtggggggggtgtgtgtgtgtgagagagagagatccctcatgcacccaagttcaggtggagcatttgcaaccttggtagtcacagcctcctggagaagagtcctcccattcattaaaatgagagatattttactgggagcagggcttttctccatgagttctgaagggcacctccatccaattcctctatcctcagaggttctcactttgattcagggataatctcctgagctttcccttccatttctgagcattcagccctggccaggcatcctccagaggcttctccaagcttccttgctcaggcctccctccctgcctttctcagcgctgacaatgatctttctccat

SEQ ID NO: 92757 - DNA, 552 bp, Homo Sapiens
tttctcactgcagcatgtagcaaattagactggccacctggagacccaggtcctcattcaggttatgctcacagaatgtgttacccggaaagagctgaagtctagggcctcagtttccccagtgcactggtggcaggtgggcctggctgagtcccagcccctcaggctctggcctctatgtccctacattctctccctgcaggaggctccactgcactcgcaactacatccacatgcacctgttcgtgtccttcatccttcgtgccctgtccaacttcatcaaggacgccgtgctcttctcctcagatgatgtcacctactgcgatgcccacagggtaatatgtctgggtgccccaggatgtcgccaggcccgcctgccttccccagcctagctttggagaggggagtagcctagttgtccttcccccaagcccctgctgaggctgcatttaataccaaggataaagcagccagtgctgacactgggccaggaggttcagggagattccacagccacatgtgcacaatctgggtcatgtaggagagaagctc

SEQ ID NO: 92758 - DNA, 479 bp, Homo Sapiens
ctggagattccctactcccatgtggtgttggaactctgtttttgatccatgcatccttcttttggagaactacacccttcagaacttaccaaggaaagattctttgggggcgaaggacacggcgacattacagagagctctctcgaaacggctcccacgagaaaacagcgatgtccaactcaccatggtacaatagctcgccttagccacaactccacttggtcttctgggactcaggaaggccttaaaatgtgcaaaaagatgatgacagagtaagcacggaagtctaccagtcacaggcgcctagtacgtttagtgctcacactccattctgccttgtcatttgagagactttggaggctgcattgtaagaaacggttggctgtggaaatacattcctgtccattccccttactacttttgaaattaattccctatgttgaaattttctcatgaataaagcagaaattataactaaa

SEQ ID NO: 92759 - DNA, 583 bp, Homo Sapiens
agccaagctcatctgcagaataacctcaacgtgggaagtgacaccacatcagaaaccagcttttctctctccaaagaagcaccaagggagcatctggaccaccaggctgcacaccaacccttccccagaccgcgattccgacaagagacggggcacccttcattgcaaagagatttccccagatcctttctccttgatctaccaaactttccagatctttccaaagctgatatcaatgggcagaatccaaatatccaggtcaccatagaggtggtcgacggtcctgactctgaagcagataaagatcagcatccggagaataagcccagctggtcagtcccatcccccgactggcgggcctggtggcagaggtccctgtccttggccagggcaaacagcggggaccaggactacaagtacgacagtacctcagacgacagcaacttcctcaacccccccagggggtgggaccatacagccccaggccaccggacttttgaaaccaaagatcagccagaatatgattgcacagatggcgagggtgactggagtctctggtctgtctgcagcgtcacctgcggga

SEQ ID NO: 92760 - DNA, 757 bp, Homo Sapiens
  misc_feature (346)..(371): n is a, c, g, or t
tttttggaaatgtaaaaaatgtcagtatctatatttaatttcattgcttcaaaacatatatatgtatgtatatacatagaatttaaaaactgacagaatgacaaagatttttcaacaatacataatcatggtgggagagtttaacatacctctctcaagtaaatgctagatcacagatcaacatttataaatgtgtagatggtttttaaacacatttgcttgatctagcagacatttgtagaatacaatacattgatttcaaccatccatgaagcatttataaaaactgacatatactaagtgcatcagttaggaattatattcaggtgaaataaacctcccaccnnnnnnnnnnnnnnnnnnnnnnnnnntgtaccagtaagaagtgcatatttttcatgtatgggacatccagaaataaatagtccagggctgctgcaatcacataaatatgccaattctattaaatctatcctaaatattttttagattacagaagcaagatggttatgacttccggccaccctcttcttagcttgcggcttttacccttatggtcacaggagggctcctctaggtctagaaatcatgtctacttgtccaaaaggcaagaagtggagagatgtggctacatgaaaccatccctgaacacaatatcttccccagagtcacatccagtgacttctcatattcatactagccaggaccggaggaaatggcctgcccttgcttgcaagaagggctgggagatggaagc

SEQ ID NO: 92761 - DNA, 681 bp, Homo Sapiens
agtctctgcagtgaagttgaggatgacttgctcactaatttcataagtttaacaaaattaaaagttttgtttgactacattattctttgtatttaggtacctagtagaactgggttgtatcaagccgctctgtgatctcctcacggtcatggactctaagattgtacaggttgccctaaatggcttggaaaatatcctgaggcttggagaacaggaagccaaaaggaatggcactggcattaacccttactgtgctttgattgaagaagcttatggtctggataaaattgagttcttacagagtcatgaaaaccaggagatctaccaaaaggcctttgatcttattgagcattacttcgggaccgaagatgaagacagcagcattgcaccccaggttgaccttaaccagcagcagtacatcttccaacagtgtgaggctcctatggaaggtttccagctttgaagcaatactctgctttcacgttcctgtgtcagaccaggctacccagtcgagtcctcttgtggagcccacagtcctcatggagctaacttctcaaatgttttccataatactgtttgcgctcatttgcttgccttgcgcacctgctctcttacacacatctggaaaacctccggctctctgtggtggaatacccttctaataaaagggtaaccagaaat

SEQ ID NO: 92762 - DNA, 529 bp, Homo Sapiens
cttcaatgcaatactgaaaactggctaaaaataccaaatcaatatactgctaatggtactttgaagagtatgcaaaactggaaggccaggaggaggcaaataatatgtctttccgatggtgtctcccaagtgttggtgctttgggtttttataagttgtgaaaaggaagatgcacatttcttcattctccatggtgtgcatggaaatgtgtttgagtgtggatgtaaaagaaatcgagtaataaagaattagctggcttgtgaaatagtgcagtgttggatgcttcaagaggtataatcctattttattagcacaaacttgctagctaattagagtttatctttttagaaaggacaccgtataggttcgtaaaaaatatttacaggaagcaaaatagatctattactactttaccgactttaccccctttctttaatttgtataatttttgtactatatatcgatgtgtaaatgtttagagtcttcattatgaaaatatcaataaatatttcattagtttacatttaaa

SEQ ID NO: 92763 - DNA, 673 bp, Homo Sapiens
accctttgtgtccaggcactacattaggttctgagcacaaaatgaagacatagaatggtcctcaacaagctgctgatgcccataagaaagaggcctgcaaacatgtgtaaacaagtgtgacaagttcaccggcaaggggcagcacagggtggcactgaactcagcctcggtattgccctgaccacatggctgcatgtgagcatgccaggtgaggtgagcaggagagatgttctaggcagcgttggatgattctctgtcacattcctttgtggtcaactgaattgctctcttcaactgcagctttcactgaggccacttgaggttgcacaactccttccagacacagccatctctgaaactgggagcccagtcagcccccaagcaagtacaacctgcaagtatggagaggtaacgccctaggagccatctctaaccagtgaagaatgagagccagtaagcaagtctagccactcctcttttggagggaacattctagaaggcattctgcacacttgccaaaggtcacagaagaattgagcccctgttgcccaaagcagcaaccttaatgatgcacactcagtggcttttcattcttccctgtctcactctctcccttttctttcacctctgctttttgggatctcctcccaaataaaccacctgcaccaagaaa

SEQ ID NO: 92764 - DNA, 1465 bp, Homo Sapiens
  misc_feature (62)..(120): n is a, c, g, or t
  misc_feature (1239)..(1239): n is a, c, g, or t
  misc_feature (1301)..(1301): n is a, c, g, or t
  misc_feature (1306)..(1306): n is a, c, g, or t
  misc_feature (1314)..(1314): n is a, c, g, or t
  misc_feature (1328)..(1328): n is a, c, g, or t
  misc_feature (1333)..(1333): n is a, c, g, or t
  misc_feature (1352)..(1352): n is a, c, g, or t
  misc_feature (1356)..(1356): n is a, c, g, or t
  misc_feature (1386)..(1386): n is a, c, g, or t
  misc_feature (1410)..(1410): n is a, c, g, or t
ccccatacggtcctaagtagcgaggcctgggtggcgaattcggcacgaggccgccgctgaannnnnnnnnnnnnnnnnnnnnnnnnnnnnnnnnnnnnnnnnnnnnnnnnnnnnnnnnnngggcggccggtgggcagcgggcgccatggccgcgccggagccgctgcggccgcgcctgtgccgcttggtgcgcggagagcagggctacggcttccacctgcacggcgacaagggccgccgcaggcagttcatccggcgcgtggaacccggttcccccgccgaggccgccgcgctgcgcgctggggaccgcctggtcgaggtcaacggcgtcaacgtggagggcgagacgcaccaccaggtggtgcaaaggatcaaggctgtggaggggcagactcggctgctggtggtggaccaggagacagatgaggagctccgccggcggcagctgacctgtaccgaggagatggcccagcgagggctcccacccgcccacgacccctgggagccgaagccagactgggcacacaccggcagccacagctccgaagctggcaagaaggatgtcagtgggcccctgagggagctgcgccctcggctctgccacctgcgaaagggacctcagggctatgggttcaacctgcatagtgacaagtcccggcccggccagtacatccgctctgtggacccgggctcacctgccgcccgctctggcctccgcgcccaggaccggctcattgaggtgaacgggcagaatgtggagggactgcgccatgctgaggtggtggccagcatcaaagcacgggaggacgaggcccggctgctggtcgtggaccccgagacagatgaacacttcaagcggcttcgggtcacacccaccgaggagcacgtggaaggtcctctgccgtcacccgtcaccaatggaaccagccctgcccagctcaatggtggctctgcgtgctcgtcccgaagtgacctgcctggttccgacaaggacactgaggatggcagtgcctggaagcaagatcccttccaggagagcggcctccacctgagccccacggcggccgaggccaaggagaaggctcgagccatgcgagtcaacaagcgcgcgccacagatggactggaacaggaagcgtgaaatcttcagcaacttctgagccccttcctgcctgtctcgggaccctgggacccctcccgcacggaccttgggcctcagcctgccccgagctcccccagnctcaatggaactgggagggtgggtcctgccattgccccagaaaatcagccccaggcccgggntgagnccccattntgccccctgcccancaggntacctggggggcctgtggncaancaaaaaataagggggagaaaagaccccacnaaaatgttgaaggaaagaagtctnaagaccggaaaaccggaggagaggaaggagaaagaggacccccgaggaagagaaa

SEQ ID NO: 92765 - DNA, 1705 bp, Homo Sapiens
  misc_feature (990)..(1073): n is a, c, g, or t
  misc_feature (1212)..(1232): n is a, c, g, or t
  misc_feature (1282)..(1315): n is a, c, g, or t
gctgggtggcgaattcggcacgagggataagtggggtggcagcctgggtcggccagagagttcaggccaccccggccggacgcctgccacttgctgtcactgtgccgctgtcatggcacgctccgggagtgccacgccacctgcccgggctccgggagcccctccacggagcccaccccagaggctggtacaggatgtcagtgggcccctgagggagctgcgccctcggctctgccacctgcgaaagggacctcagggctatgggttcaacctgcatagtgacaagtcccggcccggccagtacatccgctctgtggacccgggctcacctgccgcccgctctggcctccgcgcccaggaccggctcattgaggtgaacgggcagaatgtggagggactgcgccatgctgaggtggtggccagcatcaaggcacgggaggacgaggcccggctgctggtcgtggaccccgagacagatgaacacttcaagcggcttcgggtcacacccaccgaggagcacgtggaaggtcctctgccgtcacccgtcaccaatggaaccagccctgcccagctcaatggtggctctgcgtgctcgtcccgaagtgacctgcctggttccgacaaggacactgaggatggcagtgcctggaagcaagatcccttccaggagagcggcctccacctgagccccacggcggccgaggccaaggagaaggctcgagccatgcgagtcaacaagcgcgcgccacagatggactggaacaggaagcgtgaaatcttcagcaacttctgagccccttcctgcctgtctcgggaccctgggacccctcccgcacggaccttgggcctcagcctgccccgagctcccccagcctcagtggactggaagggtggtcctgccattgcccagaaatcagccccagccccggtgagcccccatcctgcccctgcccaccaggtactgggggcctgtggcagcaagataggggnnnnnnnnnnnnnnnnnnnnnnnnnnnnnnnnnnnnnnnnnnnnnnnnnnnnnnnnnnnnnnnnnnnnnnnnnnnnnnnnnnnncgagcgagcgcgcggcagccgcggggcgagggcctttgctgctctgccggggcctgctgactgaaagggaatgtgtgtttgtgctttttttccaaaaagatctccagctccacacatgtttccacttaataccagagannnnnnnnnnnnnnnnnnnnnttgggacgcgctctaaataattgcaataaaacaaacctttcgtgtgcagnnnnnnnnnnnnnnnnnnnnnnnnnnnnnnnnnngggggcggcccgcaacaagagtattccccagggagggcggcccaggttaaagcgggatccccagggttaccgtggcacacaagggtggcccccaattgcggggcagccagcaatatatataaacggcacaaaggcgaccatgttgtgggcgcccgtgacttgtattaaacaacaccgtgttgatcggaacacttggggttggaaaaaaacttggggagcataatccgtgagggaaaaccatgtggaggggaaacgagggaaccctctatacaattattggtgtggtgtgttggggtgaccccataatcgttgggggccagcaagatataaccctaatcagggcgcagatttttgagaagcacgccctgtgagaggggcgaagacaatagt

SEQ ID NO: 92766 - DNA, 505 bp, Homo Sapiens
  misc_feature (89)..(221): n is a, c, g, or t
cgtccccatgacgacatggcaatgagtcttccccagcaggcagatgccagatgcagtggtgaccacaccttccatctgggaggattccnnnnnnnnnnnnnnnnnnnnnnnnnnnnnnnnnnnnnnnnnnnnnnnnnnnnnnnnnnnnnnnnnnnnnnnnnnnnnnnnnnnnnnnnnnnnnnnnnnnnnnnnnnnnnnnnnnnnnnnnnnnnnnnnnnnnncagcccaggcgacatcaacggccagccccatacgcgtgaggagggattgcggcaccaggggcgctcaggattgggccgggctgcttctcagaagaggggacattgagcccaagcaggctgcactcctgcttggacggaaggtgcatgggtggggagggtaatcacaccaatagagacatggatggactcgtgcagaacataaatactctctttgcttatgtctatgttactcaaaggaaccatggaaataacacattcccaattacaatgcagtaaactttaaa

SEQ ID NO: 92767 - DNA, 407 bp, Homo Sapiens
ccccaaagaagaagtgaccaaggaggagtttaaactgaatgaacaacctcggctcctggactcattgcttcacaacccatctacccctggatgaagttatctggcttcaaatattatgcaggggcaaacacctgctgatgtggcaactgctgatgctcatggtccccatggcatgggggcctcagggcagcctgcctggaggcaacagtttactaccatcaagttcagtgctttgactttgatcaactgactgggtttatccaaagtacagtactttgaagatgtcatcccattgtcttctgacctctataattgccactgagagatctgctgtcagtctgcttatccttccacggactcaagtttcttcaatctgaagatacatgtctttctccagggacatgtgg

SEQ ID NO: 92768 - DNA, 589 bp, Homo Sapiens
  misc_feature (76)..(76): n is a, c, g, or t
agctcctttgtagaactaaggcctggcctctcttccttctgaaaagacaccttcccccacccacagacttcgcggnctcactaagcgtgctctcctggtccgagaacccgagggtccccatgtggattatccagccagtgtgtggtcctttgaggccccaagcgcaggcctgtgatgaggaccaaagaggtgacttatggtcaggagtactccaaacagctctcagagtaggcatctttcctgggtctctaaagagtcatgctgacctggtgtgcaaattcccttccacccatccctctacctcctctggggatggcttgccgacatgctttagaaactcccctcttgggaatgctcctctgactgagggctccaacagctttaatgaaatcagccgagagggtaaaaaccaacctgttgcatagaatggaggggggaaaaagcacatactcaatagatttttgagtgtggtactctgtatttttgcagcgtttattttccaaatgagcagtttagaaatatgtgatgtaaagtacatactgtacgtttgctgaaaattatattaaaagcactattttaattcttaaaa

SEQ ID NO: 92769 - DNA, 422 bp, Homo Sapiens
tttgccgaaacaataaattgcctttagcagcagtttaaaatcctatcgtgaacaacctatattttcgccattttacaatggagagttgtgacaagtacaggttatcaagtttgcacttaactatgccaaaaaaagtttgaagcgctctattctcagacatgctgtattattacttctcattcaagattgaaaaatataaaggtatccaaactctgtcttaatgtaaatgtaactatttttccttcaagtgttgactagggagtcggtttctctcttaaagacactcactgtacaactgaaagcagctgtcatatttctggcaaaatgtgtttacgtatctgacaagttgtacatttgtgtatgaactgacataaaatgtgaaagcctgtaagtgtacatgtagtggtgtggtgttctgtcta

SEQ ID NO: 92770 - DNA, 460 bp, Homo Sapiens
agaggccacaggatgtgcctacaatcacagagctggaggcaaaacccagcagaaccaagtcagcccagtggccttcctaccgattcaccatggcctttggaccggcccatactcagtctattttaagtaatgccaagaagtgtctctatgtatcccccagcagtattcatgcccaaccagccaggacactcagggttccccaatttactattagggagcctacttcggcagcagggagagtggtactttgggacaggttggggctggcagggcaggctgacagaggtgctgagcaggaaagcatgcaggaggaaaatcctgcaggggtgtctgtttcacaagagttacaagaatacaggaccattccttctaccaaggaggctagtggttcgagatcctagaaaactaggactccgcctttaccaagaataaacaacagcttctccttccccaaaaaaaa

SEQ ID NO: 92771 - DNA, 450 bp, Homo Sapiens
acaacgacgccattatcagcaccccctgccggcgcctctggcgcagcccgcgcaggagattttgaaaagcgccggagagctaggtgaagagctgggctcccaagggggtgatagaaccagcccgcggcccggcctcctcctcccgcttcccattcgcagcccgcctcccgccgggaagcggcccggctgctgcagaacggccgcgcctgccctcccggtttctcccgtccagtcttcaccgtcctttcccagagaaagcgacagcacagcctatgacaaccgaagctaaaacggaaaaactgggccgggcgcaagaggaaaccagagccattcgactattgctagaggagaggaatagctgcaggaaaacatgcgcaaaatagcacaaacattgcgtcgtcaaggctgcaatgtctaatacaaaatagaaggttctcatagcaacaaaaa

SEQ ID NO: 92772 - DNA, 503 bp, Homo Sapiens
tagcggccagacgtggcttctcctgagttctagggctcgggccagagtggcactactgcccggccagtccaggctcaggcaggaatcggacgctggggcccgggctctgcacagagagctgggcttgagtggagtttattgtagatttctcccaaggggatcacttagcttctcactgacacacccttcccaattgccacaagcgcaggggtatcttacagcactttggggaggggtgggacaaactgcaaggttctggggccaaggcctacccaggggcctctgcccagagaactcacaaccccctctctgacctaggggacaatgcaaacaggtcacagtgcattcccatattaggccatccccttcacgaagaattcaggggatgtgggaagtggggaggcggggagggatcttgactcttgtctcctttgtccttttgttcagacagagttgtacctgcagcagacaactctgaattaaagcatgaaaacacagcaata

SEQ ID NO: 92773 - DNA, 380 bp, Homo Sapiens
  misc_feature (151)..(160): n is a, c, g, or t
agtttgatgagtgtaacaaacaaatagagccctgagatacagagtaacactcggggcccacttccagagggtagcagggaaagacagtcagcaatcttcagcggaggcctgaagtctgagaaggccagtcccatgaagagtattccaggcnnnnnnnnnngacatatgtgaggcctgaaggtggttccctgctaagccaagtggccaaagtttgagttctttcatcatcatagtcatggaccaacatctcagcagtggggtcaaaatcatgatcctcagaagacaaagacccaactggaataaaacaaactgaatcactttacacatttacaaggctattaacaaaagaaaataaaaatttgtgttcttctgccaaaaaa

SEQ ID NO: 92774 - DNA, 443 bp, Homo Sapiens
agtactcttaattccataataatgtatatctttggaatcttgacgattttcaactcttaatccatagctcaagtcttctgtctgatgttgaatgcagtgatcttccaagcaaatgacagtatttgaaccttcccttaaaatggtagtaataaaattccaaagtacttgttaagtgaaggcatattataaattactgatatttggaaatttctaagagtatgtcacttagaaatgaatatgtagtggttaatgtgactgtcttctattactgagaatatgtgaatcaaagcaggatgctaagatttcctttctttgttatgaatacctgtttatactaatgttccattatgacaaactctcctcactggcttggaagagtatgatatcataatctgagaaaatgttaaatgatgctttctaaattaaatgcttcattaaacctc

SEQ ID NO: 92775 - DNA, 420 bp, Homo Sapiens
acagaaaattggatagaaattattccaggcatatgggatgtggttcccctgggccagaaccacgtagggcagaggagccctgccctccaagtgtgcatgcccaccaaagggacaggggctttcaggagtcacaccagatcacgcttgggacctttttagagcctggctgagccaccctttccagagttccagtgagcagggggcccctcagtgcatcttccccacctcccctgcttccagggacgctgggctgcagacttcgcagctgctgccacatggggttggagcctccaacagcatcatccctgagtagacctggtccactgagtcccacaggtcggctctctgcagcctttccctgcaggtcaccaccctctacaggcaatggcaaggacgcgacatcacaggtagacagcccac

SEQ ID NO: 92776 - DNA, 504 bp, Homo Sapiens
cgcaggaagttcccaagtgccaggtgtgtgtagctcagagttcctttaacagtgaggtgtctctcactgggggagcttccaggatcctgagcagactggacacaatcatctctcccttcctctatgtcaagcactgttacaaaagactgtgagcaaatttccatctaaatattaataattctgaagaagaggcaaaactgttgaatgcaagcgatacctattgttgaagaaacccacaaatttctgattctaagatcaggggatacaacaaaatctacaagtcatttcaaatagcacacaggaatcaaactttggtaaatcatttctgaggcacaattaaatatattgtagcactatgttaattaattatattaaatgtcgattcatcttgaatgtattctcaattgcctaccaaaaattggtatgattatcatttctgggtctactgatttttcatcatggcaacagaaattgtcattaaatagaattaagatacaaaaaaaa

SEQ ID NO: 92777 - DNA, 418 bp, Homo Sapiens
agcgaaaaggtgtcagatgtgtaccgtgttctgaagactctccccaccttctccagcaccctccccctttgtccttcacaggcatttcctccaatcagtctttcgtcttctgcttcatggaagacctgacggacacagacaactcatctttacatcctccatgcctgggacattggcagggattctgcagcagtgatgaagagcatggacacaaatcataacccgggacttgttccatgggtagccttgagagcaggtgacttcaacctctctgaaaccgagtttgaggtcctcatctattaagtggtattgatattaatagctatgtcttacggctgtttgagaatgaataagttaatgcatgaatacgtttagcacagtgcttaaaaatcacaataaatatctaatacaatataaa

SEQ ID NO: 92778 - DNA, 371 bp, Homo Sapiens
  misc_feature (268)..(268): n is a, c, g, or t
catcactttaaatgtgtcatgccactctcttctggcctgcaagatttccactgagaagtctgctgccagatacattgaagctccttcatatgttatttgtttgttttctcttttgagatgcgtttaggatcctttctttctccctgacctttgagagtttgattgttaaatgtcttcagttagtcttatttgggttaaatctgtttgggtgttctacaacctttcttgtactgaatattgatatctttccctaggtttgggaaagttnctctgttatctctttgaataaattttctaccccagtctctttctctacctcctctttaaggccaataactcttagatttgccctgttgagggaaattaattcc

SEQ ID NO: 92779 - DNA, 418 bp, Homo Sapiens
gaaggtcctagggctggcagactcacttccatcacccaagctgcttattacagttatttctgattaccacccccctttcaaaaagctctggaatgcaataaaaataaggactggggggtgggggtggcgcaggctcataaaattaagaaatccttccatctgaaatcgtgattccaggcccatgaagtaactcatttctggcctgggtgcctataagcaagaagcagggatgtcaggatgcctgaattatccaaattatttgggtcaaattaatttagactgtttgagaaaaggcattaatttggttttagatttcctggattagccctggtattaatttcacagggagtactttagaggacttttctaaactggaaaataaagccttttcctgtggctgtcaaggtcttccaaaaaa

SEQ ID NO: 92780 - DNA, 499 bp, Homo Sapiens
ctgatgtggtgaagatggccagtaaagcacaagcctccaacccagttgtcgagggacaaccacccacaacaccaaagaggcgaagaagaggaaggccccctctcaaccaagattcagaagccctctgaagattcccaagacaacccggaagggaaaagagagtctttgagggagttccaggaaaaaagccactcccgaaagaccgccgcttcaagaaaacctgaggaagggagagggccaacgctatccagccactctgaccagctgaacgaggaactcaatcaaaaggagccacagcaggaccaggaaagtgaggagacttccaccatctccagcgtctccctggacagccagtaatttcagggcaagttcaaaggactagatctatctgagaggtctccataggtctaaccccagagaaatagccaaaagggtctatggtacattttacacacaacagggtacccctcatggtgatgaaaataaaatgaacctgttg

SEQ ID NO: 92781 - DNA, 227 bp, Homo Sapiens
gatcactcctggaggaaccagggtctctggagacttagctgagttacggaaggcacgagtatttggaaaatacatgttggtcatcaatatcgtcatcatcaacatgatcaacatccacagaggaatcctgaggcggcctgtgctttctctacttcagaggagctgaaaacccataaggaacagaatgggacagaaaccagaccatgctggaagaaatgtagccatct

SEQ ID NO: 92782 - DNA, 386 bp, Homo Sapiens
ccctgaaggactcacctgccacaactggacacagttggcaaagacatctccatggacagcccaaacaatagctccagattcttgctatgtaaaaaacaagtatgacagaggtctgaaggaccagaggggaccacttattagctcatcacaaacttgaaacaggcaaaatgtacctgtcagagcctaagtagaactggattgcatgatgtatggcagtgatcttccagagcgctctcaagtgtgtttgacacgagtgaactgtgttcgagttgattctccctatggcagtcccaaagcctaattatgaaaacacgataagatcattgcacagttagaccattgcaccattggcattcctaataaacagatcagcttagcccagcaaa

SEQ ID NO: 92783 - DNA, 443 bp, Homo Sapiens
accgtcttcaaagaggacaacatttatttagttgtatgtaaataaaaattacttggatacatgaggggaaaacgataaagcacatgatataaatatacaattaaccctttataatatcttcaaacaacggcaaataacataaacaggaaatatttgcagtaattctttacagtattctcttttactctgttgtcaacatgaatactgcaagcaggtctttattttttttgacaatgggaacttccactcattcggtaagaagtcaccactttcaaaacatagtaagtcaacacacaactgtacaaactgaacgtgagcaagtctaacttagatgtaattagagttgagtcattggataaaaagttcatattgatgatacacaaccagcagtgcaagcattcaaatacattggctatagcaccatttaaaatatttaacactgc

SEQ ID NO: 92784 - DNA, 650 bp, Homo Sapiens
cgcatgcaaaccctgccttgccaacaggactatcggacaggaacgggctcacggcaagctcccctggacccttggcacggggagaaaacccgtacacttggacagcacccttcctcctagcccacttgctgtgttggctaacagaggcactggctgtgacgggccagcaccagtgccagcgccatggaggctgccttttggtcaagtctctcccgctgcagcctcccgcccaacccagcggcagtatgacctcatccgttccttttgtcatcctccaacaggcctcatatcccgcacttagaggcaacactgggtaccccgggctggccattcactcccttttgtgagtgaaggcctgcagcagggtttgggccactcccacagctgggagtctagtctggccaggaaacagtggatcctcgcctggtggttggcctcgaacagtcgacagccaaagacaggactgccgtgcaggaacaaggtacatgcaagcatgcaaaaaggcaaatcagactcctgccacaagaaacccaagtccatcggttgacaccagacaggcatcactgtcaacaggttgccaccttccatttatttccgccatgctcattgttacaataaaaccgtatcccaattatctacgtgaaaaaaaa

SEQ ID NO: 92785 - DNA, 1882 bp, Homo Sapiens
  misc_feature (1263)..(1277): n is a, c, g, or t
gggtccggaattcccgggatcccagagagcctgtctgtgtctgtgtctgtgatggggagccgcctcgcacccctgttgtctgcttgtctctttgtgtctgttatcctgggcaggatggtcattctcaaaaaccctggggtcctgggccagagacaggcagggcccagtccaggggccccaggcctccccagtcccagtgtgcgagccccacttggacacaagtgttcagagaggtccccctctgccacttgacagggaccttcaaacctcgacagtgatgcaaggacacagagagtaccagataggtagcagagaccaaggcgcagggtgcttcagatgagcaagagaacccagtcgaaccagataccccaggtgggccggagggaccccagaccttcagagggctgccctggtgttctccacagtgcagtccctctgtattcccagagtgggatcggggctttcagccccaccctgatgcctgccctccaggatggctggtttagtctgggtccatgtcccagacccctctattctgctccaggacagcaggacttcaggtcttcctgggggtggatataggagaaaatttctgcctggcacacacctggctccaaccactgccaagtgatcactcttaggcccagggaacacaatgactatcattactgatgcagacctggctgtggagagcagctaatgtgtggcccagagagcctgtctgtgtggagcacgtagtgcacagaatacgtgagagttgctctggcaggggcaggatcctcacaggatcgcctgggaggtgaggtgtgtgtgacccatctggatgggagggcaatgagtgtgcacatacaaatggggcagtgtgcatgcaacacacttaggggaggagtggccccagaattcagcacgcacacaacacacaagggagagaacccccagatgagaaaataggaaggagcaatcatttgtagatgggtgaaaaaagaatgaggttcaagggagcgtgcaccaggtgaggtgagcgtgtgtgctctcagggaagggcccaggctcccatgcctgggaggagctgccagagagaagcaaaaaggcggctgtggatcgccctgggctgggcaccagtgacaggtcaggatctccaaacatggacgtcctcccctccaaatccagaagctcccagaaggtgtccttaactgcaaagctgtgcagggtactcctccagatggaatcaggaagtcgagacaccatcccaggtgtgtgtannnnnnnnnnnnnnnacagggaggatacagaagtattgcagcccagatcccctatcagggggacagctggtgggcaaagcagccaccccacagccttgtggctagagtacagtggggtggaccctccagccccaatagccctagtacccagctggcagggttgcccacccctgctgtccacctgctccatcctctagggttccacaggcccctgaccgcacagggaggctggggccagcctggtctcccaggcctgaggacatgcctcccaccaaatgtcccctgctccagtcccactcctgtcaccccacgctctgcactggggagaaaacgggaggtgctcgtgctggccctgggtgggagcggggagtcctggtgagaccccggtgagatggaccatcctgcccgcgtgggggatcccctttcccacatccgtgctgtgtcattgttgctctgcttcctttcaatgtgtcagtgcctggggggaggggaggagcaccccctcagcccccctgaacctgaccaaaagccatggctgttgctcccccctttgtatgatgcaaatgctgaaatgtacaaaatcaaccatgacaacaaagaaaaagaccttgtacagcaaa

SEQ ID NO: 92786 - DNA, 642 bp, Homo Sapiens
caccagtgaaaattttaacaagtgaatcataactgcaagtgcctaccaccagtgatgaggtcttcactgaagcagctagcagatgacagctccaacatgctgctgggaccaacgttcataggtcaagttccccagaaaacagactgtgtgcaggaggtttcctatgagtggtctcaggaccagcccctgcgaggggtgagggaagcagaagtgggcagggggaataaactatgatccagttgcaacagcagactcagccaatcctgtggggagctctggaactggactctttccagttgaggcaagacggctggaaccctgtgccccttcatcagtgagtaataggatgcaggctgcctccaggtaagggatgtatctttgggtgagactgcttcttaggaccaatggtaattctggagaggggctcagcaagaggctacaatatctacatcttgcagcagctaggggaagtagtgctcccatcctgatggcacatctgggcagcatgtcccttcactttttctctccaatgagagagaagaaaagagattaaaaataaaatagcccctttgttttatatttgaaatgattgctcttgtgattataatttgcaaccttaatataaaatgcactgaattaaca

SEQ ID NO: 92787 - DNA, 381 bp, Homo Sapiens
ttcttttaaattctgaactgctactacacacaagtgaaagtcaaccctatgtaaactggtgtcctctctctagccctctcccttactggcccacttctctctccgtagagagcctgaaaaactgccccaatgccacggtaaaggcgaggaagtcttggctggcgttgctgactcacagtcgccatccatctggacacaaagagagacctgtgggagtcgtagagggtactgttagccccggtccatgcagggggttcagccgagcccaagactcaaagctgctttcctttcaggatttgtagtaacgtaaggtgataatggccaaaagtggttctctctcattaaaccaaccagtaaaagcgtatcctattttttgcaaaa

SEQ ID NO: 92788 - DNA, 362 bp, Homo Sapiens
cttcaacatgctgcgctgcagcggggcagccacaccaccttctcatccaccctcttcgggggctccagttctggcagctcggggttcaagtcggtgatgtcgtccaccgagatgatcaatggccacaaggtcaccaccaagcgcatcgtggagaacgggcaggagcgcgtggaggtggaggaagacgggcagctcaagtcggtgactgtgaacggcaaggagcagctcaaatggatggacagcaagtaggcgctggccacccggccctgccttcccaccaccaccaccgtgcatggggcagcaaacacgtggggccgcagacatagcctgatggttaataaatgtgccaagtgagttaaaaa

SEQ ID NO: 92789 - DNA, 429 bp, Homo Sapiens
gggctggcgccagtcgcctggtccctcgctcgccgcagcctagacggcggacgctccccgtcaaggcctaattcctgcaactcgccggcccccggtaaccgttttccttccccgcctaagaaaaacagttttttcctctagaccacttcggcggcctcttctgacagttttgcttctcctatgccagcgggtctccgcgcctttagggggtgctcgtcatcctttgccccccaaccccccgccacatcctcgtaactgatgtacagtccgtcagttcggcttcagttcttttgacggatgaaaatggcatatttgtgcattctctggatgcgttataatgaggacactcagtacgtccgttgtttcatctttctgaaaaagtaaatcacattaaatcctcaggcttgtaaaacctcatagctaaaaaaa

SEQ ID NO: 92790 - DNA, 554 bp, Homo Sapiens
  misc_feature (332)..(379): n is a, c, g, or t
caatgtctcaatataccccctacactaagtataatagtaaatatctgtatttggtggcataatatgttcttagtataaaccaaaaacacatgctgagcattggacattgtccaatgtttaattcatatgattcattctgagtttctgactgagatcattctttcagactatgtctatttgtcctgggacccataaaatatgcagccctaacatgatttcatttttgtttcctttcctggaaaaggagaaatcattcagatcagctttcatattgccttatagacgatgacttcaaaatagtttgaaagggactcctttgttctagaactgcnnnnnnnnnnnnnnnnnnnnnnnnnnnnnnnnnnnnnnnnnnnnnnnngtggttattccaaatcaggatgtacagtaaatataaaatacacaccagatttcaaaggcttacatgaaaaaagtaatgtgaaatatctcactagtagtttttatagtgattacatgttgaaattttaacattgtgaacatattagtttaaataaaatgtattgtgaaaattaaaa

SEQ ID NO: 92791 - DNA, 980 bp, Homo Sapiens
  misc_feature (942)..(942): n is a, c, g, or t
cggtcactccaggctgcctcgctgcgccgctggcggtgggcgtggcgctgccggcggctaggcgcggacgccggaggaggtgtccccgggtttaggggtgttcggccaggggcggggctgccgggcccgggcgactgccggagctgcggaagtcgtggaagcgtcggcgacgcatcgcgcgatggcgcgggcgggacagtgcttgtgaaactgaacacaacaaaagtatggatatgggaaaccaacatccttctattagtaggcttcaggaaatccaaaaggaagtaaaaagtgtagaacagcaagttatcggcttcagtggtctgtcagatgacaagaattacaagaaactggagaggattctaacaaaacagctttttgaaatagactctgtagatactgaaggaaaaggagatattcagcaagctaggaagcgggcagcacaggagacagaacgtcttctcaaagagttggagcagaatgcaaaccacccacaccggattgaaatacagaacatttttgaggaagcccagtccctcgtgagagagaaaattgtgccattttataatggaggcaactgcgtaactgatgagtttgaagaaggcatccaagatatcattctgaggctgacacatgttaaaactggaggaaaaatctccttgcggaaagcaaggtatcacactttaaccaaaatctgtgcggtgcaagagataatcgaagactgcatgaaaaagcagccttccctgccgctttccgaggatgcacatccttcggttgccaaaatcaacttcgtgatgtgtgaggtgaacaaggcccgaggggtcctgattgcacttctgatgggtgtgaacaacaatgagacctgcaggcacttatcctgtgtgctctcggggctgatcgctgacctggatgctctagatgtgggcgggcggaccgaaatcngaaattatccggaggggagttaatagaaagatatcacc

SEQ ID NO: 92792 - DNA, 458 bp, Homo Sapiens
agaaaatgagaaaataaaatatttcttaattgtaatcataataaaacaattgcagattgctaagtagctgttggtggtacaagtttgatatttagcttgagaatgggtatggaatgaatcaaatacttcatcactaaagaattcttgttatttaatatcaaataatgaaacagcagtcacttctagttcattaccatttcttgtagctgttgtttttagatatagtccactgcattcttataagttctaaattttatgtttattataatgcatttcttgtggaatcttagtgttttaacatttgaaatccacttaaactgcaaattgttctttatatttgattgtgttttttggattttctaaataaaaatattgaatgctttctaacaaaacagaatatttcaaagaaattagcaagcttcattaaagaacatgttttaataaaaatgtgttatagt

SEQ ID NO: 92793 - DNA, 529 bp, Homo Sapiens
  misc_feature (182)..(229): n is a, c, g, or t
tttcctaaagatgccaattcatttcacaaatatttctttaaataatagattctaagcataatttttcctggccaaagggtcccaatagccagaaggagtaactttgttcttaattgcttttgcaaagcacagtcactaaagcccaccaaaaacttcttcagcacaaagctcaaaatattttnnnnnnnnnnnnnnnnnnnnnnnnnnnnnnnnnnnnnnnnnnnnnnnnacagagggaggtggagtttagactccaattaaggcatttttatacatatagtccaacttgagtcctattcaaagagaatcctaaaaagatgttttcaatgggggaatggcaaaaatcacaatagtctattatcagcattgtagaactatcaattgctcacttcaaatgcaatcatgttgaatggtctgtttcttcgttcctcggttctctcattccacaagtgcataggttatgtcttctgtaggtctggggaaaatgggccaggggtggaaggtccatccagcccagacagagtgaatg

SEQ ID NO: 92794 - DNA, 164 bp, Homo Sapiens
atgtgtggccatgctccttttaataatgaggtataatctgatgctaacaatgcctgttccttcctgggttatggggctgatgaacggtgtaggcagaaaacaattcaactttctgataagaatcacacacacacaaaaattattgcactgaaaaacaaacactt

SEQ ID NO: 92795 - DNA, 520 bp, Homo Sapiens
ttttttttggtaatttctaagcagagagttatattgttacataattgtaattacttgacataaaattgtatcctgtttctgcatgtaacttaagtacattgcatattaacactagcttttcaaaaatgaacattttaataaatgcataaaattctagcaagttctatagtgttcttaactatcctgctattattcctttctgtaaatgctgctgctgaaaactcaaaacaacacacagggagacagcacagagtggtgattaaacatgcagacattagtaccaaatttcagacgtcaaaccccaccatctccacttagcagtgaaacagtgtgaaaatctcttaacttttctgcgttgtcagtttattctagtataaaatggggagtgagaaagaggatgatacagtgtatctatatcattaagtgtcttgtaaatattatctaaagggttatgaacaatactagcacaaagtaaccactcagtaagtattaactattatcataaagccttttactgatt

SEQ ID NO: 92796 - DNA, 357 bp, Homo Sapiens
  misc_feature (46)..(46): n is a, c, g, or t
gctgattcttgaagtttccgtggagttagatttcacatatttttangatgtgagttgcttctctggtagcggaactccttcttctgacagctgtttggtctcaggacgcttcacacttttcactgactgaggagctcagaaagcttttggatatgtctattatgcatatatccatatgtgccattagaaacgagattttcaatttaaaaattaagcaaaagtgtaaacctttatcaatttatttttttaaagtagtgaacccatttcatgttaacatgaataacacgtcttgtgaaaaacgactctaacttttcaaaacaaagtaattactgagtgctctgggacaaataggtgacc

SEQ ID NO: 92797 - DNA, 567 bp, Homo Sapiens
  misc_feature (363)..(372): n is a, c, g, or t
ggccgcttctatgggcagctggtgggcaaccagccccagaatgggcggatgctggtctctaaggacgccaccctcctactgcccagctatgagaagtacggcaccattgtcatccagtacgtcttcccgcccggtgtccagggggtaagaagaccatggcctgcccttaccctttggctttccccaagctctgacctaggaaaaccgggtgagggtgagtgtgcttgttagatgtgagacagtcttgctgtcttccactgtgccctcctactcagtgccctggacctaggaggtccccgtgaggcccagcctttccatccctgtgatcccaaggcacacgtgaaaatcagatatgagctaggnnnnnnnnnngcaaatcagatatgagaggaaggaattgcatattatttccttgatgaacacaaatactgtgctgacatcttggcagaggtaaattctgtggaggtggtggcttaggggaagggaggcacaataggaagggatctgaccaacccaacagagccaggagcatcactctgtaaaaacaggagtagtcaaggcctaata

SEQ ID NO: 92798 - DNA, 839 bp, Homo Sapiens
  misc_feature (746)..(746): n is a, c, g, or t
  misc_feature (790)..(790): n is a, c, g, or t
tcactctgtgggggagatccagaatgccagactggagagtgccggcattcattctgcgagggctgcatcacccgggctctgcaggtgacaaaggcctgccccatgtgcggccgcttctatgggcagctggtgggcaaccagccccagaatgggcggatgctggtctctaaggacgccaccctcctactgcccagctatgagaagtacggcaccattgtcatccagtacgtcttcccgcccggtgtccagggggctgaacacccaaacccaggagttcggtatcctggcaccacacgggtggcctacctcccggactgccctgagggcaacaaggtgctgaccctgttccgcaaggcgtttgaccagcgtctcaccttcactatcggcacgtccataaccacagggagaccgaatgtcatcacctggaacgacatccaccacaagaccagctgcacagggggaccccagctgtttgggtacccagaccccacctacctgacccgggtgcaagaggagctgagagcgaagggtatcacagatgactgaaggacatcgcctttgccaaggcccctgctgtctgcctctactaggacccagcagaagcctctttctcctctctgccccctgccccccacaccacacctgtaggggacctgtctgactgggaagggagttccgagagggaggggcaatcccttcccccatcccccactggccaagtgtttcaatgcagtgtgagccactcnccttctggcagaggccgacctccaaggctctgttctcccctccncgtgtacatatactcccgatttcctgcccctccattgcctgctttttct

SEQ ID NO: 92799 - DNA, 473 bp, Homo Sapiens
ttcagcactgcagaagagtgggccccagggcatgattaggagaccccagtcctttcagaatgggtcaacaatagcaagggagtgaagctcgaaggacaagttcaggcttgggggaactcatggttcagaatggctcccttccctgggttgctgcctctaggctgttctggaactgcagtgattcattgtgcttttgagttttggggctttcatctcactattgctggatagtctgtcagagttagaagtggaatgagtcgaggcaggccaggggcctctcccttgctgctgggaagggccagcacattcctcgttcctatgatgaagatgcacgtgtatacaataaccaccacatttcttggtactccacttaaaacatgtaaataacccgaaactgttactccaagtataatgtgaatacagcttggcaaggaatttaatatttgcaaaactataaaatgttttgtaatata

SEQ ID NO: 92800 - DNA, 567 bp, Homo Sapiens
tcagcataactgccccagtttttttggtgctgaagtactgtaagtagaattcatcaacggtctcctaatttttgcatctacatctggggggaaaaagctgtgatactatagttaataaattcccactagagtgacactgaagatttaaacacaagcattcataagatgcgctgatctctggtggttgtcactagttcttctaggtgataatgatttacccatagatggagctgttggatattattttattgtacaaattcatgtttaaaaaactttgtgactgtttctagttaagtaattttttaacctttcttgggtcatagacttctttggtaaactatgaactctcaccaaaaagatacacatgcaacatgttaaatacatgttagactttgcatacaattttaggggctcatgggcctctaagcctatccatgtattccaggttaagccctctgttatgatcaatccattacttacagattaagtttttataaaataaagtatcttttaaatattcatggatcaagtaacaagagcaaacttgaataaagttatgttctacat

SEQ ID NO: 92801 - DNA, 495 bp, Homo Sapiens
gcatactgatcacgggtttgggaatcatctctgtaatcagtcatttgaccaaaaggaggagaagtcaaaggaatagaagggtaggcaacactttgaagcccttctcgcgtgtcctgactccaaaggaaatggctcctactgaacagatgtgactgaagatttttttaatttagttcataaagtgatgctacaacagaataatcaccatgacaactggcccacacctcagagactgattctgatctcccaggaattctgaaggaccctctatccttgacaacaatcatttgcagccaggtagcaacggcggtagtcagaggagctatgatagaccacacccaagcaaggctgccctcaaataacatctcaagatcttagttcttatgcattccatcagtcagaagtgaagaagaggtggagaatctggattggggaccaggaaatcacttgtattttgttagccaataaattcctagccagtgttgaatgaaaaaa

SEQ ID NO: 92802 - DNA, 688 bp, Homo Sapiens
ggaggacggccctattgggacatgagtgagcaggaggaactaaatgcaataaagcaggagttcggctggcccaggcttccaggttgtcctcttggattacatctacttatgttggacactgggcagaaggaccgggcccgccggcctcattttgacaagctggtggctgcatttgacaaaatgatccgcaagcaagataccctgcaggctgggcggggacccaggggaaaggccttcccaggcccttctgacccctgtggccctggactttccttgtctggactcaccccaggcctggctttcagccattggactggagtgctaccaggacaacttctccaagtttggcctctgtaccttcagtgatgtggctcagctcagcctagaagacctgcctgccctgggcatcaccctggctggccaccagaagaagctgctgcaccacatccagctccttcagcaacacctgaggcagcagggctcagtggaggtctgagaatgacgatacccgtgactcagccctggacactggtccgagaagggacatgtgggacgtgagccgggctccaacagcctctgtgagagatgccccacaccaaacccaaccctcccgatggctgcattccctggtcctccgcctctccaccagccccctcctcattaaagggaaagaagggaatttgcaaaa

SEQ ID NO: 92803 - DNA, 523 bp, Homo Sapiens
tgcggccgccaacttaaaacaactcaacagagccatgaaacaaatgccctgatgaaaataagacaactgcatgttacatcatcggcactttatacattactgttaccatgaaaaagaaatgaacagcagcacgtctgataccatcagctgggcagatgcattaaggttaaatctaagtgtcaagaaaaccctatttctttataatatttatgcagctgttaagcgtaacatggtggcagcttcacaacaagaaccgtgatcatgcatgcagtcatgtctccagtattctgtgaaaagccaggatacgttaggatgtgagtttagaaactgagtccattcggtgcatggaaatccaccgcggagtcacacaatgctcctcactgtagtccaggcgattggtgggccgccagcaccctgcgggcttcacagggacgcgtgcttgttctccaagccccgcaacccttactgtgcacacaacatcgcacacacctttgtttttgaaattaaaatgtttatagttaaa

SEQ ID NO: 92804 - DNA, 566 bp, Homo Sapiens
  misc_feature (37)..(37): n is a, c, g, or t
agcaaaagagactgtagccttgacccagatgacactntggactttgtaactttgagttaatgctgaagtgagttaagactttgggagactgctggcaaggcatgattgtattttgcaatgtgagaaggatatgagattcgtggggtcagggacagaataatatggtttttctctatgtccctaccaaaactcatgtggaattatattctgtgatgtcagaggcggggcctaggtggaaaaagatttagtcataaaatggtgcaggtagatccttcacgaatgataaaggaccatcaccttgataaaggaccatcacctcctgatagtgagtgagttctcatgagatctgattccttaacaggctgtggaacctctttcctcactctgtcttcctcctgctcctgctttaggaggcatctcattttcccttggctttctgatataatgaggaggcttcctgattcctcccagaaacagaagacactatgctttcttcacagcttgcagaaccatgagtcaattacacctcttttatttacaataatacagaaaattagaactgcaga

SEQ ID NO: 92805 - DNA, 524 bp, Homo Sapiens
gcggccgcgaagggcagggcctggggggttgccacagcgttgagggcagggcttggcccggatgcacctctgcggtaagcagggactggcggggtggctcggagaaagagcagatgcagtagcaggacacagtgcccggaaggcagaacaatgaggctgcccctgcctccggtgatggctgtgggaccgggaatgaagatcctgttgcttctgtcccaccttctcctgtgacgcgtctccctgcggcagcgccgcgctgaggtgccacactgctggctccaacaccgcagccgccaccgccgccgccattttcgtggcggatgagggcccgtggctgcccttcatggctgctgtgccggcgaagaggcattctgacctccagggctgccgcaggcctcaccatgtccttggatgtgtgatgccctacggggacagccaggccgctgtggggccacccccgaaggccactggccactccgacgagcacccggcccagaccaagagccctgcaaacaaccgtcata

SEQ ID NO: 92806 - DNA, 420 bp, Homo Sapiens
aagtcttccccacagggcacaattattatgaggttcgcctcctccccccggttaaacattaagcactaagatttccccaagcagcttgacagaacatcgttttccttgagcatcttccctgtgactaccttgcacaacggcatgtggcagaagtgatgtccagggtctcccgaggatgggtcggaggcatccttacagctcccatctgggtctaccggaatcgtcttggaggtttgcgccgccatggaagaaggctgactacgcaggctgccgtgtcgtgaggaaacccgaggctttgtggagagaaatgcatggaaacggtttcagtccccagcggagaccctaggcatcagggagcagaacatcaaaactgcggacttgggatacaaatgaatgatcactgttgttgcaaagccaaaa

SEQ ID NO: 92807 - DNA, 628 bp, Homo Sapiens
gcggccgctgcatctgcccggcgctttaggcccggccatcagcgacggggaggagggcggcggcgagccaggcgctggcggaggagctgccggagccgcgggcgcggggcgccgggacttcgtggaagcccccccgcccaaggtgaacccgtggactaagaacgcattgccgccggtcctgaccaccgtgaacggacagtcccccccagaacactctgctccagccaaggtggtgagggcagctgttcctaaacagcgcaaaggcagcaaggttggtgactttggagatgcaatcaattggcccacacctggagagatagcccacaagagtgttcagccacagtcccacaagcctcagcctacccgtaaactgccacccaagaaggacatgaaggaacaggagaaaggagaagggagtgatagtaaggagagtccaaaaaccaaatcagatgaatcaggggaggaaaagaatggagatgaggattgccagcgaggcgggcagaagaagaaaggaaacaaacacaagtgggttccattacaaatagacatgaagcctgaagtgcccagagagaaactggcttcacgcgccactcgcccaccggagcctagacacatacgtgccaatcgg

SEQ ID NO: 92808 - DNA, 457 bp, Homo Sapiens
ttgaacttccagtctccagagctgttgggttatctcagaagcagaacctgagacaagaaagtgaatggaagcagtttatttgggagaaagtcccaggaagcactggtagcttacactcttggatcactgactctgagggaagccaactaccctattgtgaagctacacaccagctctgaagtgagatccacaagatgattctgtgagccgtcacaaggaatgaaagcctccagacaacagctgcatgagacagttagaaagaggaccctctagcacctgtcaagtctctagatggcaaaacctgagccagaaccacccagctaagcttctcccaggttcttggctcacaaaagctgtgaaaagaaatgtttgttcttttaagccattgagttttggggtaatttgttaagtggcagtagataactattaataataaaattgtattagatttttcaaa

SEQ ID NO: 92809 - DNA, 327 bp, Homo Sapiens
tagaaaataacaatgagagcgatttacatttgctgagcttggcacgggatggtacccagtggccattcgggtgccagcggagcacgcagagcctggtgtctgtggctgcctccctggtccactaacacgagagaggtgggtcttcctgggtgtcccaggcacgagggtgcagcccaacccaaactgacttggccggtgctcaccacactggggcgcccgccacactggggcgcccgccacactggggtgctgagcaagatggcagcctgcgtcacttccctgtagattcccgacatggacaactcgaattaaacctggtcaagtagc

SEQ ID NO: 92810 - DNA, 649 bp, Homo Sapiens
  misc_feature (493)..(507): n is a, c, g, or t
aaaacagtgatttcatgtctcttctcactttcttccagaaggcagctagccagcacatactcactgaccagttgctgcctgcacagcagtgttttcactgctgtgttggagaaacccgaagtcttaaagggccataaggtattatttaaagagatcagtgtcatagtttaactgtcttcacagttccaggctgtaggaggtacagtttctgaggacaggggcaatgtatgtgggtttggtgatcatttataaggcctttttcgatgacccctttgtcctttctgacacattagaattgctctttgctgctgcctgaaaaatgatgtcctcatgctggacagccccagctgaaaactcaggctgctgccttgacctatttcccttctccctgctggcattaaaagggaggatgcccccggggagctcattctgcaggctgcagtggccagggcaaagtcctgggtttcctctctctcccttactccctgctttnnnnnnnnnnnnnnnggtacagaaaaacattataagcaactgttgccattggggaaaaaaaagtatttacgtttcaggggaatgtggcctcagccatgaatattggtgtgtatttatgaaggggtgtatgtctgggaaataaaacttagaatacaag

SEQ ID NO: 92811 - DNA, 423 bp, Homo Sapiens
cacggctccagcgcggctcagcgccgcgcgggagtcaccgcagtgcgccacgtacagtatccgcggttagaccagcaacaccacggccgtgcagccgcccgtttccacgcggggccagagggagcgcaggcgctcgtcggcgctcaagaaggctcggcgcagcgcctcgcgcacgccctcgggctcgctaggctccgggcccagctcctggagcacatggcctggcaaatggcgtgcaccgaagcgggcagctcgagccccaccgatcgccgtcgaggacggcaaacaaggcccagcccgggggcagaccaggtaacgaaagccaagtgcagtgagcatcctccatccgcgcgcgccagccttgcgctgcgctcgccccgaagcgcaggcccccacagacgcctcgcacccccgtgcggccgc

SEQ ID NO: 92812 - DNA, 462 bp, Homo Sapiens
cggcacgaggccaagtcgtgattctagatctgagttctacaatagaacctaaaaactgtttccaacccatcacgacatcaccctgaaaaatgagtgagcagtcactgaggcttcccaagtttgaaaattccacaagactgagagcaaatgttttgttgaaactgaagtcaagatgaagtcagctgactctcaaacctcaggtgaagtgactcagggcccacaccccggttctgaggcagggacacattttacttgcagcaccctgcagctttggatgaggctgcaacccgggtgaatcctggccctgctatcacgtgggcagccactgcatcctccggaggctgtggatgggagtcaccatgctgggaggtctggagtaagatctgtgccatctgccttgcccaatcctgtaccagtgcctgtgtttcaaaatctcaaaataaaagtgattattcttgcaaa

SEQ ID NO: 92813 - DNA, 582 bp, Homo Sapiens
  misc_feature (18)..(18): n is a, c, g, or t
  misc_feature (43)..(43): n is a, c, g, or t
taacacactacctagaanagccattcagtactggctctagtcnccgtgagatgtaaagaaacagtacagccccttccactgcccattttaccagctcacattcccgaccccatcagcttggaagggtgctagaggcccatcaaggaagtgggtctggtgggaaacggggaggggaaagaagggcttctgccattatagggttgtgccttgctagtcaggggccaaaatgtcccctggctctgctccctagggtgattctaacagcccagggtcctgccaaagaagcctttgatttacaggcttaatgccagcaccagtcctctggggcacatggtttgagctctggacttcccacatggccagctttcttgtctatacagatcctctctttctttccctacgtctgcctggggtctactccataagggtttacaaatggcccacaacactgagttagtggacaccggctaaatgaggaagagcagcaggcattgtcatggtgaatgccccgctgtagctccctgagagaaagactgtaactctgcaggacagaaacaaggttttaaagcattgccaaaaaaa

SEQ ID NO: 92814 - DNA, 502 bp, Homo Sapiens
aactcccttaaacaccggctgagagccggcactaggctaggatggtgaggtgtgattgcgggtgagacaggccaccccttcttcgactgggtacagaagttataattggttgaatagtcccaggttgtccatcgggcccttcacaatgcaaaatataaccacttggatatacttcaggggctttaccaactctacctatgttaaattgagtgggttgaattcgccacgtggacagccagtgctgcagagaaatgatcgaaatgtccactcctgtatctaccaaacctttaaatttctttccctgaatggttgtttcacaggtcgcagagcagcctggcaattgggattagcattgtcgaaagctaataactgcagcactatatcctgagcagccaaatctgcgatcatctttcgaagagactcctgaaaccgagctataaaattaatgtatggttctcttggtccctgttttatagcactaaaggaaaggtattgttaaaaa

SEQ ID NO: 92815 - DNA, 964 bp, Homo Sapiens
  misc_feature (867)..(907): n is a, c, g, or t
tgtatacaaccaacgttctgacccctggctgggagcatggttgagcgccccccggagggtcaaaggtccttcaaacaacctggcaggcccgggccaccgttccggtggaccaggagcgggacccgggcagcccccaccccgggaaggccgtttctccaaaacgggagcgcggttggccctccatacaaaaggttgcgctttttgccatggcggggcacaggacaatgcgggttggtcactccaccccagggctccccacagtgaccctgactgctgcggccaccctgggaccccagcatagccatccgcgccgatgactgagaccgcggtgactggctgtgcagtgacgacacagtgcagggaaatgcactcaggacaggccaggcgggcgggggaggtggaggcggtctggcccatggcagccagggcatgtggctgcgcgctgcggtccactcacacacagtgcgggacacagaggcccctggaaaggtgcgtgtcctgctcctctccctgcggccacagcaaacacgacacagagcagcggctcgtctctgctcccgcctctaacgaaggctgtttcctcacagctgcagagcacactgagtgggagagcaaattctggaactgtcgcaggcggaaaccacacaagggggaaacagacaaaacagcaaacccggaagaaccattcccgcttccgaagctccatgatcacggcagacgcttcttaaaacctcccgtttaatatcagatgccacacatacgagatcgatgtgcacgtcgggagaaaccacagcacagccaggagtactggcgcacagtgaatacgcttccgtcctttcaaaagcctttcccgaacggtatcttgtnnnnnnnnnnnnnnnnnnnnnnnnnnnnnnnnnnnnnnnnngagaactggctttcacctcgtgcggaattcgccacccaggcctcgctaccttggacc

SEQ ID NO: 92816 - DNA, 863 bp, Homo Sapiens
ccttcaccagagaagatcttaaatggcaaaggaattctgccaaccaccatagacaagaaacacaaagatggcaccaacagacagcaacaagccttacaggagactttcagagagagaatttgacccaaataaacactgtggagtattggatgccgagacaaagaaaccttgcacaagatccctcacctgcaagacacattcgctaagccatcggagggcagtcccaggccggaaaaagcaatttgacctcctcctggcagaacacaaagcaaagtcccgggaaaaagaagttaaagataaagagcatctcctgacttccacgagggaaatacttccaagccaatccgggccggcacaggattctctgctagggtcttcagggagctctgggccagaaccaaaagttgcatcccctgcaaaatccagaccacccaactctgtacttcctagaccatcatctgcaaatagcataagcagcagcacatcttcaaatcatagcggccacactccagagcccccactcccaccggttggaggtgacctcgccagccgactgtccagtgatgaaggggagatggacggagccgacgaatccgagaagctagactgtcagttctccacgcaccaccccagacctctggcgttttgctcatttgggagtcgcctcatgggacgagggtaatatgtgtttgatagaagatgggatcgttttcgattcgcactaaactccatggtagaaaaacacctgaattcacagatgtggaagtaagtgagcagcttttgtgcaatataagatccaagctgccccacagttacctgaaacttaactttctaaataaacgtcagtggctgacttttcatag

SEQ ID NO: 92817 - DNA, 1065 bp, Homo Sapiens
  misc_feature (216)..(216): n is a, c, g, or t
acttaagctaaatgaaaaggtttatcgcatttgggaatactcttcttccatttttaatttggaaaaagcaacatgttaaaaattattttaaatacaaagggcattataagtgtaaatttaaaaatcaggactttgtatgatcagtgggaaatgtttaaaatattcagcacacactttcctcctcctggaattctgattagaaagcccaagttttgnaacttctcatttggcaaacctcaatttaagactaaagtatcttaaacttcttcctccaccaaaaacacaaacaaagtccagttttcctcgataactagagaacagtccctgctcttaatatactgccctttttctgaaaatagttcaatttcatatttattctaatatttattgctactaatgtaaggaatgcttcttgatatccaatacattcttaaaaagtttagcatgaatcctagtatcaaacaaataatacagggagcaataaaattcatgttttctaaaataaaaagttcataaatatcattttttacaataactatatttggtcattctaagcagcacactttttaacacccctcaattaggatgagtcttagaattgatgtcagctcaccatcaactgcatggcctcaggctcctggagccatgagctactctcctgctccatgaggatccaccctccactcccagttttcccagcccttctcccagcctggttctgcacagtccctctagcctgtgtcctctcagctgaggacaagcctgaacagtccctggactgcaaactgagggcttttaaatcaggcaagcatgatggaggtcggagtgaaaaactgcgtcattatccagttctgatactggttataagctcttggtagggtggacagttaaaggactgcaaaaaaggcatgtgtagaagttggcaaagcttcagtgttccgtacaagtgtcttattcccttgcaccccaccctctgcaatgagaaatccctcccttcaaccatttttggtaactatagaatgtaatatctggaaaagcaaaactaaatataatcaggtgctcaaa

SEQ ID NO: 92818 - DNA, 120 bp, Homo Sapiens
ggtgaaattccatttatccagcattctaaaggaaggaggcaccccagtactgagtcaggcccctgtaactttcacttgaactgttttcctgtttgtaatggaactattgctcaatgaaaa

SEQ ID NO: 92819 - DNA, 417 bp, Homo Sapiens
gcccttcccgtcgtgccccgggctcctcggaagcagcctcccgctccttcagacgtcggactcctgagtttcgaacctgccccgcggtttccccctcacgctgaatccaggggagccgctactcgtttttgaagttcctatgcagccctctcccgacatgttcgagaatcttgccggactggggatggatttgcagcctccgtgtttgcccccacggttcgaaaaccggaatctaggcccggtctcctggcctgtgttctgtcgtgggatttctccagagcacggactgacttaacatttccattactgggaatgtaatggttgctgcgtcaggactctggagatgatttttttatttggaacgatataatttttggaatttccttaaagggaaaaatacatattgcaaaattataa

SEQ ID NO: 92820 - DNA, 370 bp, Homo Sapiens
attctacccgagttcattgttgtttgaaccatcctctaaagatttcctttaacctctaaatgttgtgcttttaggttgataacaaatgtaaagcactgaggagggaggaataaagcatacaagttaatttctaattttcgcaagcctgaaccatcctaatctgatagtaggatgtatggcttcttccttttcaccttgtgtgatgtttaatttgagacgatctagccataaaactagtaatcttgaattcctcttgagctggatggtgattagccattgtgaaaacagattatatggaaattgtgcatattgctaaattttaaaacatggatttatcaactgataataaaatatatcttacaagataaaa

SEQ ID NO: 92821 - DNA, 472 bp, Homo Sapiens
accatttatgatttattctcctatgtgtcatatgaaaggccaaggggctttatcttttactagtaggcaagcctgggcatttctgcatttgtgccagctaacactacaaaatagacttaattagagaaatttagacccagaattgcagcttcaacaacacaaaacaggaaagctagaagaggttgctgtgtcaacctacaagatagtgattcttggaagttggtatggaccagaaagcattcccaggacatttaggctatggctgagttctctaagactcagggtgggaattataatccctggtctaagctgatatgaaagtttctatgtgtgaaaatatggagttatatgctttgagattttctgccagttaaactaaaacaagatcatactgtaaatgtttgtaacttgcttccccccactgtatactgtaaacatctttgcatgtcaataaatatgcctctacaacaaa

SEQ ID NO: 92822 - DNA, 390 bp, Homo Sapiens
atgagataaaaaaatagattggaaatgattgttgcatctcacttcatggaagtaggggcagaagttccctctggatccttttcttgacaagcagtcaagaggaaggtccccatacacatgtacctgtgtgatacttggtagtttctaagaatggtgctacataagcgttgctgttaggctgggatcctattaatgaacgtttgattagttcaggcctcccaatggcaaaggcagacaccgtggagatggacatttactgactccccttctgtgtggcttcggtctccctggctaacaccacacctgtgcgtactgcgctcggcccactttgctgcagaaacgtagcaagcgtttcatgtcagggctacagctgagagcaaaaactgcaaa

SEQ ID NO: 92823 - DNA, 697 bp, Homo Sapiens
ttaccctgggctgaagaggtgggtctcaggttcctacaggagatagctttcttgccctttactcccaatctaacactttatgctatacaggcagccctgcccccattctctaagcctggcttagaaggcactgggaatgtcctgtagagagagacctagataggtcatgcaagtgagaaagacatctgaggaaaatggaagacctaaggcagacaggaaggaagcacaaaagacaagcattgggtcagacccataaaccacctcccaaaggctgtcatttcattgcactggaattttgctttatcagaagcaaggaagtaagggagtcattgccttgggcctgggaatctaagtgggagacaatattaatttggatccgattaattggagattactaactgtggacaaaagtttatctttgcacaatcaataaaaatggcatttttttagtaaattaagagcataaacaatattgctagaggtggcatgtttagtctaccaaaaacaatacttttcaggcactttagaaatatccttttagaagcagcgagtgcataggctaattatcatcaatctttatgtatttgttaaagaaacatctacaggatctttattggtgaccttttgtaagacattagtttgaggtactacctatgtacttgaaaataataaagtggcatttctttatgaaaaaaaa

SEQ ID NO: 92824 - DNA, 769 bp, Homo Sapiens
tcttctaccttacagacacagctggtaccggtccggaattcccgggatcgttggaggggtggccgcatggagtgagtactgtctctggccaccgagcagagccagtgacagcagcgtcctggtaggcaggcaggcgtatcaggtttcagaggatgcggctgggaacgggagtagaggtgaggggtcgttgcatctgtcgcggtgtgtatcttttgggggttcagcgccaccagcgacttgggcctcattcatcgcgcttacatttctccacctcatttgaagaacgagcttcgtagcccacggagctgaggtatatgagctccctgaaagcacaaagcagttatttccatcttcagatcattcagagattatgaaggcacaaaccctgccttcaatttgcttatagtcaagtggagcagacacaagtcaatgattgcagtatagccactgaagtaatctaaaagagacttatcagcaggttgcaggtgaacatggccttgaggtaaatctgtcccttgctgaatacagtttcagtagattgtttatagtagtttcaggaattgagattttttacaaaaatacaaaagttttgcttggttctgttctagatgttttcttctaaataaatgagaaagatgtttcaacaaaggctctttatgctgaataattgtgatgcttgaagttgctaatctgctttaagtggattttaaatgtcaggcaattctagacagttttttcttggtcaaataaaaatttaattaaaacttaa

SEQ ID NO: 92825 - DNA, 526 bp, Homo Sapiens
aattaaggcaaggttatgaaactgactggatgcaagggtgacccaggcacgatagctaagaaggcaaagtcgcttgttctattagctgtttaggcatctttgcagccatccttgatttggagtttttgatcttgatctaattctatccctcaaaaccagcccttacaatctcacgtgcccacctcttccatgacagtccttgggcctagagggagggtgattgtatagttttagcagcagggcatttgcagtgaaaaacagattgggcccagtgggatgccaaatgagagagggtcgcatctctggccttcagaatgccatgatttttgtttccttggaagtaaaacaaggttcaatcaataacattaatattttgacaatcataagcatatttgtgtgtcagaacggaaatagaaacctattccattagggcaccaacaaaagatatgaagaaaaattataatctggtactctctagagagttattgtagccaagaaataatttatgattcaatctgcactcaaa

SEQ ID NO: 92826 - DNA, 630 bp, Homo Sapiens
  misc_feature (61)..(104): n is a, c, g, or t
  misc_feature (349)..(358): n is a, c, g, or t
ctcctgttgatgcccctcatgctcagtctctttgtatgggagctatttctttggtctctgnnnnnnnnnnnnnnnnnnnnnnnnnnnnnnnnnnnnnnnnnnnnggacattcgtcgggaaactcctaacatatgcccccattctggagagaacacagagtacgacacaatccctcacactaatagaacaatcctaaaggaagatccagcaaatacggtttactccactgtggaaataccgaaaaagatggaaaatccccactcactgctcacgatgccagacacaccaaggctatttgcctatgagaatgttatctagacagcagtgcactcccctaagtctctgctcnnnnnnnnnncaattctcggcccaaagaaaacaatcagaagaattcactgatttgactagaaacatcaaggaagaatgaagaacgttgacttttttccaggataaattatctctgatgcttctttagatttaagagttcataattccatccactgctgagaaatctcctcaaacccagaaggtttaatcacttcatcccaaaaatgggattgtgaatgtcagcaaaccataaaaaaagtgcttagaagtattcctataaaaatgtaaatgcaaggtcacaaa

SEQ ID NO: 92827 - DNA, 963 bp, Homo Sapiens
aaggtagcgaggcctgggtggcgctttctggagcagattgtgctgaccagagacaagaccgtggtctctgctgaccttctcatagacgaccggccggacatcacaggggccgagccaacccccagctgggagcatgtcctcttcaccgcctgccacaaccagcacctgcagctgcagcccccccgccgcaggctgcactcgtgggcggacgactggaaggccattctggacagcaagcggccctgctgagctggactgtgcttcgggctcctctgtggggctctgacctcagggctcccagctcggggcctgtggggccagtatgctggtctgggagtccctcctagactcctgggccccatgacctcctgctgcatgtcccttcccttccccagccctgccaggccttaacctgatcacggggcagggctgggccctctgggcgcttggacatagacacgtggtcccaggccgttcagcctgacctcaggcagcaggcaccaagctgccagaagcccaggggctcaggacagggaggagttgaggccactgttcagggggctggtggccgtctccactccctaggcaagttctctgaggcagaagggggttccctgttcccagagtctgcagccatcagcaaggaggaccaggaacccggcgactgaggtgcttccaggtggggacaagcccctcttggtctcagccacagcaccccttattccagctgccctgcccaacctgctcaccccacatgaccttctgtgtattcagcaaacactcactaggtgacagcggccaccaggctctgtgctgggggacgatactggccctggcctcgaccagcttagaggtttctcacacctctgttcccagggccccgctcagggcccagcagagagtccgtaggcttgaacatgtgttgagtgcatgaaaaataaatgctgttcatgtgtgtggctc

SEQ ID NO: 92828 - DNA, 632 bp, Homo Sapiens
tttttttgccacaactgtgtgattttaatattctctaatatcaagggcggatttagaattgcaggaaatacctggagaaatcacagtggaatgaatttttgctttaagagaaatgagagttggctgtctctgtaattgataatacagcttcatcctagtcccatctgcatttcagaaaataaccctcatctttacaaaacacaggacacttgtgggacagttaactcaagcagctatggggagggaggagattattgaatggtgattaaataatgcaaatggctcttctgtttcttaaagactgtggaagaggtcagactgcccagttgaggtgggcagttcatactgctcagttgaggtggcagtcatttattctgagtcctgttggatagagcctatctcctcaaggctacagaggcttccaggatatggagctgtgcatgttaatggctcagccttgcctccatcagggcacctgcctaacttggagcaagtgggagagcaccctagagtcatcctctgtgctgtttcgtgagttttgcagcggagacttcaccatccggaggagctgtgtttctgtgtcacttgggatatcacctaaaaatgaaacatttgatattttaaggtataaa

SEQ ID NO: 92829 - DNA, 463 bp, Homo Sapiens
tgctgtaactatagataaaagcaagttatatagaaacattaaccaagttcacaaaagaaatgagactgtaatgcaagattaaccgagctcaaaagaaaagtgcctatttaaagcactttattgtgttatctacaagatcagtgtgaaactcatcaatcaactactgcgttcaacaaatattgtacagtagaaaggagcacaagcactacagtggcatattcatacagctgcaagatttttatgacgctgctgacaacacaaaaaataaaaagctcaacacaagaacatttctccaccttcagagaccaatgattctattcctagggaacaagtggggggacagacccgggcggggcaagagcagcgaggccaatcagagcgcgagttacaagcgcggtggagcggggaagcgaatgaaaccgcccagttgaatggctggctgcgcacgccacacccccgcaga

SEQ ID NO: 92830 - DNA, 191 bp, Homo Sapiens
aatgaatggagaaaacatgagaaaaccagatggacctgttagtactacatttttaaggcattttatatttgatggtgccgtacttttaataataataaaactgaagttttttagtggcaatactgatttattttttaaaccagaaagataatccatattgattacttactacaaaaaagggaaaatatgcc

SEQ ID NO: 92831 - DNA, 291 bp, Homo Sapiens
gaaggatataactcaccatcctccctgtgtattcactatagatcttgggggttagcagcggggccatttactgttgtgcaggcctgtgggattccagccggagaagagtcaggcttcccacaccagcaagttatacaaataattaacattcagcaagtgcccactctgcactaggcacatctccaagcactttacactgattttctcatttatcacaacagtccatcaagatatcttattattattcccattttactggtgtgggagcagagacacaaaaacacgaagtca

SEQ ID NO: 92832 - DNA, 731 bp, Homo Sapiens
tgcgtgtgttcacaaacgtgtgcagctacaccccaggatgtgtgagcaagggaagtcctgccagttccccagcctggcatccggaatgggctccggctggccctgctgctatctgggtctccttcctctcacttcccggtgctggcatcggcctcctcctttcttcacctgagcctctttcccaaagaacattagatcctaaaagaacctaaggtaaaggaatatacttctgtcattgaatggagtcagctctacttacaacccacagcccagactcttggtaacactgttcttcgaattgcatttctggaaaaccaagggtcaacccagagcctcttttctatttttgattcctttcttgctgtagtaggcaacgtctatgcagcgtttcttggtacagagaaaagaacagatccgggtttccaatttagactcctccaagctgtgtgtcttcagtctaatcacccctccactctggtcttcccttccctcacctctagtaataaaggaaatggagtaatcagagcttctcgaagttctccatctaaacaaccctcagcagagggggccagctgattggcaaattgggggcagaacactaaagaaatagcccaaagtaacctatctgtagtgtaaaactctgaagtctcctgttttggctttgaaattcatgcttctgcattctattacataacatttgtcttaatataaaaacatcgtaatgatcgaaa

SEQ ID NO: 92833 - DNA, 942 bp, Homo Sapiens
  misc_feature (772)..(772): n is a, c, g, or t
cggagcggagcttccagggtctctgggtcgccagcgcgcgggcgcgcggctggagccggcgccgggcacggcatcgggggcctggactgcacggcccggcagcaggccggccatggagccaggcagcgtggagaacctgtccatcgtgtaccggagccgcgacttcctggtggtcaacaagcactgggacgttcgcattgacagcaaggcgtggcgggagactctgaccctgcagaagcagctgcggtaccgctttcccgagctggccgaccctgacacctgctacgggttcaggttctgccaccagctggatttctccaccagcggggcgctgtgcgtggccctaaacaaggcagccgccggcagcgcgtacaggtgcttcaaggagcggcgcgtgaccaaggcttacctggcattgctgcgggggcacatccaggagagccgggtaaccatcagccatgccattggcaggaacagcacggagggccgggcccacaccatgtgcatcgagggctcgcagggttgtgagaacccaaagccaagcctcacagatctcgtggttctggaacacgggctgtacgcaggcgatcctgtctccaaagtgctgctgaagccgctcacgggccggacacaccagctgcgcgtgcactgcagtgccctgggccaccccgtggtgggcgacctgacctacggagaagtctcgggccgggaggaccggccgttcagaatgatgctgcacgctttctacctgcgcatccccacggacaccaantgtgtggaaggtctgcacgccctgacccttcctgcccctccctggatgcctgctggagccccaacacactggctgcagtccctggaacaggctcgtgcaaggccttagggcccacccccgaccctgaccccgaagaataggggcccccaggcccaggcagccccttccca

SEQ ID NO: 92834 - DNA, 1891 bp, Homo Sapiens
ccatgtacatataacagtgtgtaaaaagcaggctggtacggtccggaatcccgggatatcgtcgacccacgcgtccgctctgggtcgccagcgcgcgggcgcgcggctggagccggcgccgggcacggcatcgggggcctggactgcacggcccggcagcaggttctgccaccagctggatttctccaccagcggggcgctgtgcgtggccctaaacaaggcagccgccggcagcgcgtacaggtgcttcaaggagcggcgcgtgaccaaggcttacctggcattgctgcgggggcacatccaggagagccgggtaaccatcagccatgccattggcaggaacagcacggagggccgggcccacaccatgtgcatcgagggctcgcagggttgtgagaacccaaagccaagcctcacagatctcgtggttctggaacacgggctgtacgcaggcgatcctgtctccaaagtgctgctgaagccgctcacgggccggacacaccagctgcgcgtgcactgcagtgccctgggccaccccgtggtgggcgacctgacctacggagaagtctcgggccgggaggaccggccgttcagaatgatgctgcacgctttctacctgcgcatccccacggacaccgagtgtgtggaggtctgcacgcctgaccccttcctgccctccctggatgcctgctggagcccccacacactgctgcagtcgctggaccagctcgtgcaggccttacgggccacccccgaccctgaccccgaggataggggccccaggccaggcagcacctccgacactcctgcctgggcccggccggcctcctccacccccaaccaagccccctgagactgaggcacagcggggcccctgcctgcagtggctgtcggagtggacgctggaaccggacagctgagagccgtggggctggggcagggggtgtcagctgcacagcgggactctagggagatgggcgagcgagcgtctgctcactggctctggggcctcgaggtgccaggcagcatcaggcccactgggttgccccggccaggcctgcgaggaagggctgaggtggggccggcagggggcgccaggcagccgtgatcacaggtgacgaccgcaccgcggccgtgggactgatgcgggatcccgagggccttcctgcccacatgccccgggagaaaccgaggcccctccctcctcctggaacagcttccggctctcaagcgtcaccccaggggcgtcagttttacggactcaaggtcacctcaggaagaggcagggccaggttttgggataggctttgcctccaggatgggctgctcctgggcctggtgagctactgcccccaacctaccctctagaggggctgggaagggccgttctgggctcacctggcctgggagacccatctggtccctgcgtcctctgcccctcactgctctgtgcagatcctgtcgccctcagctgcctcctcccgagacctaatggtccctgctgggctcgagtctgcaggcccggctgcgtgtgccttggcctcactgtaccagtggttccctctctgcccggattctgagctcagtgtggtgtttggtgcacaggggttggtcaggggccatggccaaggccctgccacgcacgcccatccctcagatccactgtgagcaccaacctgctgcagtctcttgggcccctgctggcagctctgccacgtcaccgcctgcctggctcccacacagccatgcattgtcactctgcctccgggaccccagcttgggagctgtgggtctgccaggtcccacctcctctgtcccccatgccacaacctgggctcctggctacagcagggctccagggactccaaataaatgttcagtgactggcaaa

SEQ ID NO: 92835 - DNA, 450 bp, Homo Sapiens
acaatagtccttacactgactattgaaatagtgggcaaccataggtacagacctcaatctgtggaacatatcaagcaattcagatttttcttgaaatgtcataacttttctctgcttcctggagtgctcccagcattaacagtggcacttcatatgggtcctatgctgaaattcaaggtcgatggcattgcacgagacaatgaaaactccatgagaacttgagttgcgtctccaggagaaggagcatttgtggcccccagatgtcctccagcatcccatatctgacggccgcgcgcaggccctcggctcggggtgacaagacgctggcgcgggcaagcggggcttcgcgggccacagccagatctcggcctcgaggacccgggtcgccacgccagcccctttcctcagaacgccgaggcctcaggagcgtgtgcgcgccgggacgcccca

SEQ ID NO: 92836 - DNA, 650 bp, Homo Sapiens
attctctcaccagctccaggactgaactccatgatagtaatagtgcaaaatccactgtattgcctgaacataacatgcagcttgatcagccagaaagtcactgaaaatagaatattttcattataacatattttctgaagacaggcccgtgtctttagagcacggtatctgctgatacaacattttacctcagatgatttatttaatcaatgaattagctatttatggctaaaaattataatcctaaaaactccaaaatatttttaaaaattacatcctgtcacatgacagttttcctaaaccaactatcaaaatagataagtctgttattcatatttactcagttaatgtaccactcccttggtccaaaggttgaagatttacccaatgaagctttccatagtgacactaccactctcttaaatagtgggggtgagacgggagaaagggatgggaatcttctttacatgggatgatatctgagagaagcaaagcagcaaatcaggaagatcttaaaatttggtcacagaagctagaatgctttcagaagtgctgtatgtgaacaatattccttctaatcctttctttgtcaaaaaccaaatgccatcttctaagtttgggtaaaataagtcttcaaatcatcaaaaaaa

SEQ ID NO: 92837 - DNA, 355 bp, Homo Sapiens
accattgccacttccaaacccgccccgcagtctactgtgggaaggaggtggggtaggagggttctgagtgcctcccacacccagggcatgagctcagcagcctcagggttctggtgcttcctaggcctgactttacaatctctgcaggatctctcagtgagcatagctaccccaagcccctgagaatcgtgaatcccagagacagatgcctggagctgcttccagccctggggcaggcctcaaggggctacccactaggacccgtggccctccagggatgggaatgattgttttaatcacttttattttctaaatattaaagacattcttccttagtgaaggataataaaaaaaa

SEQ ID NO: 92838 - DNA, 426 bp, Homo Sapiens
aaggcaggagacctgtgggacgtgggggcagctggggccggaacttgcgctggaggaacaccccttgcctgctggggcgagaagaggaccctttccttgggtgaaattccccatattgttaaaaggacaattaaagaaatgaaagagaggtcacctgggtgaataggcaacttagatgggcctccctgtgttcctgtcatgcctccaattctgcgtccaggtgtccggaacacatttttttctgcctttgaaaccttccagtacctctggcagagatataccataccctccttgttacctgcgtgcggaatcttaactcatcgttgtgctacatctgcaccttctgcctttgtgccttgttttgtgttttccctcctccggggagaatataataaacttagctgagtccgttctacatacaaaaaa

SEQ ID NO: 92839 - DNA, 513 bp, Homo Sapiens
cagagagaaatctcccctaacctgaattgcagccccctccagtttgctttcctttggccttccagaccccaggaagttggccttcccttcctagtgctatggtttctgccattggccatgatttcagggagctggctgaggccggctgaggccacacctgtgccagtggggcttccctggtgctgcagcacttgtaaaccacacacacagcctctctccctggacatacgttagcacattggcattcagtattggtggcctggcatggtaggtactacccaatgaagagtgtactatatattttcattactataggccatacttatacagacgtgtatatatatttatataagatctacctatcttaggatggaaccttggggaaaaataaaattgaggggaagtaaaaagtatgtaacacttccagttgtgagccaagattgtaaccagagagcagccaggagcttcctgtcagtaaccatgttttcaataaatactctttcatgtacaaaa

SEQ ID NO: 92840 - DNA, 515 bp, Homo Sapiens
agcaactggaaaggcactgccacctgccgttggatgccaggactcaagagctggccccagtcactgtgcgcaaaacttgtctaaaaatgtgtaagtggactgggtccttcggcactgcctgcattggctcagggcagtcaaccgtcgcagaggatgaggggcacactcaggcagcctccccggccctggaggcagaaaggcccaggcagaaccactgactgggaggaaacagaaaaagcagaggagagccaggctgcaggcgtgtggatgggaccagctcaggcagacgctgtctcatacccactctcccctctcttgccagggcctggcctggtgtctctcaggagcctgggcatgagacaaaagcagagattgttctcttgtggtaccacaggctgtaaccagtccacccagtgttgttttagaaatttaaatcggttgcccatctttttaaattggcaacatcgtttaccacattaaaatctagatgccctgcttctcttgaaaatgtcaaa

SEQ ID NO: 92841 - DNA, 121 bp, Homo Sapiens
acaggaaaacaagtgagcacacacggtttggccctggtatcctagctatattcacgaacatgatcaatgccagttgcatggaaaccaaagatagccttatgcttgccgatatattaaaagt

SEQ ID NO: 92842 - DNA, 482 bp, Homo Sapiens
  misc_feature (454)..(454): n is a, c, g, or t
atttaatccttttttaactgggtgaggttgcctcttgggacccccagttgatagatgagaagcacctgactttgaaaaggaaccgaactcaagcaggctgcatcctaagcccgaagttacaggggttaaccttgagacagatcaaacctggagacccagctgcaaaatttcaaatatcaccttaaagccgttcgtccacaacctggtcattgttgtggttatgccagtccacgctccaggaggactgtgacccgagatagccactgaaaaaagagacacagatgtcacacccccatcactcgcttaccattacaatgtgaaatgcctcccatatcaagctttccttcttaaacccctgccctcagccaaccttcaaagcagtttctctaggtgtaaacctggccacttccccctgtggctatggaaataaagtggctttccattcactgcactngctgagtttgcacacggtaagcagccca

SEQ ID NO: 92843 - DNA, 1038 bp, Homo Sapiens
  misc_feature (935)..(935): n is a, c, g, or t
  misc_feature (986)..(986): n is a, c, g, or t
atcaatgagactcctttctcaagttgaactgcattgcgagtaatatcagcataaaaaatgaagaaccacagaatggctgcaaaacagctcgaatatcagcaattagaagacgataaactttctcagaaatcatctagcagtaaactctctcggtctccattaaagattgtcaaaaagcctaaaagcatgcagtgcaaagtgatacttctcgatggatcagaatatacctgtgatgtagagaaacgctccagaggacaagtgctgtttgataaagtgtgtgaacacttgaacttgctagagaaagactactttgggcttacgtatcgagatgctgaaaaccagaagaattggttggaccctgctaaggaaataaaaaaacagttcgaagtggtgcttggcacttttcatttaatgtgaaattttatccaccagaccctgcccaactatctgaagatatcaccaggtactacctctgcttgcagttgcgagatgacatcgtgtccggaaggctgccctgctcctttgttaccctggccttgctgggctcctacactgtccagtcagagctcggagactatgacccagatgaatgtgggagcgattacattagtgagttccgctttgcaccaaaccacactaaagaactggaagacaaagtgatcgagctgcacaagagccacagaggaatgacgccagcagaagcagagatgcatttcttggaaaatgccaaaaaattatcaatgtatggggtagatttacatcatgctaaggactcagaaggggtagaaattatgttaggagtttgtgcaagtggtctgttgatatatcgcgaccggctgcgaataaacagatttgcctgggcccaagggttctaaagatttcatacaaacgggaacaacttttacattaagatccggccggggagaagttgaacnaatttgaagcacccattgggtttaaagctgccaaaccatcgaggctgccanaggcggttattggaaaagtatggtgttggagccattcatacaatttttttca

SEQ ID NO: 92844 - DNA, 729 bp, Homo Sapiens
cctggacttctttttgtggagactggattccaagattgaaagtagaagctacatgttttctccaagcagggctttcagacttcacttctgcaacattttattgatgaaagcaagtcacaagaccagactgattcaaggggtggagaaatagaccctacttcttgatggagggaggagtagagttacattgcaaagggatctggacaaaaaaaggagtgatttattaggaatcatgtttaacaatttaccacaatccccagcgcaactgcctgttagctggatccagaaatgtctacgactactgcaatgccacttggccttaggggtgatgtgacccagtgtaaagagatggtggtcttaaccaatcacagttaagatagtttagttttggaaggtataaaaaatatgtaacaacatgaatgcacttttagggtcagacaagagacttggaaagagcctgcaaaatggaggagccctgaggcctaagtctcatgagtgtcaatgcttacctgtatctagacactggcatcccccttttgataaggccaagattgattgttttccttttctacctaccctatatctaatccatgtacaaacactgttgacacacaaaagaaccctaaattcaacaatctgtgaagaatttttgcactaacatgttagttcaaaaactcaacattgcttgctaagactattgcaataaactcctctatgatcccctaaaaa

SEQ ID NO: 92845 - DNA, 594 bp, Homo Sapiens
atgaaataatgacttcactggcaacctgaaagttgtttgcctggaggcagtattaaagttcatcaacgtggagcctactgagaaagctcaaatataaaaagcattatgtaatgttgtatgataagaggtgctaaactggtaaagaaaaacccatattttaaaattgctgaaacattttgaaatggcattagtcacctttctaagacaaacagactcatagactagtaaatccaatgttaccagaaacaaaccacaaaaagaagtgtactctgggagtgctaaaagttaagagcacgttatatttaacaagtggtatagttgtctttgaaatggcctgttgattaaagttttgagctgtatttccaacctgttttatgagttgagaagcataactctcattggtaactgctcttagtaacaaaatcctaattctgctttaaatgctctttcttaattaagatatattatttgattatgatatcttgaaaacattggttttctggataagttataaaacagaatttgtatccattcactctgccttcctgttatagaaatgctacagctcagggtaataaatgggtctcttgtcaa

SEQ ID NO: 92846 - DNA, 418 bp, Homo Sapiens
  misc_feature (26)..(26): n is a, c, g, or t
ctggattttaaaaggaagtgcacagnatgggcctaggagaggactcaggggcctgactgattaaagcttggccaagcacagaatctttcccactctccagaagctcaccctgacctctccttttcactcaggccctgtctctcattaacagccagtagcttattggtgatcctagatgcagcctgcaaccttttgtacaactcacagaagcactgatttgctgtcaaatggtggaaaagttcaagctgccaaactttttcttaaaggaccaaacagtgaatactgtaggccttaactgttgcaacaccatagcctctgttgcaacaactcaactctgtccttgtagtacaaaagcagccactgacaatatgtccataaatgaatgcgcatggttgtgttctaataaaactttatttac

SEQ ID NO: 92847 - DNA, 914 bp, Homo Sapiens
gtaatcatccagttcaagggggtccatgggccccagacctgtaaaatcatgagtgtacgaagtgagccagtgggacctctcaagatttctttgtatgttggcttctttggcagagcaaatagggtcccatgaatttaaagaagtgttaggagcgaaggttttaggaggttttgggtagaatactggcttatttttctcaacacctctgggaaaatcataatatacaccttgacctggccaagtcagtgctttcttctttgaatccatgggaatatcaatcagttcatatctataaggattacctcttgtcttcaaaactgttgaatcataagccttgcttggcaccgtgggaggaaagggctgctgggtgcgggctttaatgcccgtgtagaggtcctcaggtgacgtgaaggtggggaacatggtgccgcgacagatgtgtgtgtggtaggggtgttcaattggatatggcaagcagatctctcctactgttgaattaggcggcttgggtatcaaagaatcatttccatagacatcactttttttgttctgggtcaaataataaaattgttcaacaggaagctttcttggccaggtttctccaccaaatccataatgctgatgtcctttgcccatgacacgaggaggctcatactttggcctgtggtcctcggggagtgaaatcggtattatcccaccatactctctttcagcgccccaaggaagcctacattgttgaagtgactcccttaattcctgatacctgtcctctgaggcagttgggcgagtaaccgtctggagggggttgtgcaattcattagagtaaaaggtgttggacagtatgtcagctccttcaagctccctgcaacagtagggcctgccgtgaatgacttccatgcttctggctaaaaagg

SEQ ID NO: 92848 - DNA, 558 bp, Homo Sapiens
cctaccaccaatagctagcactagctctttgctagtgttattattctgctgcagaaagtatccttgaactggaaatagtccacaggggagtatctattcattcaacactatcaattcctgggtgactttttgaaaaaatagtatctctagttgcaagaaatcctgcatctgtgagttcatatctctcactcaaattggatggaagtggtgaatttcagccaaagtgtcccaaaaaatcctgttcctgtgattctgacgttatcagcctctgcacctctgtcctcccttctgccacatgttgcctactctccatgactttggtaagagcttccttgtgtatgtggatgatgtccaggatgttggtctggtgtccctgagacagcactaacaggtccatgactgagtccacttcctggctgggttcattggcaaaaagctcacaaacggtgttgaaggcatctttggtgaagtgatggcctgttccagatccaagacctggctaaggcggaaaaaaaactggctgccttttgctgctcttttttaaagcctttggccctc

SEQ ID NO: 92849 - DNA, 745 bp, Homo Sapiens
ccaaaggtaaacggttttctgaatcttgcctaggtgtttcatttatctctaaaattctaaaaagcataaatcattcaaatcttcaaaccaaggcagaaataattttatgtcgctatagtataaaaacattaataagatagcacattgacttttaaagggaaaagtaaatataacttagcatgtaaactcatttcggctaccatttgctccaaattccctagaacagtggtttttaccactgtactccaaccccgtttttaagcaatggaactctttcttcaaacaaaagcttatgcagaacattctctgtgaaacgctgctgagtgagaactgctttcattgaagctggaagccatcataccttactgccttgaaacccctaggactcagctaagtatttgcctaaccctgaccagggaatgccttggttctgtcaattgctgacatctgagaacacagaataatccatcatttttaatttcaagatattggtacattttataggtatcaaagcaatggcttttcttttgcaacagttaatgtatttattaacttaataattactttatgtcttctataaaccaggctgttaatacaatgatgacaaacaaaactggcaagatcactaaaaaataagtgaataaacaaataagtagtaaaataaggtaagaagtaaatatgtaaaagagataatttcaagcataagtgcaatgtaaataataaagtaagcatttaaaattcaaaa

SEQ ID NO: 92850 - DNA, 1219 bp, Homo Sapiens
ccacgcgtccgcccacgcgtccggtctaatggcggacgccagtatgttggagttggtggtggcttaagttttgaagggaggtagcatccgttggatatccacaccatccttctcgctgcaggctttcttggactccgtactgttggtgtaaccaaggcctggaggtctgggtggctcaggtttcctgcagccatgtttctgtacaacttaaccttgcagagagccactggcatcagctttgccattcatggaaacttttctggaaccaaacaacaagaaattgttgtttcccgtgggaagatcttggagctgcttcgcccagaccccaacactggcaaagtacataccctactcactgtggaagtattcggtgttatccggtcactcatggcctttaggctgacaggtggcaccaaagactacattgtagttggcagtgactctggtcgaattgttattttggaataccagccatctaagaatatgtttgagaagattcaccaagaaacctttggcaagagtggatgccgtcgcatcgttcctggccagttcttagctgtggatcccaaagggcgagccgttatgattagtgccattgagaaacagaaattggtgtatattttgaacagagatgctgcagcccgacttaccatttcatctccccctggaagcccacaaagcaaacactttagtgtatcatgtagttggagtagatgtcggatttgaaaatccaatgtttgcttgtctggaaatggattatgaggaaacagacaatgatccaacaggggaagcagcagctaatacccagcagacacttactttctatgagctagaccttggtttaaatcatgtgggtccgaaaatacagtgaaccctttggagggaacacggcaacttccttattacaggtacttttctttcagagctgctttgtacccttttacttggttcattttatgcccaaacctaataggttttacttaaagggtttgggaattaatccatttgttgtgaacctgaataccttgtttatcttttggacaggttagaagttcatgtggtggagtgattttaaaaagtgttggggataaagactgcctagctccttaataactcatattctactgagggcagggaagagaagttgaagggagcagtcagcttggaatattgattactgttagttgctgtgacagtttggctgtagtcagtctttgcc

SEQ ID NO: 92851 - DNA, 941 bp, Homo Sapiens
  misc_feature (630)..(630): n is a, c, g, or t
  misc_feature (919)..(919): n is a, c, g, or t
ggaccgttgggcggtccgcggggcgttgtccggagagctgcgaggccggggttcccaggttcacgccacactctaggaagtgcctgagctagtgagctggccaacgagctccgcgggctgggaccatgggctgcttcttctccaagagacggaaggctgacaaggagtcgcggcccgagaacgaggaggagcggccaaagcagtacagctgggatcagcgcgagaaggtaatgaaagtcgtgtagccgccgtctcagcctccctgagccgctccgccaggtcccttacggcccgggaccgctgagggggccgacccaactgctgccgcactctcttgaacgcggatagctgaagtcggggtgcacgacttttttggggagcggggacgtgaagtacagcgctagagaggccgcccagagggctgtggagctccggaaggagccttaggagtttgttgtcgtggtagacagactcccccgggagctttctctgactccgaaccctgccttgctctgacttcctgttggagatgatcgattcgagagagggaaagagccgagaacgccctgaatctcaaatcacctcgtttcacccaccggcagcgtcaagcggggttttgtccagtcgacngagttacgtatatgggaccgattctcatctcttccggggcttaatgttctgtggctgttttctcttttgtctgccctccccggcaaaatctctttggtgccctcatgatattatttcactgctgaatttttctcaattacccaagtggactgtttaattgtacagctttactccccctcctcttccagttatccgaaagaaataatgaatatcgcatcagtcttggaatgtgtattaagactgtaaggtgaaaataagcggcataaaccaggcagtattttactgctgncttaaatgaatgaaaacgccct

SEQ ID NO: 92852 - DNA, 597 bp, Homo Sapiens
actcaggatggggtcatggctgagactatgagggctgctcgtgcatgaccctgcctgctggcctccatgggcccactatctgaatgtggttccccttctccccaggaccaggtgccacctcctctgggaagctttccctgcccgtccacagggtatgcctccttgttcctctcctgccatcggtttacgtgcctgtctccatcaacagaccaggagctcctgaggacagggactgagtctgcctgattcatctctgcattcctagcacttaccttggtgcttagtgaaagctcgaacctgcctgggttcccaccttgtctctgctacccccagctctgtgaactcagagccaactactaagcctgtagcagcctcccaaactgcccagtcttgttcagatgcacctccagaaacacaggggtccaaaatgccccttcccagacaccctgaggagtagaacagtgccagcaggctccagggatgagggactagctaccacattccctttcccaagcctcagtttccccacctgtaagatgagggatatgggctctgactttctgagtttggaaaataaagtgctccccaaactggaaa

SEQ ID NO: 92853 - DNA, 555 bp, Homo Sapiens
  misc_feature (419)..(419): n is a, c, g, or t
cagtgtatctttccataactgtatatagagtttaataatttcttttccagcatcatgttgtttcattctatggatatgacatggcttattatggtggttttacaaaaaagccacaacttctttggcactgctcccattgagaggtaaggtcttgaatctgggtatttgtaactgctttgacaaatagaggatggcagaaatgacattatatttgacttttgaagctgggtcataaaagaccacatggcttccacttaggtcatcttgtattcaggcatgtctgatagttttaataatgacctatgtcctcattaagggatggtagcaaatccaaatatgacttttgctgagcctggcaaggtattttatatagagaactagaacatgacaaccaaattctataaacttggaaaatgctntttgttacaaaactttaaaataactttatattagtttgtaaaatccatacagctaatagaaatcaatgtttatttggatatgtccaatggtctaaaaggtgtctgaaaatctcactttaagtctactcactatcat

SEQ ID NO: 92854 - DNA, 596 bp, Homo Sapiens
  misc_feature (472)..(472): n is a, c, g, or t
  misc_feature (506)..(506): n is a, c, g, or t
  misc_feature (567)..(567): n is a, c, g, or t
  misc_feature (577)..(577): n is a, c, g, or t
ctgttgggtgtggctgaggggaatctagaacacaggcagaggagggagagtataaatatcaactaacgctcagcaccaaatgcagaagtggtgaacgctgcttggtctaccatcctcttgctatgtggcattggtcagaatttagtcatgtggacataccaaactgcaaatgaggctgggaaatgaattgtagctacatgcccaggaggaaggagacttggcctgaattatttcttgcagaagatccaaaaaccttctgttggggtctgaattgggactcctttcctgtagcatctttctggtgaccactgaagggactatagtgcagaaaacccccacccaaaggctaactttcggtaagtggtaggggccagtaacatctttctggtgaactctgaagggacgatactgaagaaaccctcccacccaaaggaaatagactacagcactgattggccaactttggatgcanaacccatggaaacagaagggaaactaaatgttanaatctgatcatgtgaagctttggtcaccaaagaaatgaatcataatgctaataatgagttncctgactcanccctgaggatctaccaaaa

SEQ ID NO: 92855 - DNA, 554 bp, Homo Sapiens
  misc_feature (14)..(14): n is a, c, g, or t
ccgcttcttcactncccgttcatgttaggcatcttcataatacaactcgttgtggcttgagtccctgcgccgagcagctgcagcaatcatggcccgggactggccagtggcattgttactggggccatctacattgtagactttcagcccggccatatgcttggctgctcggaatttggaggctgttaggaggtttgggttatagatggtgaaatctttgtagtaattttctaggaccaccaatgctgctcgctggatactcaggtgtcccaggctgtagaagcgggactcgccatcggtggagcggaccacctgcagcgtgaacatgggctgcagctgcctgagctccagcaggacgatggccaggtaatggatgaagaggagggcatccacaagggagactgcatattgcacaatgccctggtaattccggtcccgagagtccaaaatgcggaccccgtaaaaaagccaataggaaaccacaaagagaaagatgaggaccaacaaaagggcacgaaacacaaacacccgtggcatgtcagctatccgcttgc

SEQ ID NO: 92856 - DNA, 728 bp, Homo Sapiens
tgtgagatggccaatgacggtctgacccgttgggccgggccaggtcgcggacaacgtcgaccgtttgtttaagaagcgtggactcttgtcctgagtgcaccgaggctttcagcctgcgggacagtggtgcgatttgcattagagaaagggagatgccatgtgctggcccagcactccaacaggggcctgacctctaggaacgggacactggaggaagcctagacatttgaacaaatcaagtcatccagatccacggtcagctcctgccccgacttggccttcctcctgctgggctggcccacggacctcgggaacctgccctggctgtgggtgacctgcagcctatctcccaggactatggaagccccatgcaggaacatggttctgacactttggggattataccctaagcttaaaggactggaaaagcccctgaagtcccgagaccacaaccctccaccttctaaagataagacaagtcactgaaggtctcagaactgtggcccattcaccccttccctcaagacaagagtgtggccaagcatcaatctcacccccagagaccagacggtgtccaggtcttgggcagacgaaacctgctccttggggatggtcttcctggctgtgcttccaaagggctggcctgcaatcagctggttttcacttgatcctttcggggtttgcattatatctgactgaaggaatgaactgggagagaacagcagagc

SEQ ID NO: 92857 - DNA, 581 bp, Homo Sapiens
  misc_feature (86)..(86): n is a, c, g, or t
  misc_feature (166)..(166): n is a, c, g, or t
ttatctgtggtagcccttggaggctacatatttatatgcctgccccattttgaggccaccacaatatatccaagcatcccagaaanctcttgctatatttcactggctctgctggatcattagttcatggagaattcatggttcaacagaattccccagtgcgacnctgaggaatcagatgctgtgatgcagcacatttaagttaaaggttccaaccctgaaaaggggtgaggttacccaaccagaagtgcaagattttaaggtggtagaggacatgccttgttgagaaaaatcagaaagctgtttttggtagaaagggaatgaattctggataaaagaaaacaaacgtccactacaacagccaaatggaaatgaatgttgtcatttccctctgtagcttctgtgtctcccagttgctttgaaagcatttggttgtttaatttattatgctgtcataactgcacaaagggctctctttgcatctcaggtgtgtttgaggtgaatctgttttacctattagttttgaaagatccttaagactgttgtgcatttgggaagtgggaaagtgcaaagatatgcca

SEQ ID NO: 92858 - DNA, 482 bp, Homo Sapiens
  misc_feature (15)..(15): n is a, c, g, or t
gtaggagaagaaagncaaagagtcaccagggcaaacattttactaattggaaaaaggccattcaaaggaaggcctgccctgcatttctgcttcttgagttctctcatcagcttcagaatcgaagtaaagaaagtcacaaggggacgtaagtgagttgccccttaggaaaagaagcatcagtgcactttgcaggcagtacagtcaggcagaagatatgctttgagagccaggggtcaccctggtaagacctccctttggctgtgaagtcagaattcttgcaataacagggagttcactgccttccggtcaatttgtaatcctctctactttttggaaagttcttgctcttgagcctcaaatctgtcttgaactaacttctaaccaccatggtgatgagtcaggtctttggagctgcaccaagtaaatctaattcatcttacaacatgacagcccttcaaatatttgaaaacagtgctcagacc

SEQ ID NO: 92859 - DNA, 527 bp, Homo Sapiens
cttacatactgccatagtcagcagcacatcatttaagacaaaaaacagtttatgcaactgggccctttgagcatgatgctgaatctactaatcaccatgagcccccacctgagtgtgtgctgctaggcatgtctacaggatgcgccgtaccaaacctgccggccggccaaggtaactttgaaatgctaacttttgtgcctagagcaatgagacttttaaagaaaactgcctaaggcaaactccttctcccttattaagtgatgcataaaatatccatctatagctttagcatccttccaaaacctcccagagcattgcggtgctgggctcatatcacccgcggggcaggctgagcacattcctacagcacatctctagtctgtgcacaccagaagctgagttatttccagagtctgaaaaaattctgtgacctcaacagagaaaaactccactgtagttctctatagaaaatgacttaactcatttctgcttaaatacactatgttaataaagaaacagaccttaaa

SEQ ID NO: 92860 - DNA, 496 bp, Homo Sapiens
caatgtgttgggtttacaggcttgagccaccgcgccaggcctgggccctgccttttgtgtggtccccattgtgctgctggacctgacaagcagggctgacagtgaaccccatataaacgtggccctgatgacgggggttcaggccttagagcaggtagatgctgaagaagcgccccggcctagccgcgactcccgtggaactctttgaattttaggaaattctccttaaacacacttctggttcagcaccgacatcaagaagagagcctctccagcacctgcaaactcactttgtccctccctggttcttcccgctgggcgcccactatgctgcggtctcgcccatctgtagctgagcccagcagcccctgtaggacacctggccgaacgggtcacagtcctgctgggctcactcgggagatggaggctcccaggggctcctccaacagccccagggctgctctctggtcactgcacctgcctgggctgccactct

SEQ ID NO: 92861 - DNA, 858 bp, Homo Sapiens
caaaaacaactctcctctctcaagccgcctccaggagcgcatcacctggagaagagcgactcgctccccgcgccggccgcggaagagcagccaggtagctgggggcggggaggcgtacccttctcccgctcggtaagagccacagcatctccccggagattggccgtatcccaccgtccggcccccagggtcctgcagcggtgatgcatatgtttcggagcaatgatggaaggagaaaagccgctgtcggtggcaactgaaagtggggagaggttgctgcagtagctggtgctgcagaatgcgcgagtgaagaactgagccccgctagattctccatcccgctcagtcttcattaactgtctgcaggaggtaaaccggggaaacagatatgcactaaccaggcgggtgccaacctggatctataactgtgaattccccacggtggaaaatggtaaacaaagacatgaatggattcccagtcaagaaatgctcagccttccaattttttaagaagcgggtacgaaggtggatcaagagcccaatggtcagtgtggacaagcatcagagtcccagcctgaagtacaccggctcctccatggtgcacatccctccaggggagccagacttcgagtcttccttgtgtcaaacatgcctgggtgaacatgctttccaaagaggggttctccctcaggagaacgagtcatgttcatgggaaactcaatctgggtgtgaagtaagtatcatgttcgctctggatctattctcctggaaaaattctgggcctttgtttttcttgtatttctgccagagtatacccaaaaaataattttttaatgcatatttataaagcttctgagg

SEQ ID NO: 92862 - DNA, 598 bp, Homo Sapiens
acggaccttacagcatcctaccagttaatgacgaacattactatgcaacaaagaattgctccaagaagtgatatccacatgttgtagtatttgaatgcaggacgccatcctggagattttgcaagtgatgcatggaatactgaaaaattgatcaatgcatatgatgcaaggaagaagtttgagataattggtgcaataacattcagttcagcaattaagatgaatccaagtgcaattaagaatgttaagatgtagccacgaagaggttcattatttttcccataacctttagcaaacatctggaaagctgggtagatgttgtccttacatagagcctgaaatattttgggagcactcactagggatgctaatgctgaagaaagagtggctgaaaatatacctgcagaaattagtggtgtaaatcctgacaccatactcattacctggaagttgttcattaggccataggaacaaggactgctttcacaagatgaaaaatcaaagtttaatttgcaggctgcagaagtacagtttgttagctctgttacgatagtgtcattaacgtttccagtggcatctcgaacaacacaagaaccta

SEQ ID NO: 92863 - DNA, 340 bp, Homo Sapiens
aaagctgcaatgtttgtcctgacttcagtgtcagggtgatttccatgagagaattcaatacatgtgttggcagctgtgcctcatgaagtaaagttgctggccagtttgggactggatgatggagcagttagtctttgcaaagccagtgtgaagaggataggaaaagcagcctcttatttttctaacaagagaaaacattcagggatgaacacatatgcagcccaactacttccccattgttaaaaaaattgggtttaaaagattcctgttattttttaccttgtcatagtcatatttcataattactttattttatttatttatttagagacggagtctc

SEQ ID NO: 92864 - DNA, 1396 bp, Homo Sapiens
  misc_feature (1209)..(1268): n is a, c, g, or t
cgaggtgtgaggatctgaccttcatttcaaatcaataccattgtttgatagttgagtaagttacagtttctcaatttatggtgtattttcagatttggcagattttttgttgtctgctaactccatagtcttctagtagtggactgtatacctttatctgcaaaggtgacaactcaggagaactaaccattgtactctatgcacccatggtaattataccccaggtgagcattttgtaaagctgagccagtgaaagcccttcctaagacctttctaatggaagataggcacaggataactagttcatgatcctgaagctttcagctaagtcaagaagacggcaattgcagtaggaaaaacatgggaaaataagcattcttgaacaacaaagagaatttggatgatggttgaatccaaaaagtgtttatttctctggttttagtattctgtaatatccactcaaccccatctaccagtggtttatgtcaattagtatgttttcaaaaatctcttggatttcctaatcaacatgttcattagaggtattgtttagaagtcactgatcaaattctgagaacaaaaggcgcctgggatgctgattaggattacattatatggatatatatgatgaggtaggattgccacttttatggggttattgggaaatgtttaccattcaagttctgatttccatgagtgggattttccctatacccattcctagcttctctgccacattatgcattctgccccaggcatgaaggaagtgggcttatctagttggtaagatagtgatgggtaactgggtttgctcagctgaactccctcttcattgtgggctgacctgcaagtataatttcttgtcacagatattgcctgtgattggtaaattggtctaattctgtcattcagctaattggcccattagctgaatggtcacactaagttgcatcctccaactcaatttgatcagtaataaaagtttcatcctgccccctgtctgctacttaattttttatcgtttagatggggggaaattaagtagcagacatggcctgccccctgtctgctacttaattttttatcgtttagatggggggaaattgtgctatttatttggggcccttcagagaacccaatatgaacatgatttatctatttattcagtttttatgtccttcaggacagataaatgtatgtatacacacnnnnnnnnnnnnnnnnnnnnnnnnnnnnnnnnnnnnnnnnnnnnnnnnnnnnnnnnnnnnactgatcttgctcttttcctgtgaaatgtattaatagtcacttcaaagatttggttgctattgtgaaagaaattaagttacctttcactttgaaactaatagagtaaagaaaaacaaaaatacctaaa

SEQ ID NO: 92865 - DNA, 408 bp, Homo Sapiens
attctctagcaccagggactggatgtcattatcagtgattcttttgatgtggccattccgtacctacaagaaagaaaattcgattagtactgaaatatctgacaaggctgaataggactatttaaagaaaaccacggtagcccaagaggcgtacaaagaaatttgtgacacagcacactgaagcttatatacattagtctctgtgagctctgtcactgtgagtctgatccactcatggtctgcctggtgttctaaaggtgacatctgatgtcactgcccaccttttccacaactgcaaccaagtcttgtctccttaaaaaagaataagctcaagcaagagccaagaccagttatgaagcatcatttctatcttcgacaatgcttagcacagtgctagccataaactaa

SEQ ID NO: 92866 - DNA, 547 bp, Homo Sapiens
  misc_feature (17)..(17): n is a, c, g, or t
cgcactgttgtcatggnaggaaccaagatggcggctctggcctacaacctgggcaagcgggagatcaacctcacagttgtatgatgcataaatacaaaatcaggtaacatttcttcattttgttgttttctttttcaggatgggtcttaatatgtagtggagaggggttggtgaaacagtacttttcatctctatgttggggtagagacttgctgactgagtgtagggctgattgcaaatgaagatttccctgcccactaaggttttagggaagggctttggccaatctgctttatctcagatgtgtgataactaggcctaaggcaataatccttgagcaaaagactcttgctctggcacctggatacctatcttatggagttattctaaggattaagagataatagatataaagcacctaatacagttagagtacatcttaaacatgtaatgtatcgagctattacagagagttaactgattacaggaacgtggttggctcagggtttgacagagaaaagacaaataaatcctgtattaatttaag

SEQ ID NO: 92867 - DNA, 837 bp, Homo Sapiens
  misc_feature (533)..(533): n is a, c, g, or t
  misc_feature (579)..(579): n is a, c, g, or t
  misc_feature (715)..(715): n is a, c, g, or t
  misc_feature (758)..(758): n is a, c, g, or t
  misc_feature (760)..(760): n is a, c, g, or t
  misc_feature (767)..(767): n is a, c, g, or t
aatagttgataggctgcagttaacctgcaggactccttggtacagggtgcagtgttgagttcaatccaaccaagacaccagcatacactgggtggggagagcagctatggcctgggagcactaccaggggaaaggcagctggtggagcaccttggaggaaattcaagcctccttggcaattagggaagatggattgtgtgtttacagccgtgatcacccatgtgctctgtggtctcagacttccatgtccctgcacttatcgcacaggggccctgcaacatggcagtcactgaggactcagtctgcagtcgagatagacattagggagtggtgaggtttgtggtgaaccaaaggtgcagatgccttcggaaggagaaggtcacccctcaattttagccagttgttgtcatgtcagaatattagcaaatcatcttgatttttcaaatatgaaaagtaggaattctgtggagaaaatcccagttgaaaaatgcaagaaaaattagctctgtttagaagcaagttgcagcctgcanatcacagttgtgaacccccagatgagaggctcgtaacataatcctntcgccacgccctttgatgtgcaagcaccactggcaagaagtctggatacttttctcgtaagattctaaccagtcccagaggaaaaaaactatttcttacttttctctggaagaatgcatatgttgattaaaggagngttactacgttaagaccacttttctgtgacttttactgccctnantctgcanctcaccaacctgttcaaggctaggagctggaagtcatttgctatccccttttcctcgccctcacagccaa

SEQ ID NO: 92868 - DNA, 1057 bp, Homo Sapiens
  misc_feature (201)..(201): n is a, c, g, or t
gctctccgaaggaggcctgaagaccggtagatacccaggagggtgcggaaaggaagggtcccgctctggcccagcaattggagagcctcgccccgccggcccggggtgcccggaatagccgaacccagggcggggctcccggttatcatgcatccttcaggccgacctgggacgcggccgttggtggcctgccagttttgnagacggaatacttagaccctgctgggtggggccttgcgctccatagctatgctttctcagctcttaaaaagtcagcaatcctgggttaaattactctgtacaaaattaaattttgccatacgctaatgtaagtattatttgcaaccaaaggatggatggatgcttttctttttctttcttagctcttcttaacttattcgtggattatcacttactagactagtatactaattatttaatataaaaacactctgaaacgtttatctccgtacagatgggtgttgatttcctcctttaccagagaaaaacaacttaacttagatgggaaaaatgtattcccttgtgatgggaaaaatgtattcaactctggtacactgccaaattggcttctttaaacactggagaaatctgcttccccaaattttactcccaggtaagcaggaattttgaaaagctttgtgtctttaaaaagctatgttgaagagtaaaatacttagtaatatatagtacaatatttagtaagttactgactagtttgtcattgtaatcaaagagtttgaatgatttctacacctcctcaggtgctaggatttatctttaagcaccttaatatatatacatagtatataccatcatcttcaaattaaaagttatcagcttttaattttttccagtacaactacatataatgggtggatatataatagtggaaacttcacatgttgttcttgatcttacaaaagtatgataagaatcttgggcataaaagtggaactttagcagttcattggaaaagaaagccacaaattgatctttagcaccctatacttttcctatattaaaaacaattataaag

SEQ ID NO: 92869 - DNA, 437 bp, Homo Sapiens
tcagaaatcttgtatgggtttgagaaaatagcaaactcaaaggtctgcgggctgtatctctttctctcgtggagactgaatgggtgggaggataagaccgcctttcctacgcaaaagagcaatctcctcctttaaggccgaaatcctttccgcctggagttggatcaattcagtgacctcctctcttgccacaacatctgcttcccgagggccctggaaggcattgccctgttgaaagaaaacagctccctgttgaagcatcatttggcatgtgaaaaactccatgcccttatactgtgtatctgtgatgagtgctggcctgacagtcaccctaaacagccactgttccttaatctcgggagccttcaattcctctgctaaaatcccaccattagaaatgtgtgcctttgggctaataaacaactcaacaagtgcaa

SEQ ID NO: 92870 - DNA, 1082 bp, Homo Sapiens
  misc_feature (274)..(303): n is a, c, g, or t
gagaacagcactactgagatcgcccatcagggtctagactgtgatgaggaagaagaatgcaatgaccatattcaaagaatgaattttgtgtgcagtcagcaagttctgagtgctccaggaagaagaggaaggtcagtgaaccagtgaaggtcttcatccctaacagaaaatgaaagctaaatattccttctacatttattttaaaataagtttattttgtaaaaacatgcataaactgtcttagcaggaaagtacattcctgttaccaaaaccnnnnnnnnnnnnnnnnnnnnnnnnnnnnnngtcagttgctaagtgctaaattactggccaggtaggacgcgagtccactttgccataaggaaagcgggtcaatagggctgcctctggatagcattacttcaaagctgggttagagatgaggcaccttttatattatatttgtaaaagaaccacagcagctattttggaaagaagctgttgttctcaaaggaaagaaggatttttttgcataattaaactcttcagctatttagactactgtgaaatgttttgacttgttgtaacctgtatactggaatccctctctagctgtattaaaaattcccacagagttgcataggatgtgtggaggtgcttatccaggtgtgatttatgtgttaacctcagtcacgaggctgatcagctaattgtgggaccaaaatgtgccctgcctcaactctggccccaggccctgttctgttatccaatccgaaacacggaacatgctgcaattcaggagtctggctctcttcttaagacctatattaaatatttcccaagaagcacttcagtttatcagtctgtaacctgcaaatgatgctattagttccctccttattctggaagaatttggatagacttaattgatgattagtatgagatgaacaatagatgacttaaagtgttatttctattatttatataacatgagatttagtaacttataaaatgaggtttagtaatttaatttaaatggataggaccaataagttaaatattaagtgtgtgacttatggttaaataaaatgaaaatacaaaaa

SEQ ID NO: 92871 - DNA, 429 bp, Homo Sapiens
  misc_feature (217)..(217): n is a, c, g, or t
tttggcatttagttgcagtttaataaactgtggctagttttgtttttttgaccccaggacgcccagtgcggtttcagcgttaacaactccttagcgaaaattgcagaacagacttttcgctcagcaacaggctcctcttacgtaaaccgcaccggccaatgagcaggaagatgggcggggtttcttggcagccaatagtagcccgcagcggcgcgcnaggataggcccaggctggtttccaggctgcatacggaaacgaatccccggggctctttgactgggggcgagtcttcgaagtcgccaggctctgccaatcaaccgggtcctgattggtgcaggctgtggcggtccgcccctgactccgtctagccccgcctccgcgagaagaggctgaactgccccatctgcttctaatttctttctttcttt

SEQ ID NO: 92872 - DNA, 751 bp, Homo Sapiens
  misc_feature (158)..(161): n is a, c, g, or t
  misc_feature (166)..(167): n is a, c, g, or t
  misc_feature (169)..(171): n is a, c, g, or t
  misc_feature (173)..(174): n is a, c, g, or t
  misc_feature (176)..(176): n is a, c, g, or t
  misc_feature (184)..(185): n is a, c, g, or t
atttgggggaggaattccaaagcacctagttccatggcccaggatcttccttaggaaaacagcctatgacccatggttcccttacctaccgggggcccgcggcgccaaaacgaagggtttagaaaggtttttcaggggccgaggcggcccgacacggnnnntcggnntnnngnntnggtggggnngatcacttatagccaatatttaataatcccatattaactgatgtgtaaaaaatgtctttatgatctgttaccacccaaaagaatgcatcataactttcaagaatatgttctttgacttctaacctctgctcttctttagaattacctttgctgcggccagtacatgctccttgttaatgactctacatttactcgcacaagcgtttgtcctggactcttctgctaatcgatgaacaaacagtaaacagttcagatggaccaataagtcaccacttttctccagacgaagttgaggcttctttcgcttgaagactcgctttagaaagccacggggagccttccgctttatctgcttcctctgggagactatggtcgacagcgccatcctctctgtcaagtaccagctgcctcagcttccgaggtgctctctgtatcgcacacaagctccggggacactgggccagcgaaaacaatccggtccgtatgacgcttcttcaggcagaaaaacctcagtccgaacgttcgaatccgccgccaacggaacgcgcccggcgctcagtagtccc

SEQ ID NO: 92873 - DNA, 578 bp, Homo Sapiens
tccctgaataaataattgattaaataaaccgacatggtaaagaggttatctttagttgggccttaaagacaatggagtggacactgtctgttggctccatagctaacattcattacttgccttcccattactaacagcgtccagactttaacttggataacatatatgctttaccataagctcaagtactttagggaaagctgatcccacttcaagcttcagtcggggagttggggaggggtctgtggcttgtttaaaaacaaacattggtacattcaatttcccctgcttacatcatttttcggttgagggtggggatggggaatgggaaggggagaacacgacccaaccagggtgaatttcaggacccttgtttgaaatgccagctaagaaatgtctgggaaaacaccaggaagagaaaacatctctgttcctccaacaccatgttgtatgcatgtgaagcctggaaccagtagagtcattttgctagatgtaagctgagggccaaggaaatatatggaggaggttactgccaagatactgtccaaatttccaattctcttataaaagttttttcc

SEQ ID NO: 92874 - DNA, 680 bp, Homo Sapiens
  misc_feature (74)..(83): n is a, c, g, or t
aaaaatatgtatttatatttttaaaaactggttggatgggggctttctcccaaatacataaatgactttgaagnnnnnnnnnncagtcctatgacagagtaaagatgcagacttaaaaggatttaccatgaagattttaatgactgctgggctgattattaagcctgatcccagtgaaatggaatgcctttagtcattttcatttatggactgtttaacgatttttctccaaaagaaatatttaatgaacacaatatcgagttcctcccagtgcttctaattaacagaccactgaacgatctttgttaaaggaaaggctagcttcaggccagaaggcgttgcaggatctaatatgtatgctaccatgggtgaccaagcataaagataaactaaggatttgaatatataagggctaatgtttgtgtccattgttatggaatttctgacaatcactctctagtctttcctaatatttggcctttaggaaaagtgttttggactgaattgttctctctcctcattatcctccttaatgtgtgaaagtctcaatgtaactgttgattacctgctctctatttcataaagaggaaaaacagatccagaggaccatttcatgattcatcctttttcaaaacgtttattaaaacattaaataaagttttattattgtaaactgttaa

SEQ ID NO: 92875 - DNA, 349 bp, Homo Sapiens
gctttgggctgtcaatttccttttctactcaagagttccctcagataacctgccttctgtcttatcttgtcaggccttcaccctctccaagttagaaaggggtctttacaagttagtaaatagactttacatgttaagagaaggaagatttttgtttatagcggagccttgaccaaaatctcctttgaagtaagattgagatacaatgttttaccccatgatgctgatgctacatcaagtcagcattttatttatccactaacttaacaaccattggttgagctccaagaattgcatgcaccactctagatcctgaatctacaccaataaatgagagttcagctgcaaa

SEQ ID NO: 92876 - DNA, 860 bp, Homo Sapiens
  misc_feature (417)..(417): n is a, c, g, or t
cttcacattcaaggggcttctaggccatttgcacttcgtttacacctcattaaactgcccacattatatgcctgggtcccaggtgactgtgggaaaagatcaaggtttcctgcaacctcactgggcattttcagaatgatctgtacaagcgttgactgaatgattgattccaagttcccccttcctaggatttcagacctcctcttgacaagtgatgaatgggccatcttaatcttgtttggatcagaaaggaccatacaactgagctttagacaagactaaaaataccaaaagtagcagtctgcaattttatgtgcatgtggcttgaagctctgacaacaacacaaaagaacctcctttagacgtccttcacttccaggatccagtccaaactcctgggcttggcacatgaacccnctcatcatctggcacctggcagcccacatgctggagcctcacggatttgctcatcgccctctgaacacctgtggccttctcactcctctgtgtctttgcacatcctttccccaacctcatgccaggccattgcattgtgatccaggctcagtcttcgttctgcttcgtggcatcacagtcccttatttgaaactgaaccaggactgcagtcttcgactttgacatcaaatttgacacctcagtggcccaagctttcagaaacttggaattgcagacattatggatttggacctgccctcagaagagctacctactgaaatatttacaagtgaaatgatgtgagatgtgggatttgattcaaaatgatcctttatgtatgaagagtggggcgtggagaatgcatgaagatacagataaaataaacgtgtctatgggttaataaa

SEQ ID NO: 92877 - DNA, 768 bp, Homo Sapiens
  misc_feature (669)..(669): n is a, c, g, or t
acgttctgaagcacataaaaatagggagcatagtataataaatttgtacatatttaacactcagcttctataattagaaacaaatggcccatctggtttcatctaggcctctttgctatcctttcatctccaactggattattttaaagcaaattctagatgacattctgctgagcatttctgccagaattacacctctctttgctaatgtgaaaaaatgcccatgataactgtaaaatacgtgtgtcctatttaggtgtctaaacactttaatgtcacagtattaaggccttaaaatatagcttagatatatttttctaaattaaaagacttcattttttagatatacagaaaattgagcagaaaacagtgagttcccatataccttcttcatcccaacagtttccacctcattaacatattgtgttagtgtggtacatttattacaaaggagtgaatattgatatattattattaactaattttatagtttactttgtgttatgtattctatggactttaacatgtgtaatgacatgtttcccctattaccagtatcatacaggatagtttcacttccctaaaaatcttttatgttctacccactccttcctcgttccctctccccactcctccctccccccatcttaaggcccatggcaacccccngatctttttactggctccatcgttttgccttttccagaatgccatgtagttggagtcatatagtatgtagccttttcagttggcttctttcacttacca

SEQ ID NO: 92878 - DNA, 485 bp, Homo Sapiens
ccattacagacaagtcattgtcttctacatttgtacacatgccccattaaattgctgcagcacagtattaggactctatacaatatactaaatgcagttcagaactgcttcttaacatagatgtaaatggaagtcttataattctatgagattattatagctaaatttactgttacactgccgttctctgagttattaccctgagcattggtgttttactctctgtatttacccagtttgtgttgaatgagcaaacatcaagattattggcttaatgccaaggttcaacaaacaattgttcccctgtttgtgggcttatttatttatttctggatgttctctgcaagaatctgtcaaaccaactctcttaaagggatacctaaaatatgcctggactctgtattttggggcaacaccattcattcattactggtgttactgcaagtgttggcagatgaattgcaaaaatcttgattatgcaacaa

SEQ ID NO: 92879 - DNA, 647 bp, Homo Sapiens
  misc_feature (99)..(99): n is a, c, g, or t
  misc_feature (114)..(114): n is a, c, g, or t
  misc_feature (182)..(182): n is a, c, g, or t
  misc_feature (225)..(225): n is a, c, g, or t
ccaggacattattttattgcttgtcacatagtaaaggcatacaagacgttagctgctaataaaaagggaatgaaagttttaaagggtactgtctccagnaatgttctccatcanaaaaaattgtaacttgttctccacccagccccttgaactagtcccattgtatgctacctaaacaatgngttgttcaaggtcagtaaatgacatcctaactataattctacnaatttgaatttcttaaggtccaagaactctgctttgaagttcaggatctaggttaccagagctagacaacatcttgacctataattctaacaggtacttatcagatacatgaaaacaaatgccaactgagtataggagatctcattttctacataaaggaaacatatatggctaaaaatgtcttttgatggtgtaaaaattttatgaatctgataaccacggggagggataatggaagtatgacttcaatctcccctcctcgggttttacctttctttgcctatttctgagtatctctaggctaccaaatgttccagtctgaatgtagaaaaaaccacatcatgagcaggaatagaccgcactggcacaaaatgtaccacacggcaacaatttccagacggcacgtccactgacatgcgcga

SEQ ID NO: 92880 - DNA, 537 bp, Homo Sapiens
caataaaccaaactcctacttccaatgttctctagactgttcaaaatgcctttcccttggtttccatcagtacctgggagggaagaatgggcgttttggtgcaaagaacggagggcccctagcaaaaggtggcctgggtctctttaaactgtgaaatgggtctctgctgagaaaaagttccctaggccgaaagtctggccggggactccgtaagattataccactccggctgatggtgtctctgtgtgagggacccaagggggggccactgctgctgttgctgcctcccccacctcctcctccatggggtgggcccaggtgttccagagaatgggagggtagggtgaggctctctcgtacacggctaaggccagggccgttgaggtcccgttgggtggggcccccgtggtccctgggtcctgggagtaccccaaaatgctcagccagggtcccttgaaggagggaactatggtccttgggaaatactgccacagcccctgccactccgtgctctgccagtggtggggctgggaagcc

SEQ ID NO: 92881 - DNA, 735 bp, Homo Sapiens
  misc_feature (62)..(62): n is a, c, g, or t
  misc_feature (73)..(73): n is a, c, g, or t
  misc_feature (284)..(284): n is a, c, g, or t
  misc_feature (294)..(294): n is a, c, g, or t
cttggggacattttgagggctttcaagtccctgctgtggacaatctgcatgtgacagctganacaggaggaanaggcccaagggaacgcattcctgctaggacagagctggctggctgcacagtggagagtgtttgctggaagctgctaccagccatggggcacctacccgcccagcggcccttgcatccagatgcagagccctggacaaaggacggagctgtgaaaacagtgcctggaggatctgatcccttctagcaaggccaagagacacggctgggctgnggaggacggngtctccaggcctcaccatggccacttatctagacgccagcatcaaaaggttcaaagcccagctcacaggctcatgaaaaaattaagcaggtatcaaaaaatatcacaaaggcaacagttttatgacatgaaaacatctatcagagacaatataaacctgtctgctaatagaaccaggtaaaactgtctaaattaaattccgaagaaatttcaattttattttactaatgattttaaaaactagctttatttacccaacatgactaaagtcccattgacctgaaaagcatttgggcttatttacttaatttatgagtactcctttatttataagtctattcagtaccatgtagacaatgttcaaacacagacatatgcacgcatacataaaaatacaaatgaacacaaaaaaataaagactacatgcttttatttttaaaaa

SEQ ID NO: 92882 - DNA, 786 bp, Homo Sapiens
  misc_feature (463)..(471): n is a, c, g, or t
  misc_feature (764)..(764): n is a, c, g, or t
ctccgtttccggctctttgtagctcctcttattaccctcccttctttctcaccaacccagttcttggaatatgtttttgctgctgtctttagcttcctgtttatactgtagtttgggtaccccaaacaattgtgttatttgggaagctggacatggaggcccccatagggtgtatttacgcttaagggacgtcactagagcactggggtatttgttcactcttctcataatggtacaggaatgcccagtttcttcaaacccttaaccttgtggacagcccttaaattgctttgcaaactgatgtcacaaactggagactgctccttttccaccattcttgaaatgtagccacctctggtgtaggatgttgtggaaagaaaaacaccacagtaacaggcgtttttgttattattgttaacgtttttgcctttgactctccctgattattaaatggagaaatccnnnnnnnnngtcttctctcccatcctaccttcctccgccgcatatcctgttttggggatacctgatgtgacttgctgggaggtgatggacattactagtaaccagcgtttctagagaattaaaacattttggctgtgtatcagttgataaaactgctttgagatctgtctccattgtacttaaagattagactatcccaatgattacagagaattaaaacattttggctgtgtatcagttgataaaactgctttgagatctgacaccattgtccttaaagattagactatctcaatgattgnttcctttgtgaatgggaaatat

SEQ ID NO: 92883 - DNA, 616 bp, Homo Sapiens
cacgatattcagacttgaatggcagcaccaacttttccctgggtcttcagctccatgaccttcagacttgaacggcagcactggctcctcccctctccagctccatgaccttcagacttgaacggcagcgccggctcctccctgggtctcgaacctgcccagcctgcagattttggacttgctagccttcaggatcacattagccaattccttaaactcaacctctttctctgtatgtaggatatggacacctcctgctggctctttttccggagagcccagtgaacacaccgtgcatcaggctccatcattcaccagagcgtctttccaacagactttgctgtgatatttcttaaataaaggtcactccaaagaccctcacctctggattgtaaccaactcagtggcagacttaatccatttctatctgctgacatttctcacatggaataggctgtttgacagattgaagctgtctccccccactccccaggccagtgcacacttatctcccttgaatgttgattttgtgctcattttagagactgaggcacaaagacaggcaaatacaaggtgaagtcaataacaaataaacaatgctatttaggcgttatcg

SEQ ID NO: 92884 - DNA, 570 bp, Homo Sapiens
ttgcctcctggcccgtgcagctgcctcagggacaggtgggtgctctcagatgccatggtttagctctactgagagcaaggcccctagaatagttgcggggcactctgatcgttcactttggtccctttggctatggaacaggctgggtcacagggaactgccagtgaggctggaggctggaggtggagatggggtcaggaacatctggcagagggaggtcccagtctgtgtctccatcaggcttaagccagagctatctggtgctggtgtgccagcccctcccccagcctgcctagaaaggggtggctgcctgagggagtcacttgtatggtccccagggtgggagccccatcctgttctatggaataaagcgtcgcctctctgcctcgaaccagtcaaatggagtattgcggctgcacgtcacactagggtggccacccccgccattgcgagccacatgtctgcactgagaaactgcatttcagtagcatttgtcatccagccggaagttaaagcacacttattttattcacctatttttataataaacgttcttgctgctgtgaaaaa

SEQ ID NO: 92885 - DNA, 545 bp, Homo Sapiens
  misc_feature (243)..(252): n is a, c, g, or t
aacatactgagggaaagggccgctcggaaagatctaggaatgaacacccatcctcacaccccaggagtgccttggtttcagaaagcagctggaacattaatggcaattccactttcccattcatcgcccccgcccccaccaccccaccaagaaactcagtgggaatgaatggtctacacagagaaactgaaatctggttagtcaagaaggaaaaaacaaccaagtgcctggcattaagaggannnnnnnnnnaagctcagcctatggacaacaaaagcatggactgtatttctcagcatcttttgcagcttattgttgaaagtccagtgagctacctcaggcttttctctgtggaatgactgttgcagagaactgcacctcagaagaatggagtttaaaactgtgatgacattctacctcattgaagaaatcctccagtgccaagggtggatctctaaagaaggattcaatccaggatcacatcttatatttacaataacatgccttttttctccttcagtctggaaccgtgtctcagtctatct

SEQ ID NO: 92886 - DNA, 748 bp, Homo Sapiens
  misc_feature (485)..(498): n is a, c, g, or t
aaagaaatgcttaatcatagactgtgtacctatccccctgctgaacaagacacatccttagtttcaagacagactggggtttgggaatatgggtagctctgtgctaatgcatcaccccactgaggaaacagggtttgtattctacttactgtggcttcattgcataaattttatgctcattggagagaatatttactcacaatctagcccatccattcttataaaagagacctctgaaaggtaagagtcactttcctgagggaaatgcaagactctgggagagagagggcactttgagaatgggaaaattgcctgtgaaatcaaatttaggcgaaaagatagcccagcagccatatgtaaatcattccctcatgtaggaacaatgctgtgcacttggtaattcaatagaaaacattagtcatttatcatccttaattatcagtcatctctaactgcatctggtttgcattttttattagaaaggnnnnnnnnnnnnnngagttggactcaggcattttttttcttccgttcctgatttcattttgttattctttttaaaattccatcactaattcccatgatgtgaagaggtttctatttcataagacacaataaatcaagcaacgcctctgttgtaacgtcgtccttactgcgcatttgtcatgggccctggattgctgagtttactcaaggttagagagtcaagctgctttgaggacacacttggccagtgccgtgagcatgcacg

SEQ ID NO: 92887 - DNA, 696 bp, Homo Sapiens
  misc_feature (105)..(113): n is a, c, g, or t
gcggccgctcccacttcaggcattggataattcaccgaagcaccgctgaatggagtgggccctcagtaaatacctggaggaatgtgacctggccagtgaggttannnnnnnnngtaggtgaaaggtgtagcagtcactcggcctacacccacagcatcgaccttgtgaacccagcgacctgactgccttgggtgagtctaggcaagctccattctcgccagagcggacttgctccttgtcttcctcttgctgctctggccactcttcttggtccctcccctgttccctccccggactcccggttgtactcccgctgcttttctgtgtactcacctgctgggagacccctgatgccagcaccacgcttcactgctgtcttcattttcttctttctttcttgaaagtgggcattgctggctttactgactacctgttcttttgttacaaagctgctaaaaaatgtatctcttccgctccagacccagtaggatagagatgatctgtgtaggcatcaaaaatgtagaacatctgcaagtcatgtgtaggacagactctttcctcaatctgtgtggcgttgcgtggctaggagttagattcctttgccatgacatggcacaagactaggagcacggttttcagcacccagagaacttgcacagaccttagacattttgctgtaggattttgccacttcag

SEQ ID NO: 92888 - DNA, 1641 bp, Homo Sapiens
  misc_feature (80)..(162): n is a, c, g, or t
acatataaagagagattggtgtcacaaatggtggagtgacttttgtatttcagcagacctcagtgagaaatggtcaccannnnnnnnnnnnnnnnnnnnnnnnnnnnnnnnnnnnnnnnnnnnnnnnnnnnnnnnnnnnnnnnnnnnnnnnnnnnnnnnnnntatatcatagcatgccctgggagaagctgttcctgaccacctgggctatggtgattttgacttcctctgtgtcagaagtacccccgtctcatgcctgccatagttgtctttttgttttgttttgtgatttcagatggactcaccctgtcacccaggttggactgcactggcctcaacctcctgagttcaagtgatcgtcccacctcagcctccccagtagctgggaccatagctgtgcagcatcatgcctggctaattttttaagttttttgttgagatggtggtctcgccctgttgctcaggctggcctcaaactcctgggctgaagcagtcctcccacctcagcctcccaaagtgcttggattagaggcgtgagccaccattcctggctccttggacaatattttattcctcagattaagacacgtccttgggatggggctgcattggataattcaccgaaggcaccgctgaatggagtgggccctcagtaaatacctggaggaatgtgacctggccagtgaggttattttcttttgtaggtgaaaggtgtagcagtcactcggcctacacccacagcatcgaccttgtgaacccagcgacctgactgccttgggagaattgaagcgaatgagagtggggagtgtgagaggtgcgtttggtgcagcatttctggcatgggaacagaactggccaggaggaagtgacgtctgggttctgcccgcacacattcctcgccaccttcttggtgtctgagaacctccagcttcacctccttttctggacccgagggcctggcggagcttccagctgggaccagacctccatggatccactccagaaacggaatccagcatcgccttccaaatcttccccgatgacagctgcagagacttcccaggaaggtccagcgccctctcagccttcgtactcagaacagccgatgatgggcctcagtaacctgagccccggtcctggccccagcccaggccgtgcctctcccagagggggctgctccgccagcggtacagagaggagaagaccctggaaaaaccggcggtgggaaaagctggaattccttcagaggaaaaaagcattccctgcggcatgggaggaggagacaccgcgatcacatggccccctatgctgttgggagggaagccagaatctccccattaggtgacagaagtcagaatcgattccgatgtgaatgtcgatactgccagagccacaggccgaatctttctgggatccctggggagagtaacagggccccacattcctcctcctggggagacgctggtgcagggccctcagtggcttgactctcagcctagggaaccacccagcccggggcctctgcctgaagcgggacctccagccacaaggagacagaaggagaaacgcccacccagaaaaggcagccgggaaaccaaaataatgtttccagaggctgcttcaagcaagggggttagagga

SEQ ID NO: 92889 - DNA, 779 bp, Homo Sapiens
ctggattcccaaataattctctgcttcattaaactcctttaaatttgtctaaagatttccttttaatacatttcatctcatttttatttttctaaattttgataactttcattgacttttatcataaaaatcaagtctaatacaaaataaaacaatataaaaataaatgtattgaaattatatcaattttatttcctgacatattttcttgatttatatcattacaaaagataaaaactatcagcatggagttttgaaaccataaaaaatttttttgaaagaatgaggaaaagcagcaagaactttgggtgtgatggagagcttgtttggaagttctagcagggaagcccatctactcacgtgcccttgactgaagatgggtccttctccatcgcggatggtcatcctcttttaccgagcacacagctttggaaggaacgcatatggagtgctgtctctccaggaggacacaaagaaaagatcaagacagcatgtagcaaatgtagcaaggaggcatccaatcatctgcaacccaaggggcaaaccctcgccacacaccaaccctgctggctccttgcttttggacttccagtttcagaattatgagaaaatacatttctgtgtttaggccatcaagtctattgtattttgttctgacagcctgaacagactaatacacagtataatacaattgaattgttgattcatctaagaaatatataatttctacatggtttgttgcaattatctgggaataaatattaccatgaccacttaaa

SEQ ID NO: 92890 - DNA, 1040 bp, Homo Sapiens
  misc_feature (61)..(83): n is a, c, g, or t
cggtccggaattcctgcggataggcaagctcccagcagcgcaagctgacgacagcaggtgnnnnnnnnnnnnnnnnnnnnnnnctgcagcactctttcagtcagcatcgttcctggatttttttctcactgctgagcagcataaaagggtggggccgcttccctgcagcagaggcagaggcggcggcggcagcggctgcagcatcattcgcgggcagcggcggagaccgagagctgcagaaaagggtggggtcgcttcccaggagaagaggcggtggcggcggcggctgcggcatcctcgcgggcagcggcggaggcagcaatgctcggtctccgctggaggtgatggcctcccagccctgctaggtggccggctgcactaggacgccggcaggaaggagactcgagcccggtccgcggaccctgcggccacaccgcccggcccctcctctgcgccatggcttaagcctgtagccacctctcctcacgtcgcctcgctcgaccgaggtctgtgcgccgccgcagccgcagggaggggcgcgtcccagacaccctcgccggggactcgggaacgccgtgcgtctcacccttcggcgctcgcagcagactgcgctcccaaaggcgtttgcgaccggtaatcgagggactctacagactctcctaggacagctctccccgggtgctcgcctgagggaggagggcgaactagctccggctgatcgggggtagacaaaccgtgggaaccacattggccggtccaggatcggaggctgaaggaagattatacagacttgctttagaaccacaagaagaaagaggaggccggccttttcagctagccacctggccgtggcccgtgcattactaaggccctgctgcattcgccccctttctggaaccagttgggaaccaaagcggaaactcccttgtgcccgcctggattctcctcacaatacctctgaaaggcccacggaaccaaccggggggggcccccgaccggaaaaccaaccggccggccctaaaataaaaaggggcgccaaa

SEQ ID NO: 92891 - DNA, 522 bp, Homo Sapiens
gattatgagccaggaaactgtagaccaaaacctactataaactccaagagggagaggaccacagaaatggagcatacttttgcattttaacacaggtcttcaataccttagcccagtggggtttgtaataagataagaatgaccagaccatgcaggcccttgcaactaaaggatgcagcagttaatatttgtggataggcttaagaattccagctactgacaagaccaggccaaaatatttttgggaaggaagatgtttcaatctccctcaaatctatgttggggtttatttctgctgccaaggtctaaaacagctatgaagttgtgtcttactatttcttccagtggcctgcaatccaccggaaaccatttcctctgttgtccagcaagcagtttaattgagtactgcagtactcttcttgaggcagtacaagttggggaataaactcaagtaaggggtcatgtcctgtttagaagaaacaatcattttaagagtaaagaatttgttttgactaaaaaaaa

SEQ ID NO: 92892 - DNA, 511 bp, Homo Sapiens
  misc_feature (32)..(32): n is a, c, g, or t
  misc_feature (97)..(97): n is a, c, g, or t
cttgattttgtgattggtaaaaggaatttganccaaggattgattttgacaggctttggtaatgctgcagtattttcagttgttctttctcattttntaaggcaaagcagagagcagaggttcttcagtccacgcaacggttcttctctgaacagcaacagagcaaacagataggaggaggcaaagcccagaaagtggacagtgattcaagtaaacctcctgaaacactgaccgaccctcctggggtctgtcaggaaaaagtagaagaaaagccaccccctgcaccctccatagccaccaaacctgttagaactggaccaatcaaacctcaggcgatcaaaaccgaagaaacaaaatcttaaaggctatggtttattgcaggggattgggaggggggcgggaaaacatggagaattaagtcagataatgctggcagccaaaggggcaaaatggcctgtgacattatcctgttcagagcttggagatgtacaagggacataggagcaattta

SEQ ID NO: 92893 - DNA, 1714 bp, Homo Sapiens
  misc_feature (915)..(923): n is a, c, g, or t
ccagaatccaagatggcgggatccaggcaaaggggtctccgggccagagttcggccgctgttctgcgccttgctgctgtcactcggtcgcttcgtccggggcgacggcgtgggaggagaccccgcggccgcgttgccacatcgccgtttcgagtacaaatacagcttcaaggggccgcacctggtgcagagcgacgggaccgtgcccttctgggcccacgcggggaatgctattccaagttcagatcaaattcgagtagcaccatctttaaaaagccaaagaggctcagtgtggacaaagacaaaagcggcctttgagaactgggaagttgaggtgacatttcgagtgactggaagaggtcggattggagctgatggcctagcaatttggtatgcagaaaatcaaggcttggagggccctgtgtttggatcagctgatctgtggaatggtgttggaatattttttgattcttttgacaatgatggaaagaaaaataatcctgctatagtaattataggcaacaatggacaaatccattatgaccatcaaaatgacggggctagtcaagctttggcaagttgccagagggacttccgcaacaaaccctatcctgtccgagcaaagattacctattaccagaacacactgacagtaatgatcaataatggctttacaccagataaaaatgattatgaattttgtgccaaagtggaaaatatgattatccctgcacaagggcattttggaatatctgctgcaactggaggtcttgcagatgaccatgatgtcctttcttttctgactttccagttgactgaacctggaaaagagccgcccacaccagataaagaaatttcggaaaaggaaaaagaaaagtatcaggaggaatttgagcactttcaacaagaatggatnnnnnnnnngaggaattccagaagggccaccccgacctccaagggcagcctgcggaggaaatatttgagagtgtaggagatcgagagctaagacaagtctttgaaggacagaatcgtattcatcttgaaatcaagcagctgaaccggcagttagatatgattcttgatgaacagagaagatatgtctcttccttaacagaggaaatctctaaaagaggagcaggaatgcctgggcagcatgggcagattactcaacaagaactggatactgttgtgaaaactcagcatgagattctgagacaagtaaatgaaatgaaaaattccatgagtgaaaccgtcagactggtcagtggaatgcagcaccctggctctgctggaggcgtctatgagacaacacagcacttcattgacatcaaagagcacctgcacatagtaaagagggacatagataacttagtgcagcgaaagtatgcccatcaaatgaaaagccgaaatgccccagaactaccaccatttccatcatgtttgtctacggtcccacgttcattatatttgttgtggtgcaaactgtattattcattggttatatcatgtataggtctcagcaagaagcagctggccacaaaaattcttttgactaccattttcctgtgtacttcatctatttgtgtacaaaatgatgtcgttttgagggaatttaagtatttaaattgcttcatagtctaaattattaactttcttaattaaataactgtttaaaccttgatttgccgttaagaataaaccttaagccaagactt

SEQ ID NO: 92894 - DNA, 799 bp, Homo Sapiens
  misc_feature (781)..(781): n is a, c, g, or t
aacatttgtacctcccagtttcctctgtcccctgtcatctggaaaccactaatctattttctgaatctatggatttgtctattctggacatatcatataaatggaatcatacggtatatggtctttatgtctggcttatttcacttactgtaacattttcaaggttcatccatgttgtatcatacatcaatacttcattctttttattgttgaataacattccatgatttgggtatattaccttttatatccatgcttatccatttatcagtttgatgtatatttgggttgtttcacattttaactattatgaataatgcatctatgaatatttgtgtacaagttttcatttctctttggtgtatacctaagagtgaaattgctggatcacatggtaactctgtattccatagtttaatagaacattttaattgaaattcatcttgggccccaggatagaaaaaagccttgaccataaatctaagcttatgaattcataagcattattggattcttaataattaaaattcaaataaagtcttataactacatagaaatatttttcaaaatatcactaaaattcttgaatgtaatccttcttctcctatatttgtttaaattgagttctaggtattctattatactttttgttacgtcagacattcttttcatggaaagtgagggatatatttggatttatttttccctcccctgaagcttcttaagcatgctttggtaaacttcgtaaaaaagggctaaatgaaattgcatgcttaaaggnaaacttaaaaccaggaga

SEQ ID NO: 92895 - DNA, 641 bp, Homo Sapiens
atcagcagcgatgtgccgtggtgccaagtctctctcagccaggaacctacttcctgccgactagcagggagctgcggatgcccgtcgccctgcagtccctcatgcaggagagaggaagatgccaaagggccgtggaaacggcagcaaaggagggctacagatccgggaatccagccagtaccctgcttatcccagggccccactttctaccacctgggaagggacgatgaccttcagtttgcctccacaatcccagcacactcatggccatgacccattcatcacacaggtgacatacaggccgagcacttcacttcctgcaggtttacagcaagaacagaatcccatgagataatgtaagggggaaaggcgtcctggcctgaatgtctcctcccctcagccatagggattggctctgggagagacacgtgagccaagcacggccaatcagagtgggccctggacattttgctgcaatttctgacggaaacagatgggtggtaaggcagggggactgctgaggacttctttgccacctgagggtgagcagaggtggggcaggaggaaggggccgagaattaagttaaacctgagaaaggcagagtctggaaataaagaggggtaaattcctgatgagaaaa

SEQ ID NO: 92896 - DNA, 764 bp, Homo Sapiens
  misc_feature (14)..(14): n is a, c, g, or t
  misc_feature (229)..(229): n is a, c, g, or t
  misc_feature (242)..(242): n is a, c, g, or t
  misc_feature (245)..(245): n is a, c, g, or t
  misc_feature (257)..(257): n is a, c, g, or t
tgccccctcccctnctggataagggaggcctcaggggcaggcgtggcctctgcctcacctggctcacaacttgattcctcctacatgtgttgagggtggggctcagcttttgagtttgtcattaaaagcttgagggcacaattgttggggatgactgtatttccttcgtgtctagtctctctttctctaggcctggatttcctcaagcgtagaaggtgcgtaatacggnagtggcctcaggnggncctcagacctgncacacagtggcagagagttgtgctatgggatggtgacccctttttctactcccttccctgagtctaggagaatgccaccatttggggctagcttctctccaacactattaagaacctgccaacctccctttttaacaaagatcaggtcttgggccaccatgagtaggcagtcaaaagtcattggctagcatgcaaaaacattttttgatttttaaaatattattactggcaattattgcatcaatcctgatttcctatttataagaaatagaaaatgtatgttttaatacatttatgtaagttcagtttatggagagctctgcgataagttatggcaccaacagcaaccagtcatgacagcagttgccaagaggggacaggcgcagtggctcacaacagtaatcccagcaatttgggaggcccagcacttggggaagcccaggagttcaagtccagcctgggaaacatgacaaaatcctgtctctattaaagaataaaaaaaagaaa

SEQ ID NO: 92897 - DNA, 701 bp, Homo Sapiens
atctgattctctcaggggaagagctttgatatttttctgaagatatgtcacctgtgaatgaatactcaggaccttgggggtctcaccttcactttattccctggaatgtttccctggaaaattaactgtgactagcatacaggattatataagaccatggcagaggacacagccacttggtcattacagcccacagatcctctctccatgtcacatggccactgccaacagatgtccgaggagtaaaattggcaattcaggacagtctttcctaccctcttcaatgcctctttcagcaatataaagctaaaaccagatactgaatcaagtttgtccttgagtgagaatagatgagagaaaatgtggagctcctgacatagtagcagaggaaaaatgatcactaccacagtgtgctactctgatgcttcaaaaagatcaagacataatgctaaagcctgatcaaaaggcccctattacttgcctgacgctattcttggagcaacaagtacttagtgccaggcatcttgaaacgtcagtgtgcagttatctaatcatattgatattctgatggtgagtaacatgttatataatctttctgtgcctttcttgatggggtcagattctataccacacaagtcacagaattccaaaaagctattgtgagaataaagcctaaaggcaacaaaaggatgagtcactaa

SEQ ID NO: 92898 - DNA, 727 bp, Homo Sapiens
tgctcctcccgatgacggcaaatagtgcagcaaagagcaccacgcagttccccacgaactccactccgatgctcagccacctatgggggatcagatgaggaggaaatggggcaggggcagggcagggccagttttctgcttaggggaaaggagggacaaggaccctgaacaccagagagcctgctgggaattcctggaggagcagggagcgagggaggcggcttctgaccggttggagatgatgtaggggtagcagcttctctggttggcatccaccttagtatcactgacgatctcaaaatcccggctgcggttgtaggcccggatgacactggcaccagtcactgtctccgaaaagtgggagtagataggtgagcggctgactgattccagccgcttcagttgccgtgatgtggctgcatagaagcgctgcactaaggtgtagagcacagccaggggcaggatgaccacagtgaagagcggcgtgctggccatgatgaccacaagagtggagatggcgttgaagaaggaattgagcagcatgaggatgacaggggccagaacctcatcaacgacatagatgtccttggagaagcagttcaggatgcggcctgatggtgtggtgtcaaagaaggactgtggcgagcgtatcttgttgtgcagcagtgcctggtgcgacacacgggcagcctggatgccacccgctgccatggccatggctgccagc

SEQ ID NO: 92899 - DNA, 1008 bp, Homo Sapiens
  misc_feature (83)..(117): n is a, c, g, or t
  misc_feature (945)..(945): n is a, c, g, or t
aagaatgtatagatcactatagggcgctactcgttgtagcgaacgacgagcgcagcgaagtcagtgagcgaggaagcggccgnnnnnnnnnnnnnnnnnnnnnnnnnnnnnnnnnnncagtcgacggtaccggacatatgcccgggaattcggccattacggccgggggggatggaacccatgtgctaaacataaaattcatttatgttttatatacaccttatatacatagcccaaaggtaattttgtacaatattttaagtaatttgtacatgaaataaagttttggctgcaacccgatgcatgaggtcagttgtggaatttacttgtggcatcatgttgatgctcagagtttcagagtttggagaattttagatgtcagatttttggattggggtgctccaaactatgtattctgatcacatgccttggcttcctttactgaagcatcattttcctctatacacagcattcctgaagaattcatcagttctgactgatgtctttctgcctttttgccagagggcttaagatagcagacattgtaggccataaggtaatagatttacctcctttagtagcgataccatcactatgcttaaagttgggacaggggaaatccaagccatgggagaccgatagcaaatagaaggggaagaagtagtgaagtgtacatttatttgatcctgcatgtatattattttttggtgagaggattttcataggaaatgatattaattgttttagagattatctttaccagccatttgttttactgaggggccacaatgaataagtggaccttaaggtcacattagcccagttaaccagtagaagccaggatcattataaagaattcctaacttcacatcaaatattattcttactattagaaggttttcattaaaaaatttaccataagtgatagatcccccttagaaaagnttgataatttccatacagcccagtaattcctctcttagaatccacccaagaaaaatgaaagca

SEQ ID NO: 92900 - DNA, 388 bp, Homo Sapiens
ctcatgagagacccctgtccagaagaacacaattaagctcctgaattcctgacccacagaagagctgtgagatactaaatgcctattgttgttttaagccactaaattttgaggtaatttattatgtggtaatagataactaagacatgaatatacactaaccctaaaataatctcaaaatcccttcatgttgtccaggtagtaccattaaatgtgacctgcatgttctcataagtgtatgtggtaagaaatgttccatgcatttatttacatgtgtctctagaaaaatattctacagggaaacaattcttctattcctcaatggatccaggtagggcccaccaacactttcatttattctggtggccaggcaagtgcaatggtccat

SEQ ID NO: 92901 - DNA, 450 bp, Homo Sapiens
ctaaattagacgagaataaatgtaaaagaacagaggacgtttaaggatgtgagatacgcataattacgaaaatgaccatagtgaactatgaatctggaaagcagaaagggttgaattgctgaagagttcatctgcaaggtgaagatgattaggatatcttgcaaaatgtagtaataaagtgctttgaatagggaatgatttagttaaatttgtcttttaggatcagttggaagagttagattaaatgcaagaagggcaattaaattaaaaagaactgaattagtacatgggaaaggtcagaaaaaggacctagatgtgacagtttactgcatatagataatacttagagccataagatgatcagttggagttcaaagtgattggcttaatcttgagccacatccacatttaagggttgtgaagaagtggagccatctgggaagattgaaa

SEQ ID NO: 92902 - DNA, 838 bp, Homo Sapiens
ttaaagagaaaaagtaaacttctaacatataaaataacggatttcaagagcgatagtccatttttctttttacaaaatcacagcccttgatttttcgtaaactttaagtttcagaataatttggtcaagagtatttctacaggaataggaagagaatcaagtgggcctataatcaaagacctagttgggtctcaccctcacggttagctactgggacttcgtagctgatgaccaggtcctaaagtggacagaacaagtgttactggaggtccgtctttgtggtagctacagaaaacttggaaatgcaattctgaggtttattcagggttattaagagcatgagaatagctgccctgcaaaggcaggtacactaaggtttgcagtatggagtagtaagcaaagcctctacttcccaggccccgcacccggggtgtggaacagacaaaagaacggttctgcccttgcccttctcgaacttaaaatccaattcgcaaggcaggacttacacaaattaaaccaaatacggtattatgaggaaaagagccgctgcgtgtaacagttgccaatgtatgctataccagtcaaaactgaaatacgatttgaaggagttttaaacgaagagctggagaaacacataagaaggcagatctaagatggaagaaaaggcggattcgggttgaaacgccaagttgaggactgaagaaagcatttggataaagcagcctccaagctgggaaggagaaaagccaaacgagtatagccaccaaagacccagaaaggccaatatatcatgcagtgagtcggttgaactgaaaggcggtttccttttcctccattt

SEQ ID NO: 92903 - DNA, 878 bp, Homo Sapiens
  misc_feature (320)..(338): n is a, c, g, or t
ctggactctggttatagttacctgggtgcctttggttcagtgtctctaagaatgctgtgatcaagatgttggctaggactgtttctggtctgaaggcttgatttgggaaggatctggttctaagagctctctcaagattgttgacaggactgagttccttgtgagctatgttggattgaagacttcagttccttgctggctagagactggaggcttctctcatttctttgctacttggcctctgtccattcacaagacagctgatttctttcaaagtgaaagagaaagcatgcaagctcaagtctaagacagaagctacnnnnnnnnnnnnnnnnnnnagtaatctccaaagtgacatcccatcacctgtatcatattctgttccttagaagctagggactaaatccaagcatactgcaggataagaggatgcaaggttgtgagtaccaggaggcagggatcattggaggcctttggttttggggtcaaggaggtgctaatatctatagttctcccactaccatctaacttgccaaaattatttcttctcctggattagtttattatcaaattggcaggcttttatgaggattaaatgaagtcatagatttatgtaaaatgtttgacatacaatacgctcacatacagatagctattgttttgaaaaaatagaaatcaaatggccactgagcccagataagctctctcaaaacttagatataatagacttactacacatttctaaatctcgacattctgcgaatccattttaatacctgacttgagagtactgacagtctaagaattttgaaactactgatgtacttacataatttataattgctttagaggcttgataagacattcagatcttccta

SEQ ID NO: 92904 - DNA, 766 bp, Homo Sapiens
  misc_feature (20)..(20): n is a, c, g, or t
  misc_feature (32)..(32): n is a, c, g, or t
  misc_feature (110)..(110): n is a, c, g, or t
  misc_feature (135)..(135): n is a, c, g, or t
  misc_feature (139)..(139): n is a, c, g, or t
  misc_feature (143)..(143): n is a, c, g, or t
  misc_feature (146)..(146): n is a, c, g, or t
  misc_feature (155)..(156): n is a, c, g, or t
  misc_feature (166)..(223): n is a, c, g, or t
  misc_feature (230)..(230): n is a, c, g, or t
  misc_feature (264)..(264): n is a, c, g, or t
  misc_feature (338)..(338): n is a, c, g, or t
  misc_feature (379)..(379): n is a, c, g, or t
  misc_feature (417)..(417): n is a, c, g, or t
  misc_feature (420)..(420): n is a, c, g, or t
  misc_feature (477)..(477): n is a, c, g, or t
acttctctgaatcccactgnacatcttagagnggaggaaaactgggcagaaacaaaacaagaacaaaacaagaattatacagacataccatgtttttaactctgcactangacagaagggaatctgtggggtagnttancagnctngcaactgannagaagctcannnnnnnnnnnnnnnnnnnnnnnnnnnnnnnnnnnnnnnnnnnnnnnnnnnnnnnnnncttgtgntatatggagctgcacctctggacgaagaaggctntcttctagctgagatcatttttctaaccctaaatagacactatccttccagaaatatgcggtgcattaaaaaangaagcttgtacaaaaaaatacttctctcattttacaaacanaaaatgaaactgttcaaagcttcccttgctgttttagngcnaattctgtaagaaggaaaaaggaataaaggaatatgaaaaagaaaaggcagatgaancaacagcagaaaagttttgctatggagcacatgaagatattaaccagaatctcttccaagaattcaaaggatgtaatgaaaaagtgttctctataaaatgtgagtgcaatgcagagatacaggggttcatggaataaatgaaaagacaacaaaaggaaatgaaaaagtaagctggcagagctcaaaaaagaagtggaaatgaaaattgaacctcacatcatataaatgaaggccacattgggagcaggtaaagggaaggacagaatctgctgatagtacagccaggata

SEQ ID NO: 92905 - DNA, 622 bp, Homo Sapiens
aaatcctccgtgaaagctctgttgtgctaaaactatggataagagcaaaatcgaccagaagcagagaaaagttgagaagctctggcacagaaaattgaagaattcttagaagcccactcaactgatgaatttaaagatgtttctgcaacagaaccacattgaagagctccctttatcatttttgtaaggcaagcctgatgatgatgaactccctgagcttttgtcagagaaagtatcactccttcatttttgtagaccaacttttctggaaactgctcattcaatgactaatcgatttaatgccatgttgaaagtatttgaaaaccaggcaaatatgttggagaggaggaaaaaaaagcctatttaatgaactcagaaaaaatgaagacaaaagaaacataaaatgaacatatggccttttccatgatacatgctgttattttacctgtcttctattactcatgtgctattcatctttcttccagatttgcatatttctccatttatacatagggaattgggaacttttagaagtttttccctgtctctgatggattggacaatgtttgcaattctaggagacatctgattattctttcaaaataaatttatcagaaggaaa

SEQ ID NO: 92906 - DNA, 1043 bp, Homo Sapiens
  misc_feature (716)..(725): n is a, c, g, or t
  misc_feature (926)..(987): n is a, c, g, or t
ttttaagaatccactcaaacaaagtaaccatatggtttattactataatacaaataatatacattaggatttgttagatttgtgtcccctagatccctgaaaaccttgaaggaccaagccttggaaactagcataaaaacagggacttggatagttctataaaggattgtggataatgattcaatttctactaaacaaaatacatacagcaggagataatatatcaaaatgcccaagtcattaactatcaaaggtgaccagaaaagtcttgttatatttgaattccagagtttttgactgatattataaatatggaagagattgctggtgccagaaaccgagtgagaaatgtgagtagatgcaataatgaaagcatatttctacaataagtagaagtgatactaacaaaaaaggaactgtctttccacagttgtcacactcataaggcttctcccattgagggttctctggtgtttgataagacctgagctgcgactgaagcccttgctgcattgttcattttgttagtgcacttctccttattgtaggaataaggtgaagcgcttacacaagtttgcagcagaatagtcattccgaaatacttttgtagaaacaactccactgaatgtatacataataaatactacttgtataatgctgactaaaaattttctcacttgaatacacagactaaaattttgactatcatgatgggnnnnnnnnnngatggtctacacagtatgtttaacaaaaaagtagatagcctgaggaattaaattaatggttcaaaccgtcatcatgaaaaattgagatgctgttaccacacgtgatttgggaatcaatgtataagaagaccaagacagtcagacactaataatggcgttctgaaaccataagtgatacttgggccgggcgcggtggctcannnnnnnnnnnnnnnnnnnnnnnnnnnnnnnnnnnnnnnnnnnnnnnnnnnnnnnnnnnnnnagcatcctggctaacacagtgaaacctcgtctcatcattctcaacaaactatcgcc

SEQ ID NO: 92907 - DNA, 649 bp, Homo Sapiens
ccctttcacttcttggttgtcagctgagttcaagttgttggagatcatgactttccaggtaagtcgggtgttaccgaagaatgggactgataaaagatattttctgaggctgttatttgtattgtaggttgtcttaccatcagcgtatattagatattgttcctcctaccttctcagctctgtgtcctgcaaacccaacctgcatttacaagtatggagatgaaagtagcagtaagtaatgaaactaatccctctgtctttaaaaggtaccagttcaagtatatctgaagttagttgtttaaagtggagaaattgaactttttcttttcttggggtttatatttcctgtatttgaaaggtggtctatcattagccactgttttatttgccctgtcatcattttgaggatttggttgtgataaaattaattactactggcttatcattttttctcttttgaatgtgttaagtatagcaagatgaatttatagttagaacttactaaactgaaaacgtgtatttgtcatggtgatggaggttacttgaattcattatcttgttcaggtgtggtattgagaacatagatgcacatatttgtggcagtatgcctttaaaagtaaattctctaattacgattttcttacctttt

SEQ ID NO: 92908 - DNA, 816 bp, Homo Sapiens
  misc_feature (302)..(311): n is a, c, g, or t
  misc_feature (672)..(673): n is a, c, g, or t
  misc_feature (745)..(745): n is a, c, g, or t
ggaagagggaagggtatgggatgtagtattgctaggttcctttccctgcaacttcaggttggttacatcacttgctgagttgtatgacggccacctaggaggcagttcaaacaaggacagcaaaagaatacagactaagaagaaagagaggaaagtcttaccagttaacatcaggagctgaactgaaattgaaatgaaatgcaactggacatgtttagactcattttctttcatttacagggtaagatttgagttaatgatacttttgttttgtcgttggtagtaggcttgatcctgggtgnnnnnnnnnnggcgggagggtgttgggggaaaaagagaaatcctccatcctgttaatggcttagaagtgcattttactgagtctttcttcataaaaacgatattctgaatgttggtgacattccttggccaatccacataaagacagtcttataaaaatcttaatttatctttgtacattttcatattatagctactgtcttaggtttattgaaataggtacataagaatggtataaaatgtcataatctctaggttagtctcaaaaatctcattacttcgttttcgttctcaaccaaagcaagcatatttttctggacagtttatggtaatgagccaaaatggtgcccagcaacttccttgggacagaannatcaaactctaatacaaagtatgaagtttcgagaagggagatagtctttaaaagaaaattgtttcaggtggnaagaaataagtcaaagaggagcattttataaaacaaaggcattaccttgagatgtggggccattaaaaaga

SEQ ID NO: 92909 - DNA, 810 bp, Homo Sapiens
taggaaggaattcatggcctgtggataccttagctctgagtcctgccgcctaggatcccacgggtctacgcgaggaagaggccggggagcgcggaccgggtgtgggagctcgaggtgacagcagctgagggccgggtgccggatggggaagtgagacaagcaccgtgtgggtattactcattccgctctactaacgaggcctgctggcaagcggaacttctagcctctctttcaatccagctgaagttcaatctcattgaagtcacttcccatcccggttcgcttggggggaaaccaggcgtccctggaagggaagggaagggagtccggcctgcagcgggtcaggtagcctctctccggtcgccgcgtgtcctcgccgtccccaaacctgcccttcccctcatcaagggaactccccggggagtccagaccgcgatcccgtttccttggccccggggtacgggggccggacacgcgaggcgtgggactgatggtagccctgcctccaggaagcaggccaggcaggggacactctcgggcgctcggaggggcagctccgagggcacagggtacagggagaatcagccagatccctccctgccccgggcagccgcggcgggtgtggccagcgcggaggcaggacgtccgcacgagccatccaactgttacctttccaactccgacagcccgtcgcctttctgaccgcgtccctgacggtttcccggcatccgcctccctctccccagccagcacctgaggaaagacttttccctcgcccctcaattccaaattcagcagtgcccatacgac

SEQ ID NO: 92910 - DNA, 573 bp, Homo Sapiens
tctcactgcacttggcaatgaaaagcaaagtgatactccaaaccctccagctgtacctcttcaggtagactcgactcctaaaatgaaaatggaaattggtgataccttatctactgcagaagaatcttccccaccaaagtcaagggtggaattgggcaaaattcattttaagaaacatctgcttcatgtaacatccaggccactgctggctactaccacagcagtagcatctccacctactcatgcagcaccattaccagcagtgatagcagaatcaacaactgtagactcaccgccctcatctccgcctccaccgcctccacctgcccaagccacaacactctcatcaccagcaccagtaacagagccagtggccttgccacatacaccaataacagttctaatggcagcaccagtacccttaccagtagatgtagcagttagatctctgaaagaaccaccaattataattgtaccagaatctttagaagcagatactaagcaggacactatatctaatagtttagaagaacacgtaactcaaatattgaatgagcaagcagatatttcctc

SEQ ID NO: 92911 - DNA, 473 bp, Homo Sapiens
aacagcaaacaaaaaaatcagtatgaggaaaagaagcaaaatttccagttcctagagatcctcacctcctctggattttcacatcctccagctggtccagcatgagctctggaggctaaggaaaggcaatgcagtagcagaaacaagctgggctggcatttctgtgcagtttgttcagcacgctgaatgggaagcgcagggtaacagtgagagcacgaatcaaagtttatcacctgtggggtttcagctcctgtatcactgggttaggttttgagaatgctgaggtgaagatgacatggagcctgccttcaaatagatcacactttagcagaggagatagtgtgacttgtagacagctgcatccctagagttactttagagagccctgtcgttcccaagaagagagatttgtctgcacagccagcctctgggtgaagtaaaaatgcaaaataaataaatgccttcttctaaaa

SEQ ID NO: 92912 - DNA, 680 bp, Homo Sapiens
ttgcttgaattcctgagtgattcagattccagtgagattgagggtcattcataacagttacaaggctggtgtggtaaagggagaacaaaaataaactgggtttctgcaggtaagtgagaagacaaaatgaagaggaataaggttgtaaggcagtatgattaggcttgtgggtgctatgccttctgataataattatgaacagaaatagaagccaaaaagtaaacaacatgtaagttgtcaatctttgacagttgaggcagggagaaggaaggaaggatgacattacaccttatctctggtttactaggctggtgtgtgagaccatttgggtgaaatcgtattgaaatcattcattgctgaggtgatcagctttcttgcggtcctttctctgcactctattcaatgataaactccactggtttatacctcctggaaaacagttattcagaaacattataggggtagcattggtgagacagccaatggagaacatgtttccaggtagcctgaaacccagcagacaatgtagctgttgcctaacgaacacagaaatctacattgtatgccaggttcatgccccagacctggatgttcagcttgcaagtaattctcacatactatttcaacacaactgcctactgcattcaagatttcaaaattggcatttgtcttttctacca

SEQ ID NO: 92913 - DNA, 426 bp, Homo Sapiens
cttgtccaacaggatgctgaggcggcgctcctgcccggtggtggtgtcaaaagcatagaagatctcctcttggtgggtgttcagtgagtgtaaggcatagagcaccccacaggccatgaaggcccctgacagggctggcttgtactggctggtacgccaggttttctccacttctagggtgctagcgttgagacgactcacaaccaggttgcccttgctctcctcagtggcatagagaacccacagccccttctcatcaccagcaaaatctaagtccttccagggcacaccagcataggaaaagcggttgttataggtggcaccaggcagcagacgccacagcaccagtgtgttggaggaaaggtccattttggccatgtcacttgtgccacagtagttaaagtacataaaattcttgtacacaaa

SEQ ID NO: 92914 - DNA, 358 bp, Homo Sapiens
tttacatgattttggaaaactacccagatggtgtcaagaacatgaatgccttactcataatgattccaactcccacccaacctcttcctgtattggataagtggacccaaaggctctgtcggctttcatctctgagactttgttagaacccaagaccccatggttcgaccttccctgctcccctgcagcccctgtctgccctaatgatctctccacaggccttcagaacaacctgtcccccaagacaaagggcactcctgtgcacctgggcaccatcgtgggcatcgtgctggcagtcctcctcgtggcggccatcatcctggctggaatttacatcaatggccacccaacaaccaaa

SEQ ID NO: 92915 - DNA, 611 bp, Homo Sapiens
ttatacgactcactatagggaatttggccctcgaggccaagaattggcacgaggcacgcacgagctccaggggatggcaccctctgaccaggcagaggtggatcacctactcaggatattcttcgcaagtaaagtacaagaagataaggggagaaaagaattggaaaagagcctggaatactcaacagtgcctacacctctacctccagtaccaccaccaccaccccctccacctcctaccaaaaaaaaggggcaaaagccagggaggaaggatactattacagagaaacctattgcgcctgcagagcctgttgagcctgtactcagtggcagtatggccataggggccgtgtcactagctgttgccaaagcctgtgccatgctgcttaataaacctctgtacttaaatatcgctctactgaagcacaatcaggaacagccaacaacgctatctatgcctttgctgatggtatcgctggtcagctgtgggaagtcatcatctggatgagaaaatttaatgaaagaagtgatttgtataccccatcctgaattaacaaccaaacaagtaccttacattatcttaaattaccttttgtaaaaaaccatccaaa

SEQ ID NO: 92916 - DNA, 801 bp, Homo Sapiens
  misc_feature (737)..(737): n is a, c, g, or t
ggtggaagagccttatttgaaatacactttgatttattttcttaaatatttatattcttttcttgcttacttcagggttggtagcttagttggaagtgccagcacctggcacctattcatatagaacaggctgtactcaagacaacttctagcatttactttaagacttatataatttatttctattttgtgtgtactatagtcttgtgcatatgtagttgaacacacagtgaaatatatgtctctctttgtggatgtgcggcctaaaaatttgaatgtctggtgagagagagccatgtgtataggtcagagaaaagaacagctcccgactccctattagcgcctgtgatttgtttccttttgtgtttatctggcctagcgtgctgtttctttaaaccaggaagaagttttgtcttttggaggctcttctcacctgtccagcctggcatgtcagagaacacatagcctgtgacaatgccgtttttaaaggtttacttaatttgcagtaaatccagctgcctcaagaactcctacaccaagatggacatttcctttccagaaatgggatcaagtatctgctcactttggtattggatggactaataatgtagctccaaaaatgcaaggatggaagaatatgtgtaatccaaaccaaggaaggaaatgaaaagtgaacgtactgtttttaccacccctttctggttgcttattggtggttgcttcacggtgcataaagntgttttcaatgccacgctttgttaataaatattgtgaactattttgtaaaggaaatgtattatg

SEQ ID NO: 92917 - DNA, 636 bp, Homo Sapiens
cagagctggaattttgaacttcaatatcctaacctccagttcagagctcagaatcaccacaccttgctgagtgcttggagaaagagtaactggggaactcatgccccatagaccaggaacactgggatttgatctcctccaagtgtatttattcccatgagctccactgagtgaccatacttaaagactgcaggaagaagggtgcgacttgtttaatagctgttgaatgtaaaacagttctcttgctaaaacctttggcctcctccagtgactgctctctaaatactccattttctgagagtgagaatagttaatgctcaaagatgctaaacaacagctgcagtctgcatcttctctctagagttgctgctcagcattgaatccagcctctaggctggaactcaagtaacctcgctgctttgaaaggtagctctggggaatattaaaaagtcaccaaacctcctgggactcatatgcagagacactttgtatatggaagcaaacaggatgaaaaaggctgcacagagcatgccatgcttctgacacattgtgggctccaatgtatggtctctgactgctatggtttcatctgagaggaaagcaaagaagagaaataaatgtttgttgagtgaaaaa

SEQ ID NO: 92918 - DNA, 791 bp, Homo Sapiens
agccgcgcgcaccatggccgatgaaccccagcttggagaaccaccgcatcaagagcttcaagaacaagggccgcgatgtggaaacaatgcgaagacatagaaatgaagtgacagtggaactgcggaagaacaaaagagatgaacacttattgaaaaagagaaatgttccccaagaagaaagtctagaagattcagatgttgatgctgattttaaagcacaaaatgtaaccctagaagctatattgcagaatgccacaagtgataacccagtggtccaattgagtgctgtccaggcagcaagaaaactgttatccagtgacagaaatccaccgattgatgacttaataaaatctgggattttaccaattctagtcaaatgtctagaaagggatgataatccttcattacagtttgaagctgcttgggcattaactaacatagcatcaggaacttctgcacagactcaagctgttgtgcagtctaatgcagtacctctttttctgagacttcttcgttcaccacatcagaatgtttgtgaacaagcagtatgggctttgggacaacattataggtgatggtcctcaactgtagagattatgtcatattcactggcgagtcgtcaaacctcttctgtccttcatcagtccctccatccccatcaccttccttcggaacgtcacatgggtccattgtcaatctctgcaggactaaggatcccccaccgcctatggcagaccagttcaggagattttgccagccttatgtgtcctcatatacatacagatataaac

SEQ ID NO: 92919 - DNA, 742 bp, Homo Sapiens
  misc_feature (507)..(612): n is a, c, g, or t
ggagaacctggctgcacagtccctttgacgatagtccaccggccacccaggcctgtctggggacatgtaggatgggctcttaccccagggaggacggcaggctccacttcggcgagaggttcgtccatgcagaggtgggcaagaactggggtctccgacaggtgtggctatttctttgagttctctggcactgtcaaaagcagccaacccaccccccagtccacatggtcaccactgctgctaccagctgctcagtgcagtggccactgtgtctcctaaggtgctcgcttcagtcagcacttcatctcaggcaaccacaggtgacagttaaacatgatgaaaccgcatgctatggctttctagtgtctcatattctgttggcaagaagctcagcactgcattcctgaccgaggtcagaaccagatcaatctcagaatctcacctgtgtaggtctgtttcatgggacttttcttttctgggggagggggcagggtttcactctgtcannnnnnnnnnnnnnnnnnnnnnnnnnnnnnnnnnnnnnnnnnnnnnnnnnnnnnnnnnnnnnnnnnnnnnnnnnnnnnnnnnnnnnnnnnnnnnnnnnnnnnnnnntgcgtcactacacctggctaattttaaaatttttgtaaggacagtgtctcaccatgttgcctaggcgggtctcaaaactcctgggctcaagtgatcctcctgcctcagctcccaaagcgtgggattatag

SEQ ID NO: 92920 - DNA, 415 bp, Homo Sapiens
tgaatactgacaatggatgacatgttcaaatagttttcttcgttattcctccatagatcagagattacttgattttaaaaaacaaaatgctagtgaaaaacaatcacctttcagacaagatcattgttttgccaggaaaaactgaagacgtctcacttcctgaggctgtagatgtgatcatttccgaaccaatgggatacatgctgttcaatgaacggatgctagagagttatcttcattccaaaaaatggctaaaatcaaatggaatgatgttcccgacattcagcgacatccacttggcccctttttctgatgaacagctctacgtggaacacttctccagagccaatttttggtaatgttcttttctcctcccttcctttcccttcaaagtaaaccagtttttaaaactaaa

SEQ ID NO: 92921 - DNA, 535 bp, Homo Sapiens
ataagatagcttctcagctttcagctttacttcacggttttaactatcaaaagaagcaagccatctgaagatttgcctgagactgaaggatccacttctgcgacgactccctcaggacttataatgcagatggaaccagattgagaaaaaccagccaaccaaccaaccaacatgatggctgaaccagacaagagaagtcccgaagtaaaatacccaccaattaccagaatctgtgcctgccatacatcgaagtctctgacttctttattccacatgactctgcaaatctacgtctgaacttatattctcctgaaaccagaacggatgaaactcattagatgctccagcctgggggattaatgtttaccttgatttaatgtctcatcagaagcatgacatccacagcactctggctgcagcaggattaaatgaagcatggccgtttcttcaagagagacttaaacttcaagcctttagccctagagggaatgggcaggagatgaagagagagtaaaaatctattgaactaccaaaa

SEQ ID NO: 92922 - DNA, 725 bp, Homo Sapiens
ataaaatttatttaatttcaactgaacaaaacccagactgtaggcaactgcagtaagtggaacagtatttgactatcgcaatgaagtctgtcatgaaaactatgagtacgtggagccattttgaaatccgcaaaatcgagaagttctgccgccagtatagggtcacttggtgaaaggcaagggatgtcctccaggatacactgttctaataagatgcagggaagagggggatttcatcttccaaagagttgtcactgggaatttacaaaggcccctggaaataagctcagggtatccactaaaggaggtggagccccctttcacacacttttccttcctcttccttccttcctgcacgccctatttccctcacttccagtctcaggttctttaaaaaacataaaattatataaataagtagaatagtattcttgggcttgtaacatatacagaggtagtaagtataacaataatagcacaaaaacaagtgaagaggacctagagctataaagaagaaatgtgtttctatctcactggacataagttagtataaacttaagtagattctgataaactgagaaggagattgtgagccatcaagcattcattaaggaaatatgtaaaaatatagttaaaaataatttaagaaattaagttgttaaactagaaaataatgcaaaagaaagcaaagaagaagaagcaaagccacaaaaacacgagacata

SEQ ID NO: 92923 - DNA, 2139 bp, Homo Sapiens
  misc_feature (1468)..(1526): n is a, c, g, or t
  misc_feature (1841)..(1841): n is a, c, g, or t
tagcgaggcctgggtggcgaattcggcacgaggccgaggaggctcgcgcgcgtgcatcccgcaccatcccccggccccgggccctggccggcgtcagaccgagctgccgccgccaccaccgcagcagcagcagtcggggagccaggcccagccagggccgcgggaggcgggggcgcccgggccctggatgtcccgcagcgcggcggccagcggcggaccccggaggcctgagcggcacctgcccccagccccctgtggggccccggggcccccagaaacctgcaggacggagccagacggggcgggcaccatgaacaagttacggcagagcctgcggcggaggaagccagcctacgtgcccgaggcgtcgcgcccgcaccagtggcaggcagacgaggacgcggtgcggaagggcacgtgcagcttcccggtcaggtacctgggtcacgtggaggtagaggagtcccggggaatgcacgtgtgtgaagatgcggtgaagaagctgaaggcgatgggccgaaagtacgtgaagtctgtcctgtgggtgtcagccgatgggctccgagtggtggacgacaaaaccaaggatcttctggtcgaccagaccatcgaaaaggtctccttttgtgctcctgaccgcaacctggacaaggctttctcctatatctgccgtgacggaactacccgccgctggatctgccactgttttctggcactgaaggactccggcgagaggctgagccacgctgtgggctgtgcttttgccgcctgcctggagcgaaaacagcgacgggagaaggaatgtggggtcacggccgccttcgatgccagccgcaccagcttcgcccgcgagggctccttccgcctgtctgggggtgggcggcctgctgagcgagaggccccggacaagaagaaagcagaggcagcagctgcccccactgtggctcctggccctgcccagcctgggcacgtgtccccgacaccagccaacacatcccctggtgagaagggtgaggcaggcacccctgtggctgcaggcaccactgcagacgccatccccccgcgccatgcacccctggagcagctggttcgccagggctcctttccgtgggttcccagcactcagccagaagaactcgcctttcaaacggcagctgagcctacggctgaatgagctgccatccacgctgcagcgccgcactgacttccaggtgaagggcacagtgcctgagatggagcctcctggtgccggcgacagtgacagcatcaacgctctgtgcacacagatcagttcatcttttgccagtgctggagcgccagcaccagggccaccacctgacacaacaggcacttctgcctggggtgagccctccgtgccccctgcagctgccttccagcctgggcacaagcggacaccttcagaggctgagcgatggctggaggaggtgtccacaggtggccaaggccnnnnnnnnnnnnnnnnnnnnnnnnnnnnnnnnnnnnnnnnnnnnnnnnnnnnnnnnnnnctcagtggccccagtgcccaccatgcctcctgccctgcagcctttccccgcccccgtggggccctttgacgctgcacctgcccaagtggccgtgttcctgccacccccacacatgcagcccccttttgtgcccgcctacccgggcttgggctacccaccgatgccccgggtgcccgtggtgggcatcacaccctcacagatggtggcaaacgccttctgctcagccgcccagctccagcctcagcctgccactctgcttgggaaagctggggccttcccgccccctgccatacccagtgcccctgggagccaggnccgccctcgccccatggggccccctggccccctgagccagcgcctgccccagctccagagttggacccccttttgagcccagtgggcggcattagaaggcaaagccactgtagagaaaccctccaaccccttttctggcgacctgcaaaagacattcgagattgaactgtagtccgagccgccccacccactccatcatctccaggtgccccacgcctgggggtggaggcacaacctctcccctaaccctgctccctggggctgcgcccctcaacaccctctcaacaccccccagacg

SEQ ID NO: 92924 - DNA, 751 bp, Homo Sapiens
cccattcagataacccactaagatgtgacatttgttgtgtcacctttcgaacacatcgaggactgctgcgtcacaacgcgcttgtccacaaacaacttcccagggatgcaatgggcagacctttcatacagaacaacccttcaattcctgctggcttccacgacttaggattcacggacttctcctgtaggaagtttcctcgcatttctcaggcctggtgcgaaacaaacctgcggaggtgcatcagcgagcaacaccgttttgtctgcgacacctgtgacaaggcgttccccatgctctgctcactggctctgcacaagcagacccatgtggcggcagaccagggtcaagaaaagccgcaggccacgcccctgcctggtgacgccctggaccagaagggcttcctggccttgcttggcctgcagcacaccaaagacgtcaggcctgcccccgccgaggagcccctgccggatgacaaccaggcaattcagctccagacactcaagtgtcagctacctcaggaccccggctgcaccaacctgctgagcctgtcacctttcgaagctgcttccctaggcggttctctcacagttctccccgcgaccaaggacagcataaagcacctgtccctgcagcccttccagaagggcttcatcatccagccctgacagcagcattgtggtcaagcccatctctggcgagtcggccatcgagctggcagacatccagcaaattctgaagatggcagcct

SEQ ID NO: 92925 - DNA, 514 bp, Homo Sapiens
  misc_feature (87)..(121): n is a, c, g, or t
agcccctccccgacagaaagggaggccaaagctgggaagctccaagggcctggcaggccagctctggtaggtgactgcacggcagannnnnnnnnnnnnnnnnnnnnnnnnnnnnnnnnnntgaccaccgccacccgcaggctgctgaccctgaggctgctgctgggcgccctgctggtctggaccgctgcctacgtgtacgtggtgaaccccacacctttcgaggggctggtgccactcctgctgagccgtgccaccgtctggaagctccgggccctgctggaccccttcctgcgcctcaaagtggacggcttcctgcccttctagccaagagcccagcggccccagcaaggaggccaggcgaccagcactgccccggatgcccagtgccgtgccagccccctgcacatgggaccactgtgcaccatccttgccagaagctgcagagaagggtggaggtggggtctgtcctgagggctggcctgtggctggacatagagtcatgacataaaaa

SEQ ID NO: 92926 - DNA, 509 bp, Homo Sapiens
ttcccctgcgtacacctggcaggggaaggcataacgcagggccacggaggcgaacagcatctccacgcagatgatgaagttctggtagccggcggccagcgtgccagcccccagcttgttcccgccgctggtctccacctccgggatgaccccgcaccgctccaggatgcccagcagcagcccttgccagaacgacaagaagatgacggctttgatggtgaggaacttgaggacgggctggaagggccgcaggagctccctggtggtgaagtagaagaggaacagggcgtagagggcgaggctgacggaggcgttgtagatgagggtcacatagaggtagccgctgcggacactaggacagacgggggctgtggtcagggcggtcccatgacccctgacgggccctgggcctggggggcgccctgcagtgacacccctcgccctgggccagccgtgtgtcctcccagaagcccccttagtccctgggcggctactgttcttgcggccgc

SEQ ID NO: 92927 - DNA, 603 bp, Homo Sapiens
  misc_feature (39)..(39): n is a, c, g, or t
ttttttttaactgacttttaagaaggcccttgggccggncaccgtttacagaaactgagtaacttcgccaagtccatatgccttcataaatggtgtagttggggctgcaagccatgcctaactggccttggagaccagattgctctgatgtttgaaggaagcttccatggctgttccggggtgtggcaggcgacctcacaaaacttgttctacatgttggccaaagatctgctaatttcctacttaggcaacattgtacaatccagttctaacaatattcttctttcctcctggcaaagctaaccatacggtcggaggacttgaatgcccagtgacgtttggtgacaatctgaagccaccaaggggccacactctgagtcagaaaggacctcaggaaaggagttcaaacgcccaactgatgcaagaatccctctgcaacatccacgactgccagactcctgtttaaaactttctgacagcttcccacgctcacagggcaaagttcaaactccttgacgtgcttcaggaggccttgcgcagtctggcctctacttacatctccaattttgtttttaagtattcatcaatttgcttactaattcc

SEQ ID NO: 92928 - DNA, 520 bp, Homo Sapiens
ccccctttggggaaaaaattgtgtaataatatggagtggagagttgctccctgcagattcaaggggggggctgttggcgtgccgcccgcctgggatgctccaggagggagccctgggtggggcgagccccaagacgggtgtaggccccttccctctgcgccgccagcatggtactctctttcactctcctcaaaaaatggcttgtggatttggtactcaaagtggaaggggcaaaaagtaaaaggatgaggggtgagacacacatccggggaagatgggttttagtgcagaaccaacgtccgtccggggcccggctctctacgcggtccggcggcccttacctaccgcggcatgcctgctagtcgggcgtgggctctgcgggcagaggcggacagtgggtggaggtggagtggaggagggtcaggctacgtgttgctgttgaacaggaacctgtagcagaggtaagcgccggccgtgaggaccgtagccacgcacatgttgaccaggaagggcttccagt

SEQ ID NO: 92929 - DNA, 1456 bp, Homo Sapiens
  misc_feature (1285)..(1293): n is a, c, g, or t
actgattccctcggctggtgccagtgcctgctcctgccatggggcccgcggggagcctgctgggcagcggacagatgcagatcaccctgtggggaagtctggccgctgtcgccattttcttcgtcatcaccttcctcatcttcctgtgctctagttgtgacagggaaaagaagccgcgacagcatagtggggaccatgagaacctgatgaacgtgccttcagacaaggagatgttcagccgttcagttactagcctggcaacagatgctcctgccagcagtgagcagaatggggcactcaccaatggggacattctttcagaggacagtactctgacctgcatgcagcattacgaggaagtccagacatcggcctcggatctgctggattcccaggacagcacagggaaaccaaaatgtcatcagagtcgggagctgcccacaatccctcccgagagcgcagtggataccatgctcacggcgagaagtgtggacggggaccaggggctggggatggaagggccctatgaagtgctcaaggacagctcctcccaaaaaaacatggcggaggactgcctgcatgaaactgtgaaagagatcaaggaggtggctgcagcctgcacacctggagaaacgccacagtggcaaggcaaaatctacttctgcctcgaaagagctcccagggccccaacactgaacgcaaagctgaagctcgcttgaccatgccctcggtggcacacaacataaaaaaatgttcgccaaaagcgtcaaatggagaccacttatccctttggaaaattccttgctgcatcccaggaaagaaggaaggcccccttaccaaccttgtccccccgcgtttaacccctttcttgggaaccaagacatggtaaaaatccccttcaagggaacacaccgggaatgcggcgcggccaataatggcccgccaaaacccacacattttgtccctaccaccaacccaccggaacctctaggttggtgtaaaacccctaccgcgccgacataacgtaaatctcacacccccctccccttttggcttccgcctcacccacagttttcccccgccgcgccacccatatataatacctccccggattttgttttcggcgggcgaacaggaaaatgcagaatcctctccccgccccttacatgggagccctccatttttccgcgacaaaattaaaaaaccgccctgcgggtaacgccccccagacgcatcatataataattcaggcgggcgcacgcttccgaactacctcccagggggnnnnnnnnngaaatgacacccaacacctctacccaccccctccccactatttcatatggtgggtactaaacacaccacgaaaaggggccccttccccgcggactcggcgataggaaaagagggaaatccaaccaccgtcgccacacttcgtgttctcacacctcctccctcg

SEQ ID NO: 92930 - DNA, 694 bp, Homo Sapiens
aaaaaaaatgttcatgggataggtcattgataatggattccttattctgagaactccagacgactgaaatatatgagagaaggaaaaggacatagtaggagcaggcctgagaaaaaaatgaaagtcagaaatctttaaaaaaatacaagatcttatttctatcttattttttctcctcttctgaaatatatatgaggattcctctccaaacccatggtttctctaagaattttgagtcatttgtatgacctcaaataattagttttagctgacctcacataactccttacaataggagacatctttaatgtctgctattaaagaaggatgaaaattcctatgaccttctccccgattatccctttggcaatatagagtcaaataataacattgaccaatagtaaacatgctttgccaagaagtagaagatatattctctagccttagtttttcctcccaatttgcatttttgtaaaaataatgttgtatccacaaaggaaataaactttaaaaacccaagtgcactcattgactaggaggctgacgtaacttattttcattttcttctggttttcttataatctttgtttaaaataaggtgataaaccatcccagtttgtctgagtctgagggatttcctgggatacacgattttcaatggtaaaaccaagatagtcccaggcaaacaggatag

SEQ ID NO: 92931 - DNA, 359 bp, Homo Sapiens
  misc_feature (88)..(131): n is a, c, g, or t
cttaaagaactaaaaatagatgtaccatttgatccagtgatcccactactaagtatctacccagaggaaaagaagttattatactaannnnnnnnnnnnnnnnnnnnnnnnnnnnnnnnnnnnnnnnnnnntgcaaaaatatggaaccagcccaaatgcccatcaatcaatgagtggataaagaaaatgtgagggataaaagactacacattgggtacagtgtatactgcttgtgtgaagggtgcaccaaaatcccagaagtcaccactaaaggacttattcatgtaaccaaacaccacctgttccccaaaaacctattgaaatggaaaataaataaagtaggttctgttttcctggct

SEQ ID NO: 92932 - DNA, 334 bp, Homo Sapiens
gtgatacaagagacacagtggagaccgtccaatgagtagcatggctgccaggatgccaactgggacactaaagccctggcagtgggggactgcccagcagggctggccactagaaataagagatgcaaattcatcttctatcatagccaaagaagaccaacaaagaccaacagaggccatgtctcgcattcagatccaacagcaggcagtagatatgttacagagactaaaacccaccttattgccaagtgaccctcctctcaccagcctcaactgctgcaacccaaatacatgacactgaaatactcatcaaaatcaaacacagctgtaaaat

SEQ ID NO: 92933 - DNA, 439 bp, Homo Sapiens
atcatcaaatagttcagagcactgatcctcaagagttggacatttccccatgaaacagtagccttctgagttcttgcaaggaaatccattgaccctgaactggtccttaggacaggcaggcgagtggccagtgcacatctcaggaaaatcacattcatctttcgccggtctgcatatggaccctgctttttttatctgttgaggaaaaacaaagagactaaatcctggatacatttagggtcatactgcttccctgtactgaagtgtgatgtgagactattcaactgctgaagatctgattttaccttttgctcaagctgtccattatttcaggctgacttttattttttaatgtatcattaaataacatcaaaatggtaacttatgccctattttctcaaacaaaataaaaactcaaagaaaatggagtgtgaaaaaa

SEQ ID NO: 92934 - DNA, 118 bp, Homo Sapiens
attataacaaagggcctctcttccaaagtaagaaatcacatacgcttacgttttactattcaattcaatcctccctcccattgcacttatctaccttccccaagttgtttgtattaaa

SEQ ID NO: 92935 - DNA, 550 bp, Homo Sapiens
aggttaccttacctgaagaccatctctcccaagcactgtagttctgagcatgtttttggggtggactctgtcccctagggtccctagaagggcaaagaccagagagttgacaagtctgttattaggaataatccttagccatgtaatggagaaaggagcagtcagcattcttccaatttgccccaccaccacctcctcgggcttcattttctctatttagagatggcagagagtgaggtagtggcgagaaagctgactccattcatcagatccagtttatgagggttgggggtgagcaagggctgtctgcagaaacccccatcaagagctgctgaatgaagtgtcccttcccatcagtttgattcaattaaaatgcatcatttgacataaagcacttgttcacagatctccaaaaccaggaattgttctagtaaaactggaaatttgtatgagtggggggagttaaatctgttcagctgttattaaactgtcatttctcccgctaaatgaaaaccgtgttgttataaagcttaatgcaacctgaaaaaaa

SEQ ID NO: 92936 - DNA, 395 bp, Homo Sapiens
ttttaaaattgctttctgtcaaacccatctataattcccccagaatatatttatatggactaaggcttaccaaaaataaggaaaatcggagaaactgccaccgccaggaggagccaaggggacatgatgactaaatgtaatctggtttcatggaggggctacctagaaaaaagacattaagggaagactaaggaaacttgaataaagtatgggctctccttaataatagtgtaacaaattcattgtaacaaatgccccatactaacgtaagatgtgaataatcagggaaactggatgtgggacatatgggaactccactatcttcaaaatttttctgtaaatgtagaactgttctaaaacaataaagactataaaaaaataataaagactattag

SEQ ID NO: 92937 - DNA, 570 bp, Homo Sapiens
cagaagatgtgaaataaagtctgagattctgaagtttctaacaagctcactagtaatgccaatgtatttcgcccaaaaagaacattttgtcaaacatccagtaagtggaagagcctgtgttttaccccatttttctggcctgtaaacaaagataagagtcttcattttccaaagatagacatatgcaaagaaaacctaagaaagaaaggcagctgccagattaaatgtgatgatttatgcacagctcttctttggctacataaagatacttaataatgaggagaaaaataattaactctacagtgaaatgaatatttccgagagctcttgaagtaaattttaaaatcaactgcacaaggacaaatttttgtgatgtgctgacgcacaccgaagaacacagcatcattactgagatattgccccccaaaaagtatagtctgaatttaactacacagaaaaatcagttttatgcagagttcaagatgcagatatcttctatgttctgtaatttttaataacaatttaaagtagtctttctttagcaccctagaaagcgggtatctcgcaata

SEQ ID NO: 92938 - DNA, 542 bp, Homo Sapiens
tgggcaaggcattcagcatcaccagcaacaccacaggaccctcaccccagcatagacacacaccccctgacccttaccatctgcttcctgaaagacttcagtgtcagctcccctacacacaccccacaccttcaccccttgcttcaagattcaaacagagactcccagtccccctcagcatcttccctgaatcacagccccagctccttgacccccatctaggtgccaaatgttcatctgcaaccgctatgcagtctggtgagagggagacagccatcacatagaaagtgaccgtacgggtttttaatcactgctgggtggggtgggggtagggggattgtcctggctttgtcgacaaagtcccacttccccgagtattaagggcccttggtatcaagtgaggtaaattcacccatcacagggtctcgccctaccatcctggaattatttcacttttaagataaatgcactatttcactgttcgcctcccattctaaggaggtgaggtggttggaataaaaacagttcctgtctgaaaaaaa

SEQ ID NO: 92939 - DNA, 1225 bp, Homo Sapiens
  misc_feature (42)..(84): n is a, c, g, or t
  misc_feature (88)..(122): n is a, c, g, or t
  misc_feature (909)..(943): n is a, c, g, or t
aaaagatgatagactcactatagggcgctagctcgtctgttnnnnnnnnnnnnnnnnnnnnnnnnnnnnnnnnnnnnnnnnnnnccgnnnnnnnnnnnnnnnnnnnnnnnnnnnnnnnnnnncagtcgacggtaccggacatatgcccgggaattcggccattacggccggggaagtgtaatacgctataaaaaagttaatactttttgttcagatgtaaggcaaagataattgatgccgtttcagtgtatgattgtatttttaagcttttacagttggtgggagtaactatttgaggaaatttgtggtgagaattagtaagagataaaaccctccaacagtttattcttaccagagtaaagttctgtggtcatggggcagggaagagtttatttaccagaatactagagccctcatcactaaaagtaaaggtaacttggaggagggctataatgcttgcatctcagtattttcatttcacttcatcctttcataattgccttgattatggtgcagtctaacctattaagcaacttctggctatggtaacacttgatatgaaccatattatatcaagtctccaaaacatctagttcgttaacatacactttccctgttctttttagtttgagtccacattactaatacattttaataatatttaattatttcacaattttaagtttaccaaagtaaacaaaaattcatgaagatgagtattgccctctcccaaaaaaggtttaaagattagttgaacttccctcaatacacctaaagcaaaggggaattttagtaagtgtgtgtaccttgtttctttcagacacatctagaatgtttttctttcaccgtacctcccaaaagaggcaatttagaaagtattaagtagtgacttttgtccagttccatttnnnnnnnnnnnnnnnnnnnnnnnnnnnnnnnnnnntaaccttgctttaaaacagtagcatatactatggtcattgaacttaatctctctggcgttagaaatttactttacaaaattgtgttaagacttttggaaaaagaaaatgaaactgctgtggtaaaaaccaagtttgtttcaaaaaagtaggcaattatttggctgttacattttctttgaaaactgcaataatttatatatttgtattgctctgcttgggaactgtatatatgcttgtctactatttttaattttacaacaataaaataagtatatagttaa

SEQ ID NO: 92940 - DNA, 698 bp, Homo Sapiens
  misc_feature (685)..(685): n is a, c, g, or t
gcggccgccccgcagctagcccggcgctctcgccggccacacggagcggcgcccgggagctatgagccatgaagccgcccggcagcagctcgcggcagccgcccctggcgggctgcagccttgccggcgcttcctgcggcccccaacgcggccccgccggctcggtgcctgccagcgccccggcccgcacgccgccctgccgcctgcttctcgtccttctcctgctgcctccgctcgccgcctcgtcccggccccgcgcctggggggctgctgcgcccagcgctccgcattggaatgaaactgcagaaaaaaatttgggagtcctggcagatgaagacaatacattgcaacagaatagcagcagtaatatcagttacagcaatgcaatgcagaaagaaatcacactgccttcaagactcatatattacatcaaccaagactcggaaagcccttatcacgttcttgacacaaaggcaagacaccagcaaaaacataataaggctgtccatctggcccaggcaagcttccagattgaagccttccgctccaaattcattcttgacctcatactgaacaatggtttgttgtcttctgattatgtggagattcactacgaaaatgggaaaccacagtactctaagggtggagagcactgttactaccatggaagcatcagtagcgtcanagactccaaggtg

SEQ ID NO: 92941 - DNA, 685 bp, Homo Sapiens
aggacttgagacctttgggatcgttaaacactcatcttccaaaagtgtccaggcgataaagagttactctgatgtcagtggcagttacccattcctgccagcacagggctattgtcaaagtaataggcgctgggccttccttccagggtagaaaaggccacattgcccccagtgaggggagaaatgtcactgaattcatcagtacacaaggcctgctgctcgtcccctcctgtcctgatgaagccgcggtttgccttggagtaggtgttctcgcaggaaccactgtagtactggtaaggaatccagggcccgtcttcccgtgtgcgcttgtaaatggcaaagctctccgggcggctggtgtggaacttgagacgcacataggtgatgtcaaaagcttttcccaggtgcagcgtgaggttgatggagctggggtactgcaccccggccagcatggtctggctttgccaccaggtggtgtcggcctggttgttgtagtcggtcaggaaggctgccccgtgctgcaggtggggctgcccggcgtcgcacaggtgacaggacttggtgaccccggtcaccccggtctgcacacagtattcctcgggcggagtcccacacgtgttggtggccaccacagtcacgttgaaagcggcgttgacgaactcgggcatgcagcgctgcggccgca

SEQ ID NO: 92942 - DNA, 667 bp, Homo Sapiens
ttgcaggtgaccgcaactcttctttgcttcgtgccattttttcagattgccttcttcttactatctgcgtcatttttctttcctcgcattgccatctacagccaggctatataagagatttggtaagttctccatatttaccacaaaagaaaaagaataaataaaaattcatagccacaaccttccctcatggaatttaccccagtagtgaaatttaaatttaaaatagaaatgattatggtgatttcaagtaccttaaagctgctaacaaatattcctgctagaaacatgtattccaggtattcattctgattatagacatagtgctaaatttaattaaaactcgtgtatatgtggattagaatgtgctgttctgtaatagtagtaccgttaggtgtatgcatttggaatatgtctcaagtgtggcaactatgtactcctaatagtactttttgttgatatgaaaactgaaattaagacttattttgaaaaatccttatacattacattattacagtgtccaaatgtagcttcagatattttgatttcaactcttacaatatgattttggggtacggggtgcgtaattcaatcttttgatcttttgtctcagttctcccatgagagaataatgttcaatggtaaaggtgatgtttactcatgttta

SEQ ID NO: 92943 - DNA, 328 bp, Homo Sapiens
tgaaaagaacctgttctgagaaatacaaatgacatcaatcaggcccttatttgaggtgaaaggcaatgatggagagactgacagtataaccagaaattctaaagaatctacaagaaagttctagaactagtaagatagtttcataatattacaggatccaaagtttgttataaaaaacaattatatggttatatattagcaacaagcaaatggaaaactcaaagatccaataccaaaatgaattgggatgtgattagctctcccgccataaacaatttcccaccatggtagcagtttgcaaaaacaaaagtaggatcctgatattgct

SEQ ID NO: 92944 - DNA, 1021 bp, Homo Sapiens
ggagagtatgaagtcgacggcgcgccgaattcggcacgaggagccaatcagatttgttttccgaagagaccaccagtgacaacaacaatacctcgataaccacgccaactcttagtcccagccagcagccgcttccgacagaactgaatgtaacttcaccgagtaaagaggagtgtgggccatgcacagacacagctcatgtctcattaatcacaccaacaaaaagatcctgtggtacagattcacagtctgagaatgaggcttcaccagtaaaacggccacgactacttgagaatacggaacggtccgaggaaaccagtcgatctaaacagaagagtcgacgtcggtgcttccagtgccaaaccaaactggagctggtgcagcaggaattgggatcgtgtcgctgcggttatgtgttctgtatgttacatcgcctccccgagcagcacgactgcacattcgaccacatgggccgtggccgggaggaagccatcatgaaaatggtgaagctggaccggaaagtggggcgctcctgccagcgcatcggggaggggtgctcctgaaggccaggcatggccaccacgtgacgctgttcttagttcactaatgttagccttatttaggacaaagtcagccagacaccttgtactgggcacgcgtcagactgcagccagtccgtttcctttctttagccagccatcctggtactgtagtttaggggttgatggtggttgaaattgatttctggctggttactaaggtgcctgctagccattgtataaaattaaaacatgaagaatatgtctttctcgagcatggctagtggatttaaaacaacacatacctgtcactgctggagtcaaacttataaaacgccttaagtgggaaagtgtcccagacggagactctgagttaatagcaggagtagaagctggtgtaaaagttcccacgacgcacatggtttgccagaaaactctgttaatgatcggccttcacctcttcacttatcctttaagtcccg

SEQ ID NO: 92945 - DNA, 1360 bp, Homo Sapiens
  misc_feature (166)..(175): n is a, c, g, or t
  misc_feature (1222)..(1232): n is a, c, g, or t
  misc_feature (1235)..(1235): n is a, c, g, or t
  misc_feature (1240)..(1240): n is a, c, g, or t
ggcccaagaacgaggcctgcgtggcgaattcggcacgaggcgtttcctttctttagccagccatcctggtactgtagtttaggggttgatggtggttgaaattgatttctggctggttactaaggtgcctgctagccattgtataaaattaaaacatgaagaatannnnnnnnnngagcatggctagtggatttaaaacaacacatacctgtcactgctggagtcaaacttataaaaagccttaagtggaaagtgttccagacggagactctgagttaatagaggagtagaagctggtgttaaagttcccacgacgcacatggctttgccagaaactctgtttaatgatcggcctttcacctcttcacttatccttagtcccagtagccaggatacctgatggccacgtgtgccttggccatgggaggctgctgagattggccacgtggctgggctgggtggtggcctcactctcccacagagctggaaatggggggtgggggacagattcttacggaaatttttttacctgacttgctatgaaaaaactcatcacacaagaagagaaacagtaacctcactttgaaaattagctccactcaagactagtccacgaacgagacccgccttttctacacaggatccaaggtcacgagaagcagccagagtgccccgcctccgccggctctggtctgccattcgccagtgcagggatctggcacggaccagatgtggcgaatggcagcacagcgcggtggctgggtctgcacactggcctctgcagccagatttctatattgggagttttttaaaaagacatttcatagccaacaagaatcagtagaagtgctgggagcagcagctggggaagctgccgcccacgggctctgccccttccagctggagccgcccgtgcctccaggggccaagaggatgatgtcgtggcctccattctcgtttctatgcagccccgtagtccaaggacacccagtccacatctaccatatagcaagtttagtaagggaaggcagcatacgtcccagggacagtggggtttggatctgtctagaacagcggtttggtggctgtggcccagctccgaagagtgatatttgctctggtaggtgagggcctgagggtacattttctcacctgtgccccatcatgttcacagaggatttcagcagctgcaactgcgcacgccaagtgggggaaaagggtnnnnnnnnnnnccngggcntgcccccaggggtaggaaagtccctagccgggccaggcgggcgcgtggggccctgccccccccaggatccgaggattcccctctaaaggcccgaggacgggtgggggcgagtcctcacgg

SEQ ID NO: 92946 - DNA, 478 bp, Homo Sapiens
  misc_feature (297)..(297): n is a, c, g, or t
  misc_feature (380)..(391): n is a, c, g, or t
atagtcctcctgaaaagatgccaaaagtccccttcaacacttagcaaagattcaagaaagatgaatctcacattctttgtatgggaaatgaggaacttgacatcttcaatataatggattccactaaaataagatgacgatcaataggaaccaactaaaaaaatacttgactagctgttattgaaaggctgaaattcagctgacataagcagtattaatattgagctagaaaataattcgcattgaattcagcccaactttggttttctgattggggtcacttctaaattttttttncttctggacattgagaacaatccaatttgaaggcctcaatgcccaaatctacactcttgttttattctatatccttggtttcnnnnnnnnnnnngagatggagtctcattctgtcgcccaggctggatgacttcaggtggtggtaagagctttgaaagaataaagaaataaaaatgaagag

SEQ ID NO: 92947 - DNA, 912 bp, Homo Sapiens
  misc_feature (41)..(84): n is a, c, g, or t
  misc_feature (87)..(121): n is a, c, g, or t
  misc_feature (477)..(487): n is a, c, g, or t
  misc_feature (645)..(813): n is a, c, g, or t
aaagacatgtatagactcactatagggcctcaggctttcannnnnnnnnnnnnnnnnnnnnnnnnnnnnnnnnnnnnnnnnnnncgnnnnnnnnnnnnnnnnnnnnnnnnnnnnnnnnnnncagtcgacggtaccggacatatgcccgggaattcggccattacggccggggggctgaattcaatgcgaattattttctagctcaatattaatactgcttatgtcagctgaatttcagcctttcaataacagctagtcaagtatttttttagttggttcctattgatcgtcatcttattttagtggaatccattatattgaagatgtcaagttcctcatttcccatacaaagaatgtgagattcatctttcttgaatctttgctaagtgttgaaggggacttttggcatcttttcaggaggactataattgggccctctaactaaaaagtctcctatgccccttagatagatgagannnnnnnnnnngaccttgtacccaccaacattggtgggaggctcagaagggactgtgtttgtaactttgtagcactttctaaacagtgacctgttgtatgggcacttataggacagtccgtggggtggggcgggggatgggggagatggacaaatgaggtctggtttannnnnnnnnnnnnnnnnnnnnnnnnnnnnnnnnnnnnnnnnnnnnnnnnnnnnnnnnnnnnnnnnnnnnnnnnnnnnnnnnnnnnnnnnnnnnnnnnnnnnnnnnnnnnnnnnnnnnnnnnnnnnnnnnnnnnnnnnnnnnnnnnnnnnnnnnnnnnnnnnnnnnnnnngaagaagaggtgggtatccttctaaatgataaaccgatcatcccctgttacataaaactttccggtggctggccggcacggtggtcacgcctgtaatcc

SEQ ID NO: 92948 - DNA, 549 bp, Homo Sapiens
ggtgacagagcaagaccctgtacctaaataataataataatttccactttatttttcaatattcaaatatttttatataattctgcattgttctgtatgtagatcctaattttaaaattttacaccatcataaatgaacaaaggtaggaaggagtttggcttcaatagcttacagtaaaaggagtaaaggagttcagcctcaaaacgatattgttgacctgttatgttatgaaaaataatccagtgtttatacttaacggatgccatcccttattatttactattttcttagtctaactaaacaatctttattaaaataagcaatgatatttgacatgggcctaagaaatatatagttagctaacaatattgtcagttagagggatttcttttctaaattaagtacagatttcttcaccaaactccaggataacagaaaagaggacataaaatttggacatagtttctggataaataaatgtaaatttaaataaattatgtaacaggaaacaaacgaaattaaagaaaataaaattttcaagaaaagta

SEQ ID NO: 92949 - DNA, 476 bp, Homo Sapiens
cgctccctccgcacgactcccccccacacaagcggagaaaaggtttccctacacggaaaaggcgcggccgatggaaatctccgtgaaatctactatctatgatcctgcctgcaacccctctccccagcttggcgcagtcgaggggggcgatgctctctgcccatcccagctgcaccctagctccccttccctaacagttcctgttcttgacttgaagagaattgacccgtgggggactccccacctccccaacccagactttggagcgggtgggagttgtaagacaaatcaaaatacggatgacaaagaggatatagccgtgtataccccagggagaggaggcgccgagttctgatgggagaggtacaggttgggttctctgcctaccattgctgtctctgacttccagagctcaaccccctcctttctcccagtggtgacaagatatcaataaacttatttttaatacaattaaa

SEQ ID NO: 92950 - DNA, 381 bp, Homo Sapiens
cctcccttaatcctgacttctaagccatcaatttcatgtatattattattgccctatgtggggtggggagggaacctctcgggtatgcacatctccccttccctaacagttcctgttcttgacttgaagagaattgatccgtgggggactccccacctccccaacccagactttggagcgggtgggagttgtaagacaaatcaaaatacggatgacaaagaggatatagccgtgtataccccagggagaggaggcgccgagttttgatgggagaggtacaggttgggttctctgcctaccattgctgtttttgacttccagagctcaaccccctcctttttcccagtggtgacaagatatcaataaacttatttttaatcc

SEQ ID NO: 92951 - DNA, 226 bp, Homo Sapiens
agaatcaggcactaactaagcacagggagtgggtgctcacatccctggagcagggagctagggtgcagctgggatgggcagagagcatcgcccccctcgactgcgccaagctggggagaggggttgcaggcaggatcatagatagtagatttcacggagatttccatcggccgcgccttttccgtgtagggaaaccttttctccgcttgtgtgggggggagtcgtg

SEQ ID NO: 92952 - DNA, 1459 bp, Homo Sapiens
  misc_feature (41)..(83): n is a, c, g, or t
  misc_feature (86)..(120): n is a, c, g, or t
aacaatgtatcgactcactatagggcgctagctcgtctttnnnnnnnnnnnnnnnnnnnnnnnnnnnnnnnnnnnnnnnnnnncgnnnnnnnnnnnnnnnnnnnnnnnnnnnnnnnnnnncagtcgacggtaccggacatatgcccgggaattcggccattacggccgggggacttcggcaagatggctgccctgacagcggagcattttgcagcactccagagcctgctcaaggcctcctcgaaagatgttgtcagacagctgtgtcaagaaagcttttccagttcagcccttggcttgaaaaaactcttggatgttacatgttccagcttgtctgtgacccaggaggaggcagaggaactgctccaggctctgcaccgcctcactaggctggtggcattccgtgacctgtcctctgccgaggcaattctggctctctttccagaaaatttccaccaaaacctcaaaaacctgctgacaaagatcatcctagaacatgtgtctacttggagaaccgaagcccaggcaaatcagatctctctgccacgcctggtcgatctggactggagagtggatatcaaaacctcctcagacagcatcagccgcatggccgtccccacctgcctgctccagatgaagatccaagaagatcccagcctatgcggagacaaaccctccatctcagctgtcaccgtggagctgagcaaagaaacactggacaccatgttagatggcctgggccgcatccgagaccaactctctgccgtggccagtaaatgatccagccagctgccagggccactgccatgacccagctgctcatgagtgataaatgtctccccatatgcaggctgcccttgcagctgcagctgacaacaggcaggatggtggggacagcagggggctactgccatccagaagttacagttggattgggaagaagcagccagatcccccgctgttctcactcatcttctttctctttctgaagctggagagcagaagcccccatctttgaaaagctcctgagtgcaacttaattaccaccatggcagggtgagggaacatttgcatcgtcagctgcctctgcatagctgtttgagaaattcaggcccaaatcatgcagcctatccaataagtaagtttatttccaacattagctctaattagttcatttccaatcccagaacacatggagggaatcggacaggtgatgccagcagttcctgctcctctgtcagggaagccaggcagagcccacagagcatggtccatccagagtgttccctgagccccctccaccatactggaacccctcttcagtgtaggaagtctgaaatgggtgctaattcccttcttcatgaaaccagggccctcttccttacatctaatgcagccactcctaggtggagaagtggggaaataattgggaaataaacaacagtttctaaaacttcct

SEQ ID NO: 92953 - DNA, 486 bp, Homo Sapiens
ctatgcttttattcattttcatctctctataaactttcagatagaaaatgcagttgaaagatatttcataaaggaagaaaaagtaagaatacaggtgagagatattactgagattttctttcagtgcaatcctggtcttttctgactagcaatatttttatgtgcagaagtagtagaaaagataaatattttgtacagtagaaaaacacatcatttctgtgccatggaagagagaactcacaaagatgacagcttctggctatgttggatactaaccagtactgtaagtacccaacgatctgacgttaacactggctgtaaagctcctttaatgttccttgcaaggatttgaacctatttactggaaccctcatcgcttattgagttgaaaaacattgttgatatgtgtttatcttatatttgcagtagagtcataattttacttcttagaaaatcatacattaaacaaaaaaagacacataaaaa

SEQ ID NO: 92954 - DNA, 573 bp, Homo Sapiens
gtcagccaatggtgatgctgggaaaaggtcatcagggaaactatctctacactgagttctctaatgccctgggaagagcattacactttcagcactgtggcaacgtgtactctcgttgaatggaaggctatcagaggccttataccaccatactaagaacatttctactgttttatgagaggcctgtgcccatcttagtataagaaaatgaacaagatttcagggaggttagtacgattgagtaaaagtaaagcttaagttgttagtcctggctagtcactcataacctatgaatttaaattatcttagggcctctattttttaatctgtaaaatgaggggatcaatgtgttacagattagttgatccttaaggttccttccaaatctaagcatgtcacttcctactcctgatagtgctggtggggagcagaaaggatacggccaggaatagaaaaaaagggcaaagaaacttggttgacagagttgcgttaggactagaaaagacaagagacagattgtcctgttgcctagactgtgctgcagctacccggggtgagctgtacacaaccttt

SEQ ID NO: 92955 - DNA, 446 bp, Homo Sapiens
gcggccgccaggaagcccagattcgagtgtccggagagtaaccggaagtgctgtccccaggcctaggggcggcgccggcggctgccagggagaggcaagaattgagtgttgtgaatagttctgaactagagaccttttgaaaccaaaaggaagatggtcttgagtctttcttgttacgaatgctatcttctttgagaagtcaaattgtcaggatcaggaatgtatgttttcttccatctggattctagggttggaaataccaagtaaggaattaacatatatgatgctggaaacttgtagaggctcatgattgaaaggcctgaaacagatgtatcttccaagttcttatcaagaaaatgactgtgagggcaacgatgggtcaagaagaccagcggaaaactccctaggagagagccatagaaaatgtacacttcagaagagaaatg

SEQ ID NO: 92956 - DNA, 1327 bp, Homo Sapiens
  misc_feature (1182)..(1182): n is a, c, g, or t
  misc_feature (1193)..(1193): n is a, c, g, or t
  misc_feature (1203)..(1204): n is a, c, g, or t
  misc_feature (1222)..(1223): n is a, c, g, or t
gggggcggcgcactcggcaccccgcaggtcgctcagcctctcctgtctccctccctccccactttggcaggacagttgctgtgcgacttggacagtagaggagcgcctcccaagttttcatccaactgccacccccaaagcttccaccctcctcccctcagagagaggacgtttgatgcccggcccctgagattctcattggccagcccctctgggtccccctgagcagagcctgccgacccaattgcccatctttgcggctttgatgcttaaccatgtctgcctcatcctcaggcggctcccccaggtttccatcgtgtgggaagaacggagtaacgagtctcacacagaaaaaagtcttgagaacaccttgtggcgcacccagtgtaactgttacgaaatctcataagcgcggaatgaaaggggacaccgtgaatgtacggcggagtgtccgggtgaaaaccaaggtaccttggatgccccctggaaaatcatctgcccggcatgtgggatgcaagtgggagaatccacctcattgcctggagatcacaccaccatcttcagaaaagctggtctcagtgatgcgattaagtgacctctctacagaagacgacgactcaggtcactgtaaaatgaaccgttacgataagaagattgacagtctaatgaatgcggttggttgtctgaagtctgaggtcaagatgcaaaaaggtgagcgccagatggccaaaaggttcctggaggaacggaaggaagagctggaggaggtggcccacgaactggctgagactgagcacgagaacacggtgttgaggcacaacatcgagcgcatgaaggaggagaaggacttcaccatacttcagaagaaacacctacaacaggagaaggagtgcctcatgtccaagctggtggaggcggaaatggatggggctgcggctgccaagcaggtcatggccttgaaggataccatcgggaagctgaaaacggagaaacaaatgacctgcacggacatcaacaccctgacaaggcagaaggaacttctcctgcagaagctgagcacatttgaggagaccaaccgcaccctccgagacctcctgagggaacagcactgcaaagaggattctgaaagactaatggagcaacaaggaccactgctgaaacggctggcggagaccgactcangagaaagcgcngcctgctgtnntactgctgcaaaacaagnngacaaggacggtggaagagcatccttcaggaaatacaatgtgagaaggctcaacgcaaagacagcctctgacctttctaaatccatgagtctagtgggcgtgac

SEQ ID NO: 92957 - DNA, 819 bp, Homo Sapiens
ttctgggcgcagccgtgtcgctcctggtttccatcgtgtgggaagaacggagtaacgagtctcacgcagaaaaaggtcttgagagcaccttgtggcgcacccagtgtaactgtgacgatcaaccatttttgtgttgtcctcccccacctgccagaagccaaccatgaaggaccgctcttcaactccccccttacatgttcacgtggatgagaacacccctgtccacgtccacataaaaaaactcccgaaaccatcagcgaccagcagccagaaatctcacaagcgaggaatgaaaggggacactgtgaatgtgcggcggagtgtccgggtgaaaaccaaggtaccttggatgccccctggaaaatcatctgcccggcctgtgggatgcaagtgggaggtcaagatgcaaacaaggtgagcgccagatggccaaaaggttcctggaggaacggaaggacagagctggcaggaggtggcccacgaactggctgagactgagcacgagaacacggtgttgaggcacaacatcgagcgcatgaaggacggagaaggacttcaccatacttccagaagaaacacctacaacaggcagaaggagtgcctcatgtccaagctggtggacgcgcggcacatggatggggctgccggctgccacagcaggtcatggccttgaaggataccatcgggaagctgcaacacggacggcaacgaagtgacctgcacggacatcaacaccctgacaaggcagaaggaacttctcctgcagaagctgagcacattggaggagaccaacgcacctccgagaactcttgagggaac

SEQ ID NO: 92958 - DNA, 476 bp, Homo Sapiens
taccgagaaccccatccccatataacaccaacagtgtacatgtttactgtcacttttgatatggtcttatccagtgtgaacagcaatttattatttttgctcatcaaaaaataaaggattttcttcttcacttgatgaatgagtcttttgttacttctttttgggctctccatttgggaaagaaaatctagaaagtatgctcattgtaattgaaattgtattataattgcaagtcagctatactgtcatcttgtattattctgttaaaagcgattgtgaaaacttgaactccatgttaggatgacttatttagtcaagaggagctctttatcactattaagggagtttattaatgtctagtttaaaaaataacaatttataattttcatagatttttgtggactcctacctatatcgctaaggaatcattcagctaataacataagcaaaatgccttcattctctatcagaatgct

SEQ ID NO: 92959 - DNA, 802 bp, Homo Sapiens
  misc_feature (573)..(585): n is a, c, g, or t
  misc_feature (658)..(668): n is a, c, g, or t
tcacagggtcggttgttctcacttggtaacttgaacaagaatatgcaagcagaatctcctcccccaatgaatttagaaatgaataaccgtaaaccagatctccgagttcttattccaccaggcagcaagaatacgatgccatcagtgaatcaaaggatatccatcagccatttcaacaacatatggtaccgagtactctctgagtagtgcagacctgtcatctctgtctgggtttaacaccgccagcgctcttcaccttggttcagtaactggctggcaacagcaacacctacataacatgccaccatctgccctcagtcagttgggagaccgtaccaccaccccttcgagatacccacaacacacgcgccacgaggcggggagatctcctgttgacagcttgagcagctgtagcagttcgtacgacgggagcgaccgagaggatcaccggaacgaattccactcccccattggactcaacagaccttcgccggacgaaagggaaagtccctcagtcaagcgcatgcgactttctgaaggatgggcaacatgatcagattattacttactagnnnnnnnnnnnnncttgcagtgtgtgtgtgtgctataccttaatggggaaggggggtcgatatgcattatatgtgccgtgtgtggnnnnnnnnnnngtcaggtactctgttttgtaaaagtacttttaaattgcctcagtgatacagtataaagataaacagaaatgctgagataagcttagcacttgagttgtacaacagaacacttgtgcaaaatagatttaaaggct

SEQ ID NO: 92960 - DNA, 574 bp, Homo Sapiens
gcggccgcggaggcaagaatgtagggggctctggcctaagcaagagtagactctatccccaggcccagcactcccactacccccactacgcggcctcagccacccctaatcaggccgggggcgcagccgaaatccaggagctggcctccaaacgagtggacatccagaaaaagaggttttacctagacgtgaagcaaagctcccggggccgcttcctaaagatagccgaagtctggatagggagaggccggcaggacaacatcagaaagagtaaactgaccctctccctgtctgtggcagcggagctgaaggactgtctaggggacttcatcgagcactatgcccacctgggcctgaaaggccaccggcaagagcatggccacagcaaagagcaaggctccagaaggaggcagaagcactcggcaccctccccaccagtctcggtggggtccgaagagcatcctcacagtgtcctgaaaacagactatatcgagagggacaataggaaatattacctagacctaaaggaaaatcagcggggtcgcttcctacggattagacaaaccatgatgcg

SEQ ID NO: 92961 - DNA, 383 bp, Homo Sapiens
ggcacgaggacgggagtaacaggacggccatccggggctgatatggggaccctaaagccacagcacaacgcagagggagctctaccaagactttgtatttctgaagaccaggtgctccacccagccagagactcaggactcagctggtcctgtggcccctacccagaagtggaatcagtagagaggaccagtttccatacccctatgattgcatccccaaccagtcagccacacccaccctctagccacctgcccaccaaactgtctttaaaaaccctagtctctgaattttccaggagggtaaattgagtaacagcaaaactgtggtctcctgtttaaccaactttgtgtgaattaaactctttcctttgcaatttccaaaa

SEQ ID NO: 92962 - DNA, 667 bp, Homo Sapiens
agatcaatgaaatgatgtcataagcgatcacttcctatatgcacttattctcaagaagaacatctttatggtaaagatgggagcccagtttcactgccatatactcttcaaggactttctgaagcctcacttatgagatgcctgaagccaggccatggctataaacaattacatggctctaaaaagttttgccctttttaaggaaggcactaaaaagagctgtcctggtatctagacccatcttctttttgaaatcagcatactcaatgttactatctgcttttggttataatgtgtttttaattatctaaagtatgaagcattttctggggttatgatggccttacctttattaggaagtatggttttattttgatagtagcttcctcctctggtggtgttaatcatttcatttttacccttacttggtttgagtttctctcacattactgtatatactttgcctttccataatcactcagtgattgcaatttgcacaagtttttttaaattatgggaatcaagatttaatcctagagatttggtgtacaattcaggctttggatgtttctttagcagttttgtgataagttctagttgcttgtaaaatttcacttaataatgtgtacattagtcattcaataaattgtaattgtaaagaaaacat

SEQ ID NO: 92963 - DNA, 485 bp, Homo Sapiens
ttaaccacataagctgattcttaagtttatgtggggaagaaggcacaatagccaaatgtcataatgaaaaagaagtgtgacaaggtacatatgtgtgtgttgtggggaggggcagagagtaggagtaggattagttctaacagatattatcaagatataataatcaaaagtatgctactggcacaaaaacagacatgcaacagaatagaatttccagaatagaatagaatttccagaaacaaccctaaaatatctatgccaattcggtatataataaagatggcatatcaaatccatgagtagaaagattgcattttcaataaataatgaaacaaatgagtagtcatctagaaagaaactcaagttgaatccatacttcttaccttctaccaaataatgtatatcaggtttttaaatattaaaaaaagaaactaaaaacacaagaagaaacaataggaaaattatttgataactctggaatcgag

SEQ ID NO: 92964 - DNA, 555 bp, Homo Sapiens
taccaacctgtgattggttccatgcaaagaaccctctcatggtacagcagaccctccgcccagtggacagtgccacctgccctggggagaatgcaagccaccaggcaataaatttcagctcttgttaccacctctccattctcctccatcgctccctcttgatctcccctctctgctgacaacaagatatggctggcatttagttgaggatttaaaatcaggaaagcttctccctaccttcaggctggaagctcgctcccctggctctctgaggcctcttgaagccgggcgtttgctgagtgccaggagaccagctcctgaaaccggaaggggcctgcattgttggactaaaatagcaaatgtgcaacatgagtctcttcaggggccttcagcgggctggcagcttccggtgggtactctacacaggccacagggaagcaaactggagtggccctccctgccacttgagagagcccttctatgtacatgactgttctgtcccttagctagattagttcatccaactgaaaatggactttagctgtgcctagcaaa

SEQ ID NO: 92965 - DNA, 431 bp, Homo Sapiens
agaccctcgggatctccgtttacagttcaggacctcagctgcactttggcgctaacgccctgtttcccagggctgtgagggaccaaccaaatatgaagctgttgatttctccaaaataaccatcaaaagtctgatgagataaagagcacactggaaactgggaatgctttgatggaaattctgcaagtaatggacgctctggcttgccttggtgactgtcaaataaaagcaagtatatactcagttctctccacacttcccacatacttaccaagcaaaaagcccatgaaaaatctgcagcagcctctgatagcaggaagacattatgtggtactcctgaactttcactcctggtccatcaactacaccgtgattctcagcagctaaacactaaaaataaaaatgattttaggacagttgcttcagtaaaa

SEQ ID NO: 92966 - DNA, 439 bp, Homo Sapiens
cctccaggcggaccatagcgcctgcacaacctccgggggcgggaaggaggcgaagcggcggccggggagggcgacaggaaggttcctgctggccttgacgcaggaggccgccccagcgaaagggtccgatcccgacgcggtgcagggtcctgccggagaccgcctagatgtcgggctaaataaattgtttgccgcgtagttgcagtttgcagctaaaagctcacaggtcgtcagttaccgccaagctgtaggacagagacggaagaagcgagacagatacagagagaaagtgagacacatgtagtggggggaagaaaatgtgataaagggtgtatgtggataaaaagtttctgagtctcaaagggttattggagagatagagggagaatgagtagacacacacacgcaattatgagtttgagtgactcttgagtctaca

SEQ ID NO: 92967 - DNA, 716 bp, Homo Sapiens
agggcttagattttaaggcacttctgaaagtcaatccctggacaaggcagtcatcacataagaacagctaccttctccacttggtggcacaagaggtagggaggggagtatgggttcatttggcttcgcattatgcaaggtgaaaccgtttgttttccctctccattttccctaactaaatgaaaaggacacattctgaaatcccttttgttggagaataagtcagtctgaggggaaatgggaggccagagatgagaaccctttgaaaagattgtaaaatactgattttcattctttcaagcttatttgtaaatacctatttgaatgctgtgtatttgtacaggaatttgagcaaaaaatgtatagagtgtgatgtccaattggtattcagcactataaatgtgtttttaacctcccgcattctgtgcttatttaaaacaaggaaacttctaaccatttcttttggtgtattcatgtttaaagaaaaaaagtgatttaaaaatgatcttacctgtaccagaaaagcaaagttaaaggaaacaaaatttggaccattgtcccaagaggtattttactgtatatattgtggtagcatgttcaaaatccaacaagtaatgtgaattttagatgtaaaaatctgccacttgattttttttccccctttccccacttccttgaatgctgtgatgtgaattaaagataaatacgtgatactg

SEQ ID NO: 92968 - DNA, 910 bp, Homo Sapiens
  misc_feature (543)..(543): n is a, c, g, or t
  misc_feature (804)..(804): n is a, c, g, or t
  misc_feature (828)..(828): n is a, c, g, or t
ctaagagtactacgccaaggaggtggacaaaatagacatgccgcccttcttcccctccgaaaatgccatcccgcccactttctacagaccctacttcagaattgttcgatttgacgtctcagcaatggagaagaatgcttccaatttggtgaaagcagagttcagagtctttcgtttgcagaacccaaaagccagagtgcctgaacaacggattgagctatatcagattctcaagtccaaagatttaacatctccaacccagcgctacatcgacagcaaagttgtgaaaacaagagcagaaggcgaatggctctccttcgatgtaactgatgctgttcatgaatggcttcaccataaagacaggaacctgggatttaaaataagcttacactgtccctgctgcacttttgtaccatctaataattacatcatcccaaataaaagtgaagaactagaagcaagatttgcaggtattgatggcacctccacatataccagtggtgatcagaaaactataaagtccactaggacactaaacagtgngatgaccgcacatcttctgctaatgttattggcctcctacagacttgagtcacaacagaccaaccggctgaagatgcgtgctttggatgcagcctattgctctagaaatgtgcacgatcattgctgcctacgtgcactttacatcgatttcaagaggcatctagggtggtaattgatacacgaaacccaacggtacactgccaacttctggtgctgagcatgcccgtatctatggacgtcagacactcagcacagcaggtncctgacgtatataataccataaangcagaacatctgcttctcctgctgcgtgtccacgacttagacctttagccattcttactcctatgccagacactcagattga

SEQ ID NO: 92969 - DNA, 489 bp, Homo Sapiens
ttagctaggcatagtacctgaggccaggaggtccaggccgcaatgagatgtgtttgtgccattgcacaccagtctgggtgacagagaaagaccctgtctcaaaaacaaattaaataaaatatcttcatatataaattaagctaattaaaaatatttttccctgtatttatttaatattttctaatctgaacccatatacagctgactaattcattcttagaaatgtgttatctgtaatctttcctaaacagagtagcccacaagaatcatgcactttttaaaattatttctaagaagccataacaaagctgtgtactaataaagactgcagcaagcacttgtgttatttaaattatgtaagtagattgtcatttgtcaggctcctgtacatttacatagcatgttatattaataataaatgtaaaatatgactaaagttttcattggaacacaatgtagacaggaggtttattatgagcattttgcaga

SEQ ID NO: 92970 - DNA, 470 bp, Homo Sapiens
acttaaatgaatgctactaaatgaagccagtctgaaaaggcttcatattaaatgatgccaactatatgacactgggatgtattctggaaaaggcaaaactatggagacagtaaaaagcagtgggtgggggaggggagggaggaataattggagcacagaagatttttagggcagcgaaactactctgtatgatactataattataaatacctgtcattgtacatatgtccaaccccctaaaatgtacaacaccaagagtgaaccctaatgtaaactgtggactttgagtgataatgatgtgtcagtgtaggttcatcaattactgcaaatgtacctctttggtgggagatgttgaaaatggtggagactatgcatgtgtggggacaacaactatatgggaaatctctgtaccctctcaattttgctgtaaacctaaaattgctctaaaatataaagtctattaaaaccac

SEQ ID NO: 92971 - DNA, 447 bp, Homo Sapiens
tccatgtctcccagctgtgcaaggcaaccctagtgttgttgaggaaaagcataaagaagaccatccatcgtgttgagcgcagggaagtgccgaatgctacgtaggcttgggcattctcaatagttcaaggcccacattacaacttccaagagaagggtggtggatggctcacaaaccagcaatggtcaagggccatttccttctctggtcctggcctagagacttcctggggactcacagaaaaaatgctaccaaatcctgaactctacccagctcttctcccttcctgggggaacaaccatgtggacttccaataagaacacgagcttaaagaacgagttattccttctgacccaagtaaagcacatggcccatttcctgttcaccagagaacttcattagagggaaactgcacacatagcattcaattataaaaacatattcaaa

SEQ ID NO: 92972 - DNA, 244 bp, Homo Sapiens
gtgtttgtttggcgggagagggtgacctggaaagccacaagtgagtatttgacatattctgtatccttaatccaatcatttggcaaactaaaaggtttctgtgttgtaagaatctgatactagtgcttaagactttgggaagcattgcactgttgtttattagaactttatgtatatttactgtacacagagacttgtttgaaaacaccaatagtcattaaataaagacattgtaaaattaaaa

SEQ ID NO: 92973 - DNA, 370 bp, Homo Sapiens
tcataatcaggaaaatcggcaaatggctgggactacaaccctggtctcttgaatcctgtttggaaatctgtgcgttaggagggaaatttccattcctacagcttcatgggaaaaggtctactccatttcaggaggtaacagtcctggcatgcacaattcaagccccctgcttcaccggttcctcactcctcactaggagaagtgattctgctggttgagacaagaccaatatccaagagggctacactgcattcgagggacaaggctcagtgtcttcctctctcccactgctttcccaagccagtcactatcacattttaatgtgtatgtgaattacttgggggatcttattaaaacacagattataaaa

SEQ ID NO: 92974 - DNA, 635 bp, Homo Sapiens
  misc_feature (16)..(16): n is a, c, g, or t
tcaggtgccattctcncagggcttaggcgcccataaatgttctttctgtggtggagtagggcctcctgcttccatactgtcgcatgggctagatctcaggtgtggtgttgagccaccttaagatgagggctgcttcgcagtaaagtttccagcctgggcccctcttgggccttctggctggggaccctcagcctcctgatgctgttgcagggcaggtctgagagggtgcccagcagcacccggtgtcaggcccaccttcttttccatttttgaacagcgctccctgtggtttgtgcccactgctcaatacagcctccgatcctcactcttgaaagctccatgataagcacagagatgggcagtgtgggtcagaaggtgggccgcttcctgtggaagagggaagtgtaggtgaatagatatcaaaacccctgatgtcattcttttgaggggttggattttcttttctctggcagacatttcagtacattcacatttctctcacatttgctgaatgtgagatcagaataaaggagatcggcgtttatgttcgtaccttctgtaagttggcatgagcagatcattcactgtccttacaacaggcattctatccccatttgcagacaagtagaccgagt

SEQ ID NO: 92975 - DNA, 863 bp, Homo Sapiens
  misc_feature (269)..(280): n is a, c, g, or t
  misc_feature (554)..(562): n is a, c, g, or t
  misc_feature (674)..(717): n is a, c, g, or t
  misc_feature (791)..(791): n is a, c, g, or t
  misc_feature (842)..(842): n is a, c, g, or t
gggtttaaaaaacagaaagagaaaaagcacgatattatgatccaagaaaatggaaatggtctggaatgttttgaaaagagtggtcattgtacagcttgtctcactggaaaatatcctgtagaattagaatggtagctggtagggttggatgtgtgtagtttcaagatagaaagttggtcaagaagttatagtggtcacacctcatctatttactgttactcagttggtacaatgtaaaatgccatgcttatgtttataagttttgagannnnnnnnnnnnctgaaaaggataccaaagtgcgataactgaacatttccaattgcatataatacaacaatatgtggtgttcttttttttacacaagcattggctagccttttgaacctggtcagagaaggcaggtggtcactgacatttcccaagtccatgctttaaagggtttgcaagaagttagggttaaggagaggtgatggccaacaagacaggggaggtaaatataccatttcacacaaagtttggagaggaacaccttatcccctcctaggcggcctannnnnnnnngacgtccgggtggtaattaatgaccctgtgaattccctggactaaccaggcagcacaaaaccttttaaacacagatcctcacgacgtaattccggcgcgccctccacgtttnnnnnnnnnnnnnnnnnnnnnnnnnnnnnnnnnnnnnnnnnnnnacttcgctgaacaaccggcgaagatccactgcccctaaccctctccggggagttgggcagcgcccgtcgttgtnccctcacccgcaattgctaacagaaccgccccccaggcgcagtatccaccncctgcccctacacttcgcccc

SEQ ID NO: 92976 - DNA, 450 bp, Homo Sapiens
gacagttcttctctgttcagtttccaatccccgataatttgctaaaataacattgtacatccaagagagggaagaagagtatgtcagtatattatgcagaagatagatacagccttttcagaagatctccactagtttttgttccaaaaattcaagtttatgggagaaatctcaattagccaccttttcacagttgtgtggatataacatttgggggatctttctggactcctacctatctgtgcattttaccggcacctcaggaaaggagggtgaccaggttgtcttagcttgtactgcttggtgatctctgaggaccttctaattcagttgtaccccagtgttccatgtatagaaaaacttcattagaacaaactttacttgatatgaaactcctattaacagtctttttttgaaataaaaagtagcttgagctttctttaaaaaaaa

SEQ ID NO: 92977 - DNA, 970 bp, Homo Sapiens
  misc_feature (869)..(869): n is a, c, g, or t
  misc_feature (948)..(948): n is a, c, g, or t
aggagcgaggcctgggtggcgattcggacgagggactcacccaggcgcggaggatggctcgtggtgggaccttcatccgggcaccagctggatggacctcccccacactcagggcgcgctgacctcacctggccacccgggggcgcttcaggcgggcttggggggctacgtcggagaccaccagctttgtgccccgccaccccacccgcatgcgcaccacctccttccagctgccggagggcagcatctcctagggccgcccgacggggctaaggccttggaagtagccgccccggagtctcaagggctggattccagcctggacggggcggcgcgtcccaaaggctcccggcggtcggtgccccgcagctcaggccagaccgtctgtcgctgccccaactgtctggaggcggagcgactgggggctccatgtgggcccgatgggggcaagaagaagcatttgcacaactgccacatcccgggctgcgggaaagcctacgccaagacgtcgcacctgaaggcgcacctgcgctggcacaccggcgaccgacccttcgtgtgcaactggctcttctgcggcaagagcttcacgcgctcggacgagctgcagcgccacctccagacccacaccggcaccaagaagttcccctgtgcagtctgcagccgcgtcttcatgcgcagcgaccacctggccaagcacatgaaaacccacgagggcgccaaggaggaggcggctggggcggcctcgggagagggcaaggccggcggcgcagtggagccccccgggggcaaaggcaaacgcgaggccgagggcagcgtggctccctcccactgagctcctcagtgccgcctccctgcgggtatcccgnggggcactggatgcgagcccccaggtctgacgtccttgggggtggcctgagggaaaagggaaaggtgcgtatttattcnagggaggaggaaaagtggtgca

SEQ ID NO: 92978 - DNA, 443 bp, Homo Sapiens
ctgaaagtcagggacatggtttatctgagcaaaacgcttgacccatagtggatattcagtaaatactgttgaatgaatgaaaaacaatctcccagtggttctaaattgcctttgaatcatggatttctttgaaatctgatggaagccagggtgatatgattttgctctgtgtccccacccaaatctcatctcgaattgtaatccccatggggaggggcctggtgggaggtgattggatcaagggggtggtttcccctaggctgttctcctgatagtaagtgagttctcacgagatctgatggtttaaaagtgtggcacttcccctgcatcttgccgtctgcctcacttccccttctccttttgccaaaaatgtaagtttcctgaggctaccccagccatgcggaaccgtgagtcaattaaacctcttttcttcataaactaaa

SEQ ID NO: 92979 - DNA, 386 bp, Homo Sapiens
taccagtggtttctagacaatcaaactctgcaattgttaagaagcaactggaatcagacagacctggattcagatcatagatgcacagttaaatcaaatacctttgaacaagttacttaacctccccaagcctcagtttctaccataagaggttggaatgagaggatgactgcaaaggacctgggatggtgcctaacaaaactttatctgtcagcttctccctgccacttcacaggagacccaactctctgcaacagaaaccagcttttccacttagtaatcactgtgtgctttagtttcctggtttataaaataggggcattgagctctgcccagagggttattatgagaacaaatgaaataaagcatgtaaagtgtttagtaaa

SEQ ID NO: 92980 - DNA, 331 bp, Homo Sapiens
cgggcgtcgggagcgtgggctgcgagccgagtgggtgggggagccgccgggctctatccgccagcccacgagaagtgacgaaggagcaccattgaaggagaattagacaaactggagtctactgagatgaggctgttgggaatggccctggtaccacatcctgagcagggatggccgatggaatggggagaagactcaggtggggcttgagtgtgtcctctgatgactgaagagccttgggagcaagcatccttcctgctactgtgtgtttgctggttccaatgatacataatttgtgcttttcgtaattaaagtattatcctgtaaaaaa

SEQ ID NO: 92981 - DNA, 441 bp, Homo Sapiens
caaaacaggagaaaagagtgaatcgggttgggggaggtgacacatttctccacaaaggtacaaaattgcctatagaaagtcagcttcggaatgccgagcccaggctgctgagatgaggcgttcctgggcatccctctcccaaatgtccttcagatctggctggggtcactcccacattgagggcagccccccgaggtgagatggagtggcctccttcagcccttgcccaggaggcacaagagcaagcaactgagactgtacagagaaagagaagaggaaggggtgcagcccggggacacaggtaggggacagccaagccaggcccaggagcctctgggcagagagaagatggggaggcaggaggctctagccaaagtccctcctgttccttggagatgttcctcagaatggcagcagaggtgaccctaggaggtaagggca

SEQ ID NO: 92982 - DNA, 508 bp, Homo Sapiens
tgtgggaccaggtgctgacagtttttaaggatatacaaaaggagctgcaggaagatgctcggattcgagggatgagcaactgctccatgacacccatgacatcagcacccaggactggaagcataaggcctccagattccttgatgaccccaaagttgagaagattgcagttcagctctggagagcagccatcaggaggccgtatccacaacctgaagacacagctgttcagtcaatcagcttactaccctggaccctaactctacaatcaaggaagaaggacatctctgcttccgccagcacagcttcagttggggaagatattagcagacatcatcactgaacccagaagagagggtggtgcccatgagtggagatgccagggtctatggctgaaactgggaacttggaaatcaagtgagacccaagcaaggaaaccaactgccaaagcaaggaaaccagcttggtttggcaaacagctgatgaaataaatgtgacgtagaaaaaa

SEQ ID NO: 92983 - DNA, 865 bp, Homo Sapiens
  misc_feature (55)..(89): n is a, c, g, or t
agctaaaattaaccctcaactaaagggaataagcttgcggccgcatacgcggtcnnnnnnnnnnnnnnnnnnnnnnnnnnnnnnnnnnnctttcagtattggcttgagtgacctgttctcctgagtgctctagtgtctccagttgtggggggggaaagatgatggaggggaacagaaactggacttgatgtttgcggtttgagaggcaagaaaataaaataactttctacctctaaattgaggcttaggagtaaaaagcattttgtcctaaatttatcatttaaaatagcatcagtaacttttgagctcatgtcaatcaagcattggcagtcagagattttatagggaagactaagtaaatccagtttccaagaacctaaactgattgaggctccaagagtcagaccaacaaaagttttattctgtgttgtttactggtaagaatattattatcttgatactacctctcaagggtattgttacaaaatgccacttatggttaaagagatagatacaaagagttctatttgacagaagcttgaaactctggcatctatctgcccaacgatgggggctttcgttctgtaatttaatcctttgtagatacattatttgtgtgtaattttatacgtgttcatatttttctcattttgcattgtgtaaagtgtacaaaatctcaaagtataaaatactgcttatattgcttgtaatttacagtgtgtaaatattttcctaattgtgtacattgatgggggggacagtggttatcaggttttttttatgacccttttgtatgcatttcacaatactgtcatcaattacacacttggtaattttattaacattccatagaaaatctcatttt

SEQ ID NO: 92984 - DNA, 344 bp, Homo Sapiens
aggagcctgagagacccacggaggcttcgcgggaagacgcggcggcggcggcggaggatgagcctgcagagcgcgcagtacctccggcagcagaagtcctgaaggctgacatgacagattctaagctgggtccagctgaagtctggacatccaggcaggctctgcaggacctgtaccagaaaatgctagttaccgatttggaatacgctttagacaagaaagtagaacaggatctgtaagtattacctatcatttgagaagtccctgtaagatcaagaatttcaccgagactttaaaacagtttggttcgttatttatttttcaacctgttgcagaataaactt

SEQ ID NO: 92985 - DNA, 602 bp, Homo Sapiens
acaagaaggggtgagttatatggcacaatgtctccaaggtggacgaggcagtgctggcagatataggaacaggagctagactgtggcttcactatggcgctggtatgcgtctgtttattgctgataattcccaattgggaagacttcacacggcatggtaaatctacattaaatactgtacacagttcttgtaataactgagtatagaagccactagctgcctctaggaacagagaaaggtttgcctgaacttcactccgattcggatttgctcgattctttgcctggccttgtagtgttgtgatctgattcttaaaggcgtgattccagagatcctgttctactttcttgtctaaagcgtattccaaatcggtaactagcattttctggtacaggtcctgcagagcctgcctggatgtccagacttcagctggacccagcttagaatctgtcatgtcagccttcaggacttctgcctgccggaggtactgcgcgctctgcaggctcatcctccgccgccgccgccgcgtcttcccgcgaagcctccgtgggtctctcaggctcctcggagcggccccgcggcaccgcgggtgctggcggcc

SEQ ID NO: 92986 - DNA, 350 bp, Homo Sapiens
  misc_feature (273)..(273): n is a, c, g, or t
agacaaagctggtgccgtgatctctattgcattaatgagacaaatgaggataggaaacatcatgtggcttcccagggctccatggcaggggcgtggcaggggggatttgagtccaggctcctactccagggctgacctgttcccgtcactttcctgctgcccagtgtgagctctatcctgtccagagtcatgaagtattagagcacatggatgtcttatagatgatcttgtccaagtcattcattttagaagagctgatggaacttcagaganggttaaatctcacctggtgcagcgtcacctatctccttaatgacaaaattgagatttcagcccagttcttgactaaa

SEQ ID NO: 92987 - DNA, 743 bp, Homo Sapiens
agggtggcctgaggttcatacaagcaaagagatgacctgggtgaagccacatggatatttttttgcctgtctggggctccaaagcaaggtgcacaacaagtgtcctcattccaggccctgccagtggcagccaagagcacgtcctggtagacacatgtccagcatggaaacaaatcaacttggacatagtggagtgtcaggtcgattgctaagatgtttgtcaaaaatccaggacatgggctttacagtggacatcattgtccagtgtgggaagcctggccccactcagaccctgctcaccctgctaccgacccagctgccatcttcctcagactccagcaggccctccactcctagcacacaggccggattgaatcttcaggaaagaagagcacacccagggtgggacctgaccttcccaaggtcacacaactgcggagcagcagatctgggtcctggatccccaaactctgatgagatgcaggccgcttcttgcccacacagcagcgtgagctgctgtcctgcggtttgaaggaccatctaggtggcctcgcagactgacctccaggaagaccagatggcatcctgctccacacgtttactcttggtgactttggatcacttggttaatttctttaggctttatttcccttatctgtgcaatgagattggtgatgttgtgtttaatggagatggtgatgataacagtagtaaaacacattaaagagcctggccaagataaa

SEQ ID NO: 92988 - DNA, 691 bp, Homo Sapiens
  misc_feature (54)..(54): n is a, c, g, or t
  misc_feature (86)..(86): n is a, c, g, or t
aggccccatcattgtgtggccttgaggatccctgaaggattatggcagctatcnccgtgtcaagaaaaaaaaggctttatatgtanaatggaggcagatattcacactgcagaggcgctgcaagaaaaaggaccaagtcacagcatcattcctcttgcggttgtactgacactgatagtcattgtggccatttgcacactttccttctgcatatacaagcataacggtggcttcttcaggagacttgcagggtttcggaatcctcactatcctgcaaccaactttagtacagtatatttagaagaaaatattctcatttctgatcttgagaagagtgaccaataataatgaggtcagagaatgccacagacaccaggatgacaccttaaaggtgcaaaagaaaaccatctctgcacactaccaaacagacagtgcgtgaacgaagcagaccctcctgaccacagccaaggactgcagagcttggtgaaactggtgctcaaggtagaaattccctgcgattgctactgcaacttatactaaacgtcccaagtgaagtgaagggagaaaaaagagatattaagcaagaaggcccacttgtttatgcattgctttagaagataatctgtaattgcatattaataagtaaagttaacgtaacacttaaataataacctatatttataactgcaaa

SEQ ID NO: 92989 - DNA, 1139 bp, Homo Sapiens
  misc_feature (808)..(817): n is a, c, g, or t
  misc_feature (1013)..(1021): n is a, c, g, or t
aagaattcggcacgaggctaacctcaaggtgcatgccctccactcactaattggctcctctggctgtgatcgagctccaaaagggaaggaggctaattcaaatgggatggccccaaaataagaggaatagtgtgcattttaaaccaggatatgggctatacctgcttacagtacccctttatgcaatctcccagttcattaactctagtagatattgtgaagatactatcaaaaaaaaggttatgttccccccaaatttagggaagccctaagggattccgtatctcctttttgtacagagtttgttagaaaatcagatactggtctgagaaaaatgctgattcagatggtcaagagactaaaaaaaagtactttaaaacatcagaatgaaatcactgaaggcaatccttagctttatgatgtgctgtactcctggacaagatggtgagggcatgtggcaaagcatggcagggaattctttcaaaagtggaatccaggaagaaaattccttgggaaactttggactggattctcaacaaacccttcagagagacttaaagccggtaaaagaccttttgcaaaagtgatccggggggcctccactttgtttctctggatatttctctgttgaaatataggtgtcaagcacgtcccattttagatgctcttcagacttcaaaacattaccttcctgctttcagggagccatttcatcagcttttgtactgtgtattcactgcagaccctgctgttatgcaaggtaccaccatggctaaaaattcacaagacgattcttagttgcactgannnnnnnnnnatttgatctttcacaatgttgctgcttccgtttcaaaaacgtctcaaagctttgatttgattgcagctggattcaaggatacccaaagccaagtttgatcctgaattccccaaatcaaaagtatttcatttcagatgtatgttctatacctggccataataatgaacagcaaccattactggagcatgcttttgannnnnnnnncattaacagtcatttttatgatttggaaacataattagaagattcctattccagactacaaatcaatggatttgattctactacacatttgccaataaagagcaatggtatcaaatga

SEQ ID NO: 92990 - DNA, 609 bp, Homo Sapiens
gcatggtggaagctcgcaaaagcgatcggagcacagtgctactgggaatgttcagctctgactcagaaaggtctcaaagcggtttttgatgaagcaatcctcaccattttccaccccaagaaaaagaagaaacgctgttctgagggtcacagctgctgttcaattatttgaggttgttcgcgacccgcctccaccccatccagggatgagaatggcagccaatctctccggccaagctccagccaaaaaggagcgcacgaccagaaaggaactccctttgcacggaggcttgccccatcaccctttgagccctcccaacacagcacactagtcagcccactgccacgacctccctgccagccagaagcatccgtactgcacgctgtctgagaatgctgggcctggattgcagacagtgccgctgctgatcgcatcaaaaacaaagtcaaaggccatctcacattttacaaatccccagctcatgaacgtgaagctgataggaaatcaccccagggaacccgaaaaagaaacttgattcctctattgctggccttacttgatgtcttttataaaacttgggactaccaatactaacctttttttctgaaa

SEQ ID NO: 92991 - DNA, 498 bp, Homo Sapiens
cagacactgctgctgctgaccgtcgtgatcggctttctctacggcgcgatgctctactacgagctgcagacgcgctgcggacaagccgaggcgatggcgctcaagtaccagcagcaccaggagtccctctccgcccagttacaagttgtatatgaacacagatcaagattagagaaatccttgcaaaaagaaagacttgaacataaaaaagcaaaggaagattttcttgtttataagttagaagccacagaaacattaaatacaggaaggcaagattccaatagcagatacagtgccctgaatgtccaacatcaggtgttgaaaagccaacacgaggagctaaagaaacagcacagtgacttggaaagaggaacatcgcaaacccgcgggagactctcgtaggaacctttcatggccctaaggcaaaattacttgccgctccagccagagaaaggagcaggaacttctaagctcaaagggactgtataccaatttggg

SEQ ID NO: 92992 - DNA, 373 bp, Homo Sapiens
  misc_feature (165)..(199): n is a, c, g, or t
agaaaggtgtgtaaaatcctcagaagggggagcagttgattcagtaagactgcgacaatttaatactgttacgcttgctttgatacctgactaaatgtgactgagtgcaacaagcatttaagaaaatttttagacagtgttttgtttagaattcagggatcatgnnnnnnnnnnnnnnnnnnnnnnnnnnnnnnnnnnnttctacaaagaaaacaagtgttgcctacaaaagtgactgctcacaataccataagttaaatgaaatgaaatgtttgtctcttcatgtttctctgtctttccctttctcaaagtaacaacttgggtttcaatattaagatattctggagaaaataaagaaattaaacatgaaaaa

SEQ ID NO: 92993 - DNA, 544 bp, Homo Sapiens
ggtcagtattctgaatgtttacatctgtttgacattagccatttaatgccttttttaaaggcggtattactcctacagtgtaacagcaaaatgtgaaatcaacccaaacataacatgcatgacaaacacagattgggggcgaaggccctgaacctacatagacattttatatcagcatacagaaaagtaaaatcctccttcagtcctctaccaaagaatatattattcccacaggaaaaactcagaaaaggtgtgtaaaatcctcagaagggggagcagttgattcagtaagactgcgacaatttaatactgttacgcttgctttgatacctgactaaatgtgactgagtgcaacaagcatttaagaaaatttttagacagtgttttgtttagaattcagggatcatgcattctttaatggtgctgtttgttttttatttcttttctacaaagaaaacaagtgttgcctacaaaagtgactgctcacaataccataagttaaatgaaatgaaatgtttgtcctcttcatgtttctctgtctttc

SEQ ID NO: 92994 - DNA, 319 bp, Homo Sapiens
agaaaaagaaaactttggtaagagaaaattgaagctctagatgagtgaaaagattctaacagcaccaagctgccgtaaatgagctcaagtctcctggccaggacaaattacactccagggagtagagagaactcgcctctgaagctgtaaagcctctgctgataatctttacagaacatggagactgtgaaagaaattggaacgctagaaatggcaaaatatagctctgattagtaaagagggggaaagcttctgcaaactacaaaagtggggctatcctatccatcctcattaaattccctgatcagactaaaaaaaa

SEQ ID NO: 92995 - DNA, 447 bp, Homo Sapiens
gtaaaacaccatcgatttgtgtgaacaaacggggaaaatgaagatgcttttcctgatgaagcccaatcatgcagagtatgccagcaaataccttacagctcgaagcacctactacgtttgtaaggtggaacgtgggccaccaggaaccaggctggagaatgcttacagagcttttgtgcctctcctcaagaatccggagccttggctgcttgttgcactgcgcatacaatgtgatgccctggagaggagacgaattcagatgcttaaaatgaaagaagccaagaaggtcgttataattgaaccccctgcaagtgtcccgtccaagcaatcaggacgatcagacaaaaagaagtccactcgcaagtctccgacctttaggaacagaccagacttcaggaagaataaaggtcgccaactcaataaaaccaccaagcaaaagaagtaaaa

SEQ ID NO: 92996 - DNA, 494 bp, Homo Sapiens
gttggtggaagtttaatgcagttcaattaaggatttgtatccaaaagaagttgttgcttgtacttccatttctgcattagtcacactagatatatagtcacttttaacagcattgtgccattaccagtgactttaattactgtttggtaatcttatctacttacaccaatattaattaagtccatctggccgggggaatggggggtcatctcaacatatgttgattgaaaaatgcaaaccataatctttatagtggctaattttctcagacccttcgttcctgaggacagaaggaggtgaacacaccattagttctaaaaattaattctaatataggaacttgttttctctgcctgttttagtgcctcctgttggaatgagctcactaaccagtggaaacaaactgtttatccttctatgatgttgcaactgcctgggctttctaatgcgtcttcagatttcggtttgtactcagaacaagtgagaaaagtttt

SEQ ID NO: 92997 - DNA, 587 bp, Homo Sapiens
tgaaatctcaccatccaagccattcggtccacaggaattggctaagcctcccaaacattttaatccaaaaaggtcagtgagtctaggcagggcagccttattatccaactctgaattagctgaaacttgtcaaccctacaagaaaaaacatcttgttgccaaacttataggcctttggtcaatgatatttctgaggcaaaggagaaaaacactcaaaacctacatgtttcaagcaaagtcaagtcctcttccaggtcctttcgtaagttagattccaggaacaatgcatacggtgatcatgtgaatgacagtgatacgatgaaatattatagtgaggttgacagtgataaagttataatcattacgtgtgacagagggtacaatcaagtcacctctgaagtaaccctaaatgattaggagctcaacaaaaataaaatccaagtgtgaaagagcaaacttataccaactattttatgctcatcatcccttaagaaaccagtagagggaaaaatcactatcaagatcacccatatctgtcttggaggcgatttattttaaaaatatcaataaaatgcatgacataaaaa

SEQ ID NO: 92998 - DNA, 755 bp, Homo Sapiens
  misc_feature (271)..(317): n is a, c, g, or t
actacaaaaaagaattgtatttacagatgacatgaactaatcagatacatccaacatcgtctggaaaacttaatggcatgccataacttaatatcacagtcaacatgcacaacagacctcataattattttttctaataacaaagccaaaagcaaagaagtaaatgaagcaatataaaaatgaaacagtgaaagacaaagggaagtaccacaaaaacgtttcaatgatatcactgaaatgacttgagaaaccagttaggcctctggagctnnnnnnnnnnnnnnnnnnnnnnnnnnnnnnnnnnnnnnnnnnnnnnnggcaagtcctgtcatgaaaatgccctgaagattcagacctttgcaatttttccaaagctccttcccactggaacaagtcttaatggaaaagcacaagatgtacagagaagactgggatcacctctcccacggcattggaagagctgatgaaaaggagcagttcctctatcccagagcatcttctgggtggtgactttttttgcctgtgggccatgcctctctgtcctcacaacagctgcagaatgaaacaccgcacctccaacaaagctcacataccctgccgagctcccctgcgatggaggcttccagaatgcaaatacgagctaggcatctcagatggatttgatttcaatcaacattagtgccaaatgaacatctttgatatgcaaaatgtctatgctactgaataatacagaatcatctttccccacaaaaact

SEQ ID NO: 92999 - DNA, 1088 bp, Homo Sapiens
  misc_feature (428)..(550): n is a, c, g, or t
tggggcgggggaggcttcctcgccctcagaaaccacattcgcagaaacgtttttaactggcaaggtttcgagttcccaaccacagcaccctcagtgatggttttcagaagaccttgttagctcctctcctccagagacccatccttcgctgacatcccaccgatttgggagcaggaaaaaacagactcctgcaaaatacctcttcttccagtgccctgtacccctctctacttacttcgagtccctgcagtccagcaacaaccccaaacgagtgaagggaggagacataggtttgtctcaggctctgccaccgacgggtgatttgggatgagtccttctccagtatcattatcttcaactgtaaaacatgagggttagtccgaatgatctccaaacgcttcagcattaaagttaggtgatgaatcctnnnnnnnnnnnnnnnnnnnnnnnnnnnnnnnnnnnnnnnnnnnnnnnnnnnnnnnnnnnnnnnnnnnnnnnnnnnnnnnnnnnnnnnnnnnnnnnnnnnnnnnnnnnnnnnnnnnnnnnnnnncaacacagctacttattgattggagacacgcacgcacactcaccctctccttcccttgacctcagtcgaatcctcacttttactcagcctcactacctccatccacccctcacatcattccccttccttccccaccaaaataatcatattagctaccaacagtgatccactgcagtaccacctactcacaaacccacacactaatgctcacacatcagaaccaacaatgacatacactcgccgttctctattgcaacctcagaccaattacatcataacctaacatactatccaaaaaaacaacaacacaatcgacgaatactacactacacattaaatctcgacaaccaaaaaatacaaacaaccacaagatctttgtcttactcacaccaacaatcacatactacatccactcctgtctacacaccaaccaacaatatacacatacgataaagacgattccacgaacacaaaaaacagcaacctaccacatccaggctgtatataatcacaagcatacctatcgacatacactccc

SEQ ID NO: 93000 - DNA, 344 bp, Homo Sapiens
  misc_feature (124)..(124): n is a, c, g, or t
gcggctgcgggacgccagggggctgcgggacgtcacgtgctgtgggaacgccaattttagtggaagtgtcaccggcggggtgagcggcggcacgtgttggggcgggacagcgtggagccacggncgccggaagcggaggagtaccgactcttccagcgtctcgggctccttgcagcaggtgcgtgcgcgcccctctggccgcttcctggagctgctgctttttcggaagaagtcgggcttccagagggatggggcgcaggctggagctcactgctagcgcggcaatctcaaggtcgtccgtccttgaggttcatgttcctacctaagtcctggtgagccccaca

SEQ ID NO: 93001 - DNA, 518 bp, Homo Sapiens
tgcggccgcagcgctcgcggccccggacatcgtacccgcgttggccagcggcagcagtggaagcactagcggctgcgggagcgccgggggctgcgggagcgtcagctgctgtgggaacgccaactttagtggaagtgtcaccggcggtgggagcggccgcagctgttggggcgggagcagcgtggagcgcagcgagcgccggaagcggaggagtaccgactcttccagcgtctcgggctccttgcagcaggaaactaaatatattttgccaactttggaaaaagaattattcttggcagagcacagtgaccttgaagaaggtggactggacctgactgtgtcattgaaaccagttagtttctatatatcagacaaaaaagaaatgcttcagcagtgcttctgtattataggagagaaaaagttacagaagatgcttcctgatgtgttaaagaactgttcaatagaagaaattaaaaaactatgccaggaacagttagagctcctgtctgaataaaaaa

SEQ ID NO: 93002 - DNA, 386 bp, Homo Sapiens
aaattaaatcatctctcttatatatgcatccatcttttgttgaatacaagaggctccttttaaatatatacattcagtacttctacatttatgtattcatttaaactctgtactgtagtaaaatatgcattgttttaattcataaggatttcctggcaacaatcaggttgatactcactgcgtttgctgattaagagcttagtgagccactccagggaccaattctcccttctggatgcggagaagcccatgagctattttaggactataatgagactctactgtgaaagcaaaatctgtctaatcttattcttatcacttacatttgtgtaatctgtctatttaagctacctttgggagtaggggtaaaatgttactgaaagcaa

SEQ ID NO: 93003 - DNA, 455 bp, Homo Sapiens
  misc_feature (15)..(15): n is a, c, g, or t
tggacgctcaacagnataggcagtatattgaaattgactgaacacttggatatttgtttgggcctcacagtttttaaaggattctgataaaacagaaagtccagaaaagagcaatcagtatagttgaaagacctggttatgttttccagaaaaatgagaagacttgggattccaggtctgcacctgcttctcctctgattcttctttaccagctatccatatttactccatcctgatgagcttcagctaccactctcgaagtgtgattcttaaatctctatctgcagttcagaactcttctgaataccagaaaccataggtccaattgattgttgaccattgccatctggcattaaacaggacttcaagcataaatccaaaactgaactcatcagatttatcccaaagctcttttttccccttgacaattagtcaaataaaaatataaaccacaa

SEQ ID NO: 93004 - DNA, 592 bp, Homo Sapiens
ctgttgcacatattctggtgaatgaacacagaatcagcatggctttcctttgctgagaaatcactgatgggaagtgagacttgttaaacttgaaagtgaatggacctgagtggaccctttgatcacatcagtaaacatgagcggtaccaaacctgatattttatgggcaccacaccatgttgatagatttgttgtgtgtgactcagaactaagtctttatcatgtggaatctactgtgaattcagaactcaaagctggatctttacgtttatctgaagactctgcagctacattactgtcaataaattcagatacaccctatatgaaatgtgttgcctggtatcttaattatgatcctgaatgtctgctggcagttggacaagcaaatggtcgagttgtacttacaagccttggtcaagatcataactcaaagttcaaagatttgataggaaaagagtttgttccaaaacatgcacgacaatgtaatacccttgcctggaatccactggatagtaactggctagctgctggtttagataagcacagagctgacttttcagtgctaatatgggatatctgcagcaaatatact

SEQ ID NO: 93005 - DNA, 983 bp, Homo Sapiens
gggagagacgctgacaaaggagcggaggagcagtcgcagctgctttccgaggaagccggtgttgccgagattgccaaaatgctttggagtttttaactgaatctaagaaaagtccaaaatagatttgagactgtaaaaacagaaactgcagcaagggggattcagtgccaatgcatcaacaaaaaagacaaccagagttagtggaaggaaatcttcctgttttcgtgttccccacggagctcatattttatgcagatgatcagtcaacacataagcaagtgttgacactgtacaatccctatgagtttgccttaaagttcaaagttttgtgtactactccaaataagtatgttgtcgttgatgctgcaggtgcagtaaagcctcagtgttgtgtggatattgtgattcgtcatcgagatgttcgatcctgtcactatggtgtaatagacaaattccgtctccaagtttccgagcaaagccaaaggaaggctttgggaagaaaagaggttgtagctactcttctcccatcagcaagaagaacaacaagaaggaagaagaggaacaaaagattacaaggaacatttaactgaaagtttatgttttgagcagtcgtttcaaccagaaaacagagctgtatcctcaggacctagtttactaactgtcttcctgggagtggtgtgcattgcagccctgatgctgcctacactgggggatgtggaatcgctggtgcctctctacctccacttaagtgtgaatcaaaaattagtggctgcttatatcttaggtcttatcacaatggccatacttagaacatgagcaaggatttcaattgacttctgaagtaaatctgtcttgaaaatatgaatgtggactgccttttatctctatttcactccattaacatgcaacaaactattgaatgatttcaaataattgcaaatgtataatatatattttaaattataatttaatttgaaaaaaaa

SEQ ID NO: 93006 - DNA, 481 bp, Homo Sapiens
ttaagccagagctggttattcattatcagactaactacatactagtccatgctagtgtcagcctatattaaaatagtctttccttgccatagtgctggcgaaaacccaatcccttctgatgaaacattgcttcttgggaagacaagctgaggaaagcaatgaagatcccagtgtcggcctttattgagctatgtatgagggtcagggtccctcaactcctagtgactatgaagcagcagtgtgatggcttcgccctctttgcccctctgtcatcaatcctttgcatgtggctattttaagcttctcagctttcttttgggaggcttcatgtgtaacttattatagaaatgttactgaaaagctgcctaaacaaaaaattgtataaagtaggaatttgtataaagtaatactgttgtaaatccatcttcaagatgtaaagaatcaatttgtaaagtgtatattttcacttctcccttcaaaa

SEQ ID NO: 93007 - DNA, 336 bp, Homo Sapiens
gaaactgcatccagtcagtgcaggtcattaaactcaagcaaaagttcactgaagcaaagacacctattgtttatctcacaaaataactggagggttttccagagagagtggagcacaaggtaaagggctgttcttagcaaccagagctaaagagctgtgtgggcttacccatgaagagtactgaaattcaagttgtgttattagaagtgaagttatatcctgtgccatccatgtcccttcctacttccccatgacagacgtaagggtaagacttctggctaagagaaaggtgtacagactgtgctcctaaaataaaattaaattaaacactaaaaa

SEQ ID NO: 93008 - DNA, 889 bp, Homo Sapiens
cgggttcccgggccgacatgggcgccgccgcgtgggcacggccgctgagcgtgtctttcctgctgctgcttctgccgctcccggggatgcccgcgggctcctgggacccggccggttacctgctctactgcccctgcatggcgcgctttgggaaccaggccgatcacttcttgggctctctggcatttgcaaagctgctaaaccgtaccttggctgtccctccttggattgagtaccagcatcacaagcctcctttcaccaacctccatgtgtcctaccagaagtacttcaagctggagcccctccaggcttaccatcgggtcatcagcttggaggatttcatggagaagctggcacccacccactggccccctgagaagcgggtggcatactgctttgaggtggcagcccagcgaagcccagataagaagacgtgccccatgaaggaaggaaacccctttggcccattctgggatcagtttcatgtgagtttcaacaagtcggagctttttacaggcatttccttcagtgcttcctacagagaacaatggagccagagattttctccaaaggaacatccggtgcttgccctgccaggagccccagcccagttccccgtcctagaggaacacaggccactacagaagtacatggtatggtcagacgaaatggtgaagacgggagaggcccagattcatgcccagctggtccggccactatgtgggcattcatctgcgcattggctctgactgggaagaacgcctgtgccatgctgaaggacgggaactgcaggctcgcacttcatggcctctccgcagtgtgtgggctacagcgcagcacagcggccccctcagatgactatgtgctgcctgactgaaggagatccgaa

SEQ ID NO: 93009 - DNA, 394 bp, Homo Sapiens
gctacgatgagaacatatgctgctgtgtaaagggatcatttctgtgccaagctgcacaccgagtgacctggggacatcatggaaccaagggatcctgctctccaagcagacacctctgtcagttgccttcacatagtcattgtcccttactgccagacccagccagactttgccctgacggagtggcccggaagcagaggccgaccaggagcaggggcctccctcccgaactgaaagcccatccgtcctcgcgtgggaccgcatcttctccctcgcagctgcttcttgcttttctttccatttgacttgctgtaagcctgagggagagccaacaagacttactgcatcttgggggatggggaaatcactcactttattttggaaatttttgatt

SEQ ID NO: 93010 - DNA, 477 bp, Homo Sapiens
  misc_feature (459)..(459): n is a, c, g, or t
caagggttgggatttaataaaattaataatttctacagattaattgaggacattctgaaatgaaattggctttccctcctgcatagtggtgaatgacaacactacgatgcttttgtgccactgtcttgatatgtgctgaggtcttgatatgtgctgaggtcttgatatatgctgttttgagaactgctacttgattccacacacccttccttggcttccatctcttctcattttttcaaagtatgattttggtctctatccaaagagtagaacctcttgataagtttctgaatgtcaaacttctttttctagcggcttcctggcatgtcagagctccacagcaagttttataactttgacagtccttggcgatcaatgaagttgactggactccattacttttccaaacagaaataccttgcagtccaatgaaggaagtagtggtaatgggatgtctanaccagttgaccactgcaa

SEQ ID NO: 93011 - DNA, 389 bp, Homo Sapiens
ccaagaagggtcggaagaggccagccctagtttagggggaggtcaggacagggtgtgctgacgagtttgtctgaactgagatccgaaagctctgccaggaaagccaccaatgcaatcgacttgcaattcacaagttgcctgctcaacaccagccggtgtgcatgcccggatctggactaggacatggcttccagtcagcttttgctgccggcagtgatgaagaaaggcagcggttccctctgctggttccttctgcactgttcagttgtcataagtccccagggattgtattcctctgggggaagcagggcagggcaggctccagagggccagtgaggcgagcagttgtctaacacctttcttggaatgaaatgaaatttacttttatc

SEQ ID NO: 93012 - DNA, 179 bp, Homo Sapiens
catggatgtacacatggacaaggttatcaagacacagtcctggaattagttttttgcttcagctgttgttactgatctctgaccagatgtaatatcctaactgtaaaacatgcctacgtttgtaactgcacgtcacccaccaaaacaaaataaaaccccaaatacctttcccttcaaaa

SEQ ID NO: 93013 - DNA, 938 bp, Homo Sapiens
  misc_feature (829)..(829): n is a, c, g, or t
  misc_feature (908)..(908): n is a, c, g, or t
  misc_feature (913)..(913): n is a, c, g, or t
cttgcctgaatttgttctaaaggaatatttaagagacataattttcttctctttaccataacattacacaaaactttttcctaaaacacggttgtgaggtactgatgaggtgtaagtggagctgttaaaaacagcagtgctgtattgcagttatgtatattcgtgtacagtatgtttagatcccaggtaaacatattcttttctgagaggataaatacctgcattcagatattccaggtaaatataattgagtcagggagtagtaaatctgatggagaattcactttggggaggggaaaaagaatagtatgcaagacccttattggcttttaattatacctgaaaccaaaatggatatttttagtctctctgcatgtgagatttggtgtaacaagatagaactataatatatacagtatatggaaggatagatatagtgctttgttcattttaattgcaaagctgccaaaatagttgaagcttaattacttgacttgccttgatttataggactggggcttggagaaaatgagcagatgttcctctaagacatcgattacagaagccttatatacatggatttgattttgtatttgtagctgaaagtcactgttgtctaaaactaacttttctaagttatcaaaacaacctaatttcttttccaacaaggagaacttaatggcatgaaggattgtgtgacacattggaaaagccagcttactgccactctcttcctttggccattagagggaggtgttgcctttcattgacgcttagaagcaaattgttcacttgttaagaaaagtaaatccttaaaaaaaggaaaggnaaaaatttaaccaatttttcttaatacccagaagggattttactcaatatttccctaggtaaggaaagggggggttatnttccncttaaaaccccaccgtgtattacaa

SEQ ID NO: 93014 - DNA, 825 bp, Homo Sapiens
  misc_feature (804)..(804): n is a, c, g, or t
  misc_feature (806)..(806): n is a, c, g, or t
caagctaagaactgaaaagttctgattgacaggttgaaagacctggagcacttaagtcttctattattcaccaatcttttctccttcagcaggtggctccaatgtttaaaacctagaggttgaaccaggggttgtgaaccttaaatagagtgttatgagctactgactcttaaactttgagcttcagaggaagttaacagcaagtctgatgactcatatgcattctcacatgcttgaaggtggctgaagatgaaaatagccgaactagcagcaattgttttaaaaaccgcaaggattattcgccgttgaaaataaaatcttgtgctccattcaagtacaggcacatcttctaaggaacaccaccacacaaagtatcatacccattgtatggatgacaaagaacacttagagaagatactgcattgaaaaacgccacagttacaaagagatcaattaacagaccaatcttaaagatcaagaagaacactccgagaagataagaaaatggccacagttacaatgagatcaaaacagctcaatcttaaaatcaagtctctcactccaaatggagatttttatgctacattattaccaaaataattttgtttctcttttcctcaaggaagcacacatttgctgtgagcattatatattacttattaaaatttagtgattttagaatcgtaagaactttagtagaatatagttgaaaaatctgcataccttgtatagatctaaatcaaaggatactagaaaatacaagctatataaagggattacttaattattcctattttatcctgngngaaattagaaaagaagaaa

SEQ ID NO: 93015 - DNA, 365 bp, Homo Sapiens
ggggctcaggcacccccgtggatgaactggacaagtgctgccagacacatgacaactgctatgaccaggccaagaagctggacagctgtaaatttctgctggacaacccgtacacccacacctattcatactcatgctctggctcggcaatcacctgtagcagcaaaaacaaagagtgtgaggccttcatttgcaactgcgaccgcaacgctgccatctgcttttcaaaagctccatataacaaggcacacaagaacctggacaccaagaagtattgtcagagttgaatatcacctctcaaaagcatcacctctatctgcctcatctcacactgtactctccaataaagcaccttgttgaaagac

SEQ ID NO: 93016 - DNA, 380 bp, Homo Sapiens
acctgtgtccatctgcacccctcgtctccatcaccgttgctcagagtgacttgttctcctctccaaagggacgcatgctttataggtggtcatttgtgatatctgtgggcaccagccagcccagtgaatccctgcatgtgccacaggcctacccgtcccagtcacaaggactctggcctaagggtgcaagccagagctcccggcccccaccccatcacagttactgtgagccttggctaaatgtgcaacagtgtctatttcaagatcactctgggacttaaaatagtctgtcctggcacacctggttttctggtggatttagtaatggagttaccatatgctgtaaatcatgcaaaatcaataactcaagagaggtgggc

SEQ ID NO: 93017 - DNA, 401 bp, Homo Sapiens
tttgaagttctcaggagaccgcgtattcttagattcagccgccgaagccatacagagtgcgcccctgacgttttagggcatatactacatccatggctgtgacagttttgcgcttggcgtgctccgtataggtgacggcgtctcgaataacgttctctaagaaaaccttaagcacacctcgagtctcctcatagataagaccggaaatgcgcttgacgccaccgcgccgagccaaacggcgaatagccggttttgtaatgccctggatgttatcccggagcaccttacgatggcgcttagcaccacccttccccaagccttttccgcctttgccgcgaccagacatgattcctatcgcagtgcccggccgtaatggacactctgcgttgataccactgccc

SEQ ID NO: 93018 - DNA, 416 bp, Homo Sapiens
gccctcaccaacccatttccccagacacagtcagaactggggtcagctgcagagatgtgaaccgcaagaggaaggagacccttaacaaggaccaggaaagtggtgtatgcataaagaaaggaagctgttcttgaaatgtgccagtgacctcatccctgtccctgaggccagcatgagtgcttgcagtgcaagtgacccatctgccagggtgacctcaggcctcggactaacagcaaataaagccatgaacacactgttctctggacaattttgcaatttttcctttccagggcctacagctctagacttgaggacctgcaactcttcccctttgttcactatgactctaacaaatttaaaacatgtcagttctctccaaccccaagaaatgtgaataaatgtttccgaaaaccaga

SEQ ID NO: 93019 - DNA, 465 bp, Homo Sapiens
tggggaaggggagtgcttagtctgcttcctgctgtcactcagcaatgtgtaagtcaaaatcagcacattggggtactcacagcactcgcagggaccgcagcccgttgaaggcgtggacggggatgcacctcagccggttgtagctcaggatcctgtggaaaaggaggcatgtgccctgttgtgtctttctattctctaccatgcataggtgcactgttcacgttgtgaaacaaagcaaatggtttatcttttcaatgttgatatattgacagaacatcccctaaagggacaagaaacctcttcaccaatccaggaagcgcactggctttatttcctcagtttactcaagttctgtggcaggctggctttctaaccagcttgttcgtcacctctctctcctgtccaatgatgagtactcacaatgtgtaaagctaatgggaaataaatgggtgtgagcaaaaaaaa

SEQ ID NO: 93020 - DNA, 1081 bp, Homo Sapiens
  misc_feature (175)..(175): n is a, c, g, or t
  misc_feature (246)..(246): n is a, c, g, or t
  misc_feature (255)..(255): n is a, c, g, or t
  misc_feature (430)..(430): n is a, c, g, or t
  misc_feature (472)..(472): n is a, c, g, or t
  misc_feature (502)..(502): n is a, c, g, or t
cagattatggcccagattggatcatatgttccagcagaatattcttcctttagaattgctaaacagatttttacaagaattagtactgatgatgatatcgaaacaaattcatcaacatttatgaaagaaatgaaagagatagcatatattctacataatgctaatgacaaatcgntcatattaattgatgaacttggcagaggtactaatacggaagaaggtattggcatttgttatgctgtttgngaatatctnctgagcttaaaggcatttacactgtttgctacacatttcctggaactatgccatattgatgccctgtatcctaatgtagaaaacatgcattttgaagttcaacatgtaaagaatacctcaagaaataaagaagcaattttgtatacctacaaactttctaagggactcacagaanagaaaaattatggattaaaagctgcagaggtgtcatcacttncaccatcaattgtcttggatgccaaggaantcacaactcaaattacgagacaaattttgcaaaaccaaaggagtacccctgagatggaaagacagagtagctgtgaaccatctagccactaggcttgttcaaactgctcgaaactctcaattggacccagacagtttacgaatatatttaagtaaccctcaagaagaagtacaaagaagattttcccaggactgaacaagttccagaaaagactgaagaataatcacaattctaatgtaataatatatcctaattcagggacctaggaattatttttcccccttagggttagggaaaataacatttgccaaatttcatattttaatggaaaattacattatattaacatcacaattgtcatctatatattctatatgaaaaatatttattataacttaacaaatgagaactacttaaaggaatggtttttatgttaggagaaaatacaatacaccacttttttctcacaaaaattcacattattaagacctaagttcatttatacttacaagttatagtttaaaatattattgtaaataccctagtttaataaacacctttctttttaggtctggaaaa

SEQ ID NO: 93021 - DNA, 282 bp, Homo Sapiens
atatatacacctagtatgtacccacaaaaattaaaaataaagtaaaatttcaatgattaggaagaccattgttaatatcagtttcctttaaatgtttctataaatttaatacaatttcaataaagctcccaatatttattcttagtactggaaaaagttttccaaaatgtgtatggcagaaatagggccaaaataggcaagaaaactattttcgagatgtcagttttcctcaaattgttctattaattaaacgccacctgaattaaaatttgacaagtgaaa

SEQ ID NO: 93022 - DNA, 457 bp, Homo Sapiens
ctttcttggactgattggccagaaccttccttattagaaaagccagagtcctctcgtggcaggaggagctactcctggaggtccaagggtgtcagaatcactaacagctgcaaaaaatccaagtaacaccttctgagtagctgctgtcccacacaatagggtatgaacctgcgctcctccatcgggtttggggagggagcactctgggactgtgagacaaggaagcagggccagcagtgagactatgagccaagcaaagagaagtctcagtggagcatgaggagggagcagtccagatgccaacaaggaaatgcgtttatggctacaagagtgcctctgctttctcctcctctcctcccaccaaggattcttccaccttaatcttgttttcatatgcctcttcttacttcacccatgtttgttgttatgcaaataaaggttttctctccaaaaaaaa

SEQ ID NO: 93023 - DNA, 506 bp, Homo Sapiens
gcggccgctcagcctctgccatggccggctctggcgcgtggaagcgtcaaatctatgctaaggaaggatgatgcgccgctgtttttaaatgacaccagcgcctttgacttctcggatgaggcgggggacgaggggctttctcggttcaacaaacttcgagttgtggtggccgatgacggttccgaagccccggaaaggcctgttaacggggcgcacccgaccctccaggccgacgatgattccttactggaccaagacttacctttgaccaacagtcagctgagtttgaaggtggactcctgtgacaactgcagcaaacagagagagatactgaagcagagaaaggtgaaagccaggttgaccattgctgccgttcagtacttgcttttcatgattggagaacttgtaggtgagttgtgttgccaactcactttccgtttacctttcctcgagagtctttgtcaagctgtagttacacaggctttgagggttaacccatcttttca

SEQ ID NO: 93024 - DNA, 229 bp, Homo Sapiens
cggaaggcactattggtaattctaattcaccccacctaagacagagatggacatatcataggctctgcataaatatttacttaaaccaaataaccttataatctactgtgtcattagtagacataccaactcactagagaagggagatcacataaaatctggaagataatttgcttgctgggtttcaccatctctgttatttgttcagttatcaaaggaacagaaattg

SEQ ID NO: 93025 - DNA, 303 bp, Homo Sapiens
ggaggacagactgagagaagatcacctgcaaactctctgaagcagatggtgtagtctgtgtagcactagaatgcagatgtccacttcacatgatggtgtgagtttgcacagggccatttccttggtgacctgtgtgtcctaaatccaaggggactctcccagaacattctgttgtgataaagattctagggattttctgattcctgagatgggaagaacttagttcatgtaatggcaagttgggggctcaggatatgattcaattttaataaaaacaattaccgcaattaaaaacaaaaaatt

SEQ ID NO: 93026 - DNA, 664 bp, Homo Sapiens
  misc_feature (313)..(345): n is a, c, g, or t
atttggcagtgtctgtcaaatatcaccacgcacacaccattttatattctactcccttataccctctacctcattccattcatattaatttgcattttcaatatttttcacttctccctattttgagtgggttcccagtttctctcaatgggagaaagtacatcttccattgctttcctgggactggggatttttcccaggcaaaatttaccagcaatagagtcaaagcctcctcttgggttttgtaaaaatcccaaggcccttgaagagaattatgaagagtttcctggaggaaagagaagagggcaaatannnnnnnnnnnnnnnnnnnnnnnnnnnnnnnnnggagagaaatggtaattctctccagaaattcccctggatggagaaagggggagccacagggaatctcacactgctcagcagcagtttccgggaagcatcagcagaggctggctgcatgttgtatctaagggctaggatctcagcaccaggggcccagtctcagcgaagattcctgaacctgagcactgggtgtgtggaaggagaatgctgctggcttttaagggaccataggctgtgtccatgacctcattgccattctcaatttatagagacagaattgaaagctaattcagttttctagcttggctgatccaaaaaa

SEQ ID NO: 93027 - DNA, 858 bp, Homo Sapiens
ggggagccgcttcgggctccggatgtccgctggggcccgacgcttgggtcccgacgcgcggttcgcactttccaggtttcttccccagggaacagagcttgagcggggggccacccccccgtcctaccggagttctgaggtgcggtcaggcgcggagagcggacgcccagcgccagattctgtgggctccggagttcaggcccactgagccgcagctgagcacaggcggggcaggaaaaaggatgaggtaagtttgttcctgtcaattgggaaccccctcaaccacttccattccccaaatacctgcgctgctaccgatgcctcttggagaccaaggagttagggtgccttctgggatctgacatctgcctcaccccagctggcagcagctgcatcactctccacaaaaagaacagcagcggttctgacgtcatggtgagtgactgccgaagtaaggagcagatgagtgattgttcaaatacccggaacttctcccgtgtcctggcttctggatattctctcaatactgcttcctggatttctgcaatgaccctcaaaacagagggctctatactccttagtgtgactgcagcaaactttggtgtaaaattccaccagtttccagccaccttcctgacttctatctgggcttggccaggacttctagtccctcataccagccctccttgcctccctccagccactggaccccagccttggctcttcctcttggttgacgcccttcagcacacttactgctactctgtacccccagccctactgcccaccaggtttcctctcttgtcccctagtccctggatgtttctcccaaataaatttgtgtgtaaactgtaaaaa

SEQ ID NO: 93028 - DNA, 518 bp, Homo Sapiens
aataaaaatctggaggatcttgcatccggattgctcttttccttttccctgctcttcccagaaccccctcccaagtccatattggaaagtgggggcaatgtgctgagtgttccctaaaaaggaaaatatggaacccaagttagcagctcctggtcgaagaaaaggacagcaataggacagacccaaatggcaaaggcaaagacgggagaatgactgtgcagttgtgttttctgtaaaaacaaatttatgcacaaccatacatctttcagattctccgctgtaaccaacctccaggtcacagccacaggacttcccacggacttcccctgctcttaaagcaaactgcagaaccaagcgtggacttctgctcctgagggggacggaaggacagtcccctgcggtcatctctataggagatgggggccatgggtgggagagaaactccctgttgcactttgtagccctcagtatgattaaagtgtttaccatgtacataaattatgctttttaagttcaaa

SEQ ID NO: 93029 - DNA, 899 bp, Homo Sapiens
  misc_feature (243)..(251): n is a, c, g, or t
acgggatggcaaagtccacatagtgcagaggagaattgttacagagcaatgctagatgaaggagctgaggctggagaagttaagagacccctgctagataggaaggcacgtgagaagtatactgctctgtctcctgtggagtaaaaagactttggcgttctcagaagaaaaccaaatgagatcacacgaatgagactgctggagcaatctaatgcaaatatctactacagattatcaaaaggnnnnnnnnnggaggggatagggaagcttaagggaggagtgctgtgaagaatgttgtcatttcttctggactgctactaagtaaaagttatcttctcacctcactcaccaattcctgccttagtaccacagcaattatctttgcctaaacacattaacggggaaaaatgttcaggcttttggagaagagctacaagtggtggacggtggccacagtgaagagtggggtaacttagactaaacactataggagccatcagaagaaatttttccaaactgcagcttattacatgggtcacacaaggacagtttgcagcataaggacagctagctgcttatacaagaacatgtgcctgacacagtctcacaagcccagtccaaaactacaagggcctaactgtaactccaggattacaagtcctacctaataactattgacactcgccagtcagaactcaccagctcttttgttgctgccagcaccaataagctttcttccaaaaccaacgcatagcctccgcctttcccaataaactctaactttttcctttattctgtggacactccagaggccaatctggtctgtatatatgtcccagattgcagtcctacttcttgtatattattctcaaataaaacaatttttacttaaactttaa

SEQ ID NO: 93030 - DNA, 737 bp, Homo Sapiens
gcttctccatatggctaatttaggcttcctcacagcatcataatcttaggattgcaagaggggacattccaaaaagacaagcctcaatgtgcaagcctttacttttatcatgcttactaatgtgtcactggccaaagcaagtctcatggccaagctcagcgtcagtgtggggaggaactacacaagattgtgaatattgggaggtgtgacatattggtagtcatttagactagggacagaccacccttaatccaatcaagagaataattaaaagttacttccagggtatagcccagttccaacttaaaatctttcctccttaggtcctgaactcaatatttttacccacccaatcccacacccactccccttgaggcagttgaaaactctggctagtttctcagcctctctccattactgctttctgaatgttaattgcctcgaagggaaaagtggcaccaaattctggactcaaaatcttggatttaggcccctcagactgttgaagttctactgctccagaaaagagtaataacaggatggagatggagtttcatgacaaaaatgaaggtgaatatgatgtggaaaatacaaagatggaagcaacaagctaaggatgctggggcagaaagatggaacctgggttactcatgacatcttgaaactgctgcagccatcctagactggctgcctctagacttaatatgtttagaaagtaaatcccaattttattaaaa

SEQ ID NO: 93031 - DNA, 781 bp, Homo Sapiens
gtgcttccagattgaactatccaagaactacggcatgtccgagtggcgagatgatgtgaagaaggtcctgctcaaggcgggcctacagaacctacccatcaccttcctcttctcagacacccagatcaagaacgaatccttcctggaagatatcaacaacgtcctaaactctggtgacattcccaatctgtatactgcggacgagcaggaccagatcgtcagcaccatgcggccctatatccaggagcagggcctacagcccaccaaggccaacctcatggctgcttacacagggcgtgtgcgcagcaacatccacatggtgctgtgcatgagccccatcggagaggtcttccgagctcgtctgaggcagtttccctccctggtcaactgctgtaccatcgactggtttaacgagtggccggcagaagccctgaagtctgtggccaccgtgttcctcaatgagatcccagaactggaatcctcccaggaagaaatccaaggactgatccaggtctgtgtgtacatccaccagtcggtgtccaagaagtgcatcgagtacctggcagagctgacccgccacaactatgtgacccccaagagctacttggagctgcttcatattttctccatcctcatcgggcagaagaaactggagctgaaaactgccaagaaccgcatgaagagcggcctcgacaaggtgggcccaggcgagtccccgtggacaaggtcagctgcctgcaggctgcctgctcactcagccctgactccagggtgacaccat

SEQ ID NO: 93032 - DNA, 408 bp, Homo Sapiens
aaagacatttaggaccctagaaactaaatcttgtcaccaagactttatagtaaagtagtagcaaaattatttttaaaagactttcttccttttactacccatttcctctcttgggaaagctgatgagcaaattatccaagactcatttctttattaggcaaagtcagaatatttcccctctgaaaatctgaattatgccctcattctttttcaagaaatatctcaaagagcaaatagaattaaacatgacacttgattgtctgattatttggcatgtataaaattatcatgtggcttaatgtgccttaagtgaaaatttaaacttagacctgaaacctttacagttggatgtagcgttgagcttttgcatgttttctgtataataaaccacttttgttttgttaaaaa

SEQ ID NO: 93033 - DNA, 575 bp, Homo Sapiens
aatgtaaggagccaataagggatccctatttgtctcttttggtgtctatttgtccctaacaactgtctttgacagtgagaaaaatattcagaataaccatatccctgtgccgttattacctagcaacccttgcaatgaagatgagcagatccacaggaaaacttgaatgcacaactgtcttattttaatcttattgtacataagtttgtaaaagagttaaaaattgttacttcatgtattcatttatattttatattattttgcgtctaatgattttttattaacatgatttccttttctgatatattgaaatggagtctcaaagcttcataaatttataactttagaaatgattctaataacaacgtatgtaattgtaacattgcagtaatggtgctacgaagccatttctcttgatttttagtaaacttttattgacagcaaatttgcttctggctcactttcaatcagttaaataaatgataaataattttggaagctgtgaagataaaataccaaataaaataatataaaagtgatttatatgaagttaaaataaaaaatcagtatgatgg

SEQ ID NO: 93034 - DNA, 685 bp, Homo Sapiens
ccgctttttgaagaagggccggaagaaaacagtgcctatgagcagttgctgtctcgcttggaagacatcgctgaggaaggctcagagactcaggtcccaggactggacatatctgcactcctgccttctgacttcagccgctacttccaatatgaggggtctctgactacaccgccctgtgcccagggtgtcatctggactgtgtttaaccagacagtgatgctgagtgctaagcagctccacaccctctctgacaccctgtggggacctggtgactctcggctacagctgaacttccgagcgacgcagcctttgaatgggcgagtgattgaggcctccttccctgctggagtggacagcagtcctcgggctgctgagccagtccagctgaattcctgcctggctgctggtgacatcctagccctggtttttggcctcctttttgctgtcaccagcgtcgcgttccttgtgcagatgagaaggcagcacagaaggggaaccaaagggggtgtgagctaccgcccagcagaggtagccgagactggagcctagaggctggatcttggagaatgtgagaagccagccagaggcatctgagggggagccggtaactgtcctgtcctgctcattatgccacttccttttaactgccaagaaattttttaaaataaatatttataataaa

SEQ ID NO: 93035 - DNA, 1225 bp, Homo Sapiens
  misc_feature (195)..(204): n is a, c, g, or t
  misc_feature (297)..(483): n is a, c, g, or t
aggaatatagaacagtggttcaaaaagcaggctggtacggtcggaatcccgggatatcgtcgaccacgcgtccgttttaaggaacttcagagcagtatatattctgtctaaactcactgaatattttaagtgtaaatcaggtgtccaccaacctttatttttgcatgcaggagatgtgactgtaaagtagggagnnnnnnnnnnggagacagagtttcacccttggttggcccaggctagaggtgtaagtggtgcaagtctccgctcacggcaacctcgtggcctcccaggttcaannnnnnnnnnnnnnnnnnnnnnnnnnnnnnnnnnnnnnnnnnnnnnnnnnnnnnnnnnnnnnnnnnnnnnnnnnnnnnnnnnnnnnnnnnnnnnnnnnnnnnnnnnnnnnnnnnnnnnnnnnnnnnnnnnnnnnnnnnnnnnnnnnnnnnnnnnnnnnnnnnnnnnnnnnnnnnnnnnnnnnnnnnntgagccactgcgcccggccaaattatttttgtgggtagattcattctctttacctaatagtcataatttagtcagtgaagggacaacatctggggtaagagctatggaggaggtgctcagctttgtgagttttgtgccaggcatctttgctgaaaatggagatggcagcaagtgtgaatctgggggaatataagggaatgacaagaaagccttaagagtagatcggaaggaagatatgggtaccagaatagtcccttgtggaggccaggccagatcagagctcagggtttgaaagtgggcctgagtaagggtcctgctagagaaactgcagatggaagctgagcagttaccaactgctaatgtgccaagtataccaagcacagcatgtgtcctgtagaggagcattattttaaaacaatgttctaactatcatctaccaaaataattgtggtaaaagtgtagtattttattttttccttttatgtcagcaatattttaaaatattgatctgtttatcttatatttttatggataaatgtagtatttgcctcatgattgtgagccactgagagtgcactgaacctattcacatgtctttaagatgttttgctgtgttaaaattttaggagagaaaaatacaagtgaataattatttaataggcatttattactttattttggagttgaattctgtcatttgaaaaagttcagtaatgtaataaatacaaagtgatctgcactg

SEQ ID NO: 93036 - DNA, 1150 bp, Homo Sapiens
  misc_feature (385)..(460): n is a, c, g, or t
  misc_feature (520)..(521): n is a, c, g, or t
  misc_feature (537)..(551): n is a, c, g, or t
  misc_feature (981)..(989): n is a, c, g, or t
  misc_feature (1011)..(1011): n is a, c, g, or t
tgagcgtcctccatcttccaggatggcagcaatggcctgtgcgcctcaccaggcccacgaggagcagcagcgctcggcccggagcagcaggaaggcccctctgtggagcgcccgccgtctgctccggggtggttcagtcactgcttgttgacatcaacatggcaattgcactcatgtggactgggaccgtgcgagctgccgtgtgggatagtcgggtgccaggacaatgaaatactccagcacgtgtggctgacgaatttgtttctacagaaataacagctggggacaactgcggtgatgatgtaaaaaccttcccataaaatgtaagaaaagctgatgaggctggtgacgttcagcctttgtcaataaacctgtcatgtgcggnnnnnnnnnnnnnnnnnnnnnnnnnnnnnnnnnnnnnnnnnnnnnnnnnnnnnnnnnnnnnnnnnnnnnnnnnnnnccactcaacaccatatcactccctccccaacaacgccccttaaaacccccttttcaaacnntatttttctttgcggnnnnnnnnnnnnnnngcaaaaattttcttaaaaccttcccctttggggcgccgcgcgcccccaaacaagaaaaggaacaacatgggctacaactcgtttccccaaaagcaaaccccccggggaacaagaacaaggggccggtggcatccctccccacaaaaaaaacacccccccgcgggaggacacccgcggggtgtccttaacaaaaaacacccaatagagggccccttcggcggaggtctctttttcggggcaccccttccacaaagggaggtcctcacgagggggccctcccaatattataaataatcgcaccccccgcggcgcgtgtgcacttttcccgcagaagagtgtgggtgagaaattctacaaaaacaattctctcgccccgagagtgcgagaaacccccccacaaaacctgcgtgtttatgatacccctctacannnnnnnnnaggcgcctaccaaaccaacctntgcgcggcttccggcgaaataaataatccctccccacacgaggttaaacccgcgcggttgacaacacaaacgtccctcccttacttttggcccccgctttttcaaaatcccctaacgcggggggcgaacacctactcgc

SEQ ID NO: 93037 - DNA, 758 bp, Homo Sapiens
acagctgccagtgcaggcatgcagcaatgaagctggttcttgccattccacacggcccttcagagactggaaataaaatagcaatctaaatcaagtgaaaactccactttgggagtggagccaggtagtgaggggctggtttctggttcccaggtttgtgctttataaatccacagagccttgaccaatgcaggttaaaagggacaagaggaatgaggtgtgttctttggagctaggtgagtctggcacggcaccaggcagcagcaacatgtctggcgcaagcccaggcttaccccttctctctccagaacatcaaatcctgcaacaacacagtcagcacattgggtggcatcatagtgaaggaagaaaaatcttccttcacccagcactgtaccagcacggagcatgggagagagtctgtgcataaccccttacaaggcagacaccagcacagaggaccaggaagagaaagcatgggcagaaagaccttgttttaggaccacaaagtcttattttataatattatagtcttcatttattgatactaaatttgtcccaatctaaatccattttctgagaaaatgtttatattactcagtttgcatcagtggcagtttacatctctaggctcttattacacggtccccaagaaggcctactcgtttactaacaacaatggggaatgacaatgaaaaaaacctttaacattttaagtgtcttttttctttcattataaaagggaaaagccttcattatta

SEQ ID NO: 93038 - DNA, 486 bp, Homo Sapiens
tttttaagttttaaaactttttattcaaattcagaatattttatatttcaactaaattttaaactttctaaatgaaagtttacaacttgaagttcacactgctgtattgctttaaaacttaaaagcaaataaactttgtcaactaaaatcaaagtaaccaatatctggcctgcctgtctctaagatggccatgctgtcaccgcattcattattcacagtcagtgacccttagaccaatacttacacaagatttctttcaaatatgacactgtggagatggccacaggaggtactacaaaaaccaagtgctcgattaccacttaacatgttcagcttgaaatgactgctacctttgccttcaattccttcccacacacccaggtatacaaatatcttttataccaagagtccttgtgaaagtaaatagagggaactcccagggataagggagggcaaaaaacaggaagcacttgaagccaaaatctg

SEQ ID NO: 93039 - DNA, 434 bp, Homo Sapiens
gtacatctggaactagaaccagggcctccggtacgcaccttgtgtatttaaggggtaggcagcatcgtgggcttcttggatgcctgggccaatcctaagagaggactgcacacacagaatttagggtccacatcaggcaaccgcctgagcatggtttctgcacaccatgatttcctgctgctcctctggtaccaggggagtattcatcccttgaaacctacccctggtattagagctcctcacctttgtcctgccacttgaatgtatcccttcccagtgttagttgcaatgcagtatgcagcatctgccgtgaaactaaacaaccgtttaaaaactgttcggcagcaatggaattacaaattgtatatccagtttgggtaattttaaaaaatttaataaattatttcatttttattattgtgagaccccatctc

SEQ ID NO: 93040 - DNA, 691 bp, Homo Sapiens
ggggatggggatcttcagcgaaggaactctggccacccaaacaggacaagagcacgcctggggccaagcagacgggcaagtggagccacctctttcctccctccgcggatgaagcccagccacatttcagccgaggtccaaggcaggaggccatttacttgagacagattctctcctttttcctgtcccccatcttctcgtgggtccctctaacatctcccatggctctccccgcttctccgtggtcactggagtctcctccccatgtacccaaggaagatggagctcccccatcccacacgcactgcactgccattgtcttttggttgccatggtcaccaaacaggaagtggacattctaagggaggagtactgaagagtgacggacttctgaggctgtttcctgctgctcctctgacttggggcagcttgggtcttcttgggcacctctctgggaaaacccagggtgaggttcagcctgtgagggctgggatgggtttcgtgggcccaagggcagacctttctttgggactgtgtggaccaaggagcttccatctagtgacaagtgacccccagctatcgcctcttgccttcccctgtggccactttccagggtggactctgtcttgttcactgcagtatcccaactgcaggtccagtgcaggcaataaatatgtgatggacaaaaaaa

SEQ ID NO: 93041 - DNA, 386 bp, Homo Sapiens
ctgcaaactttataaacagaattctggctaaagcctccagtataaatgggcaaagtagatgtcttaatttattttatgctgctataacagaatatctgagactcggtaatttatgaagaaaataaacgtatttcttatagttctggctgagaagtacaagaccatgaggtctgcatctgataagggacttcattttacatcatcccaggtcagagggcagaagagcaagagacggtgcacactcctttataactaacccactcccaaataaagacagtaatccattcacaggggcagacccgtcatgaccgaatcacctaataggccccaactcccaacactattgcaccagggattaagtttctaacacacaaactttggagaac

SEQ ID NO: 93042 - DNA, 548 bp, Homo Sapiens
cacatgattcttcccccttccatgattccagtggccaataggaattctaattggaacagacaaaaacccaatacatgtttaagcagtaaagtattcatcaggtcacaaaaagaggagcaagaggagctgactctttatgtcatatcttggccttgtaatttgattctttgccaacatgcatggtttttctccataggctgtgcattgggacaaactacaataaagccatgccctgactggatgtgcctaacatttgtctggtgcttaaaggagttggctgcatgcgtgggatggagaaggattcaacatttaatggcagttagaatcaaatttttaactcaagaaggcagaaggaatccacctaaataaatgttggaaagtcaccaaaaatagttctccaagtcagaagcggtgcaaaagctgcctcagctcttggtggattttcaatttctcccagccatctctgtttcgctaaaggtttctgaagacagtgggtatgtggcaaacttctgcaattctatattaagataaactgttagatcaataaa

SEQ ID NO: 93043 - DNA, 569 bp, Homo Sapiens
attgcttgctttggaagaggcaggaacctgtacagtggtgactattacccgaaccagggcaggccagtgctccctatccgctggatgtcttgggagagtatcttgctgggcaagttcaacacagcaagtgatgtgtgggcccttggggtcaccttgtgggagagctttcaaattttgtcaagaacagccctattcccagctgtcagatgaacaggttattgagaatatctgcagagttcttccgagaccaagggaggcagacttacctccctcaaccagccatttgtcctgactctgtgtataagctgatgctcagctgctgaagaaaagatacgaagaaccgtccctcattccaagaaatccaccttctgctccttcaacaaggcgacgagtgatgctgtcagtgcctggccatgttcctacggctcaggtcctccctacaagacctaccactcacccatgcctatgccactccatctggacatttaatgaaactgagagacagaggcttgtttgctttgccctcttttcatggtcacccccactccctacccctgactcatatatac

SEQ ID NO: 93044 - DNA, 1480 bp, Homo Sapiens
  misc_feature (126)..(136): n is a, c, g, or t
  misc_feature (1268)..(1309): n is a, c, g, or t
tttatgtgaaaaccccttacaaaaggcagtttattgacaaataaatgctttatacattcaggtttttcccatctctcaatagtgatggtttccaaagaagaaactcagtagtgaagaatacatacnnnnnnnnnnngcattagtttgatcagttgaaaatcagaaccttcaaagcatcttgtgaatgagagaaatggaactggacctgggcaaggcatggggatggtagagatccatatgaataaatgatgtagctgtggatgtggacagcaagagagttggtgggaaatgttacagcagacctgaccacgctacaaagggtctgtgaagaacacagtacaggtatcaaaacaccaaaacaaaactaaactaaaaacaagaacaaactgcaactttgccaaagcgtgtaaacaaggtaaagcatttcacaggttcaaagttcaagggaagtaaacgtctgtaaattattttggtcagttcaaccctgatttaaaaatatggctagcaaaaacaaggaagccacagctgtcgacatcctgagcaagcatcggtctcctttgagaagcggcactcccaagcctcttctcaagctgctacacgaggaggagacacttctctcttgaattccatctcagttctctttatttccacactcttggaatacatcgatggctttccattttggtgtctacggttctggctgctatagatttagacgtggggatactggagcaggactgcaccagaaattcaccacagaaaaccccatgggcctgaggcggcattggaaaactgtcgatgcaaacaattgcaaaactcatgggagagggtcatgccttcgaacgaggtgaagagagccttagagatagcccagaataatgtcgaagttgcccggagcatcctccgagaatttgccttccctcctccagtatccccacgtctaaatctatagcagccagaactgtagacaccaaaatggacaagcaatcgatgtattccaagagtgtggaaataaagagaactgagatggaattcaagagagaagtgtctcctcctcgtgtagcagcttgagaagaggcttgggagtgcagcttctcaaaggagaccgatgcttgctcaggatgtcgacagctgtggcttccttgtttttgctagccatatttttaaatcagggttgaactgacaaaaataatttaaagacgtttacttcccttgaactttgaacctgtgaaatgctttaccttgtttacagtttggcaaagttgcannnnnnnnnnnnnnnnnnnnnnnnnnnnnnnnnnnnnnnnnntacctgtactgtgttcttcacagaccctttgtagcgtggtcaggtctgctgtaactttccccccactctcttgctgtccacagtcgacagctgaatcattgattcatatggatctctaccatccccctgccccgccctgtcctgttcccttctctcattctcccgacgcgt

SEQ ID NO: 93045 - DNA, 978 bp, Homo Sapiens
gaatccaaaatccccacattttcaagttgtaaatgaagaaactcctaaagataaagtcctgtttatgaccacagctgtagatttggtaataacagaagtacaggagcctgttcgatttctcctggagacaaaagtccgcgtttgctcacctaatgaaagattattctggcccttcagcaaacgtagtactactgaaaatttctttttgaaactaaaacagataaagcaaagggagagaaagaataatactgacactttatatgaagttgtatgcttggaaagtgaatcagaaagagagaggaggaaaactacagccagtccttcagttcgcctgccacagtctggatcgcaaagttcagtgataccttctcctccagaagatgatgaagagaaagataatgatgaaccctctcctgagtggatctggtgatgtatccaaagaatgtgcacaaaaaattcttgaaacatggggagaactgttgtcataaatggcatctcaacttgaatgtgagaccgaagcagttgttcatccctagtaagaaacggtgtccctgaagctcttcgaggagaagtctggcacctgctagcaggctgtcataacaatgaccacctggtagagaaataccgcattcttatcacaaaggtaacagtacttgagtatttcctgcttcttgggcctctccatgatggattgctgtgaaggagaatcaacagtagcaaaccaggaaaaggttgacagtgcagttagcatttatgtcttatttatacatgatttgggaccgttttgccaaacactgaataattttcctgtgggaaacttgagccctaaaaggaaatgaacatagctaaaaggctgcatatcacatgggacttagatttatttttagaatggcactataatgccatatttggattgaaacaatgtgatagcagtaaaatatttcattaaataaagagccatcttttctgaggaaaaaa

SEQ ID NO: 93046 - DNA, 995 bp, Homo Sapiens
ggtccggaattcccgggatatcgtcgacccacgcgtccgcccacgcgtccgatgcgagttgctgtgcgtttctctgttgtctcggtagaaggccagagtcacacacggtcctaagagctgggcaccaggaagcgaaggctgatctgaagaagacacttgaatcatgggtgacgttaaaaattttctgtatgcctggtgtggcaaaaggaagatgaccccatcctatgaaattagagcagtggggaacaaaaacaggcagaaattcatgtgtgaggttcaggtggaaggttataattacactggcatgggaaattccaccaataaaaaagatgcacaaagcaatgctgccagagactttgttaactatttggttcgaataaatgaaataaagagtgaagaagttccagcttttggggtagcatctccgcccccacttactgatactcctgacactacagcaaatgctgaaggagatttaccaacaaccatgggaggacctcttcctccacatctggctctcaaagcagaaaataattctgaggtaggggcctctggctatggtgttcctgggcccacctgggaccgaggagccaacttgaaggattactactcaagaaaggaagaacaagaagtgcaagcgactctagaatcagaagaagtggatttaaatgctgggcttcatggaaactggacccttggaaaatgctaaagctcgtctaaaccaattatttcagaaaagaaaagatccaagggagaatataagtaccccccaagtggggtccttgatcacaaacagggagcttttattgccagaaatggaccattttatatccaagcagctggggcaggaaggattttttgcaccgagaaacttggaatccaaataagaaaatttgggcaggcacaggtccctggtgccccggttcacttgtgtcgaaacaactgtaacccatctttggaaatgggttgaaaacctttacctcccggacttttcc

SEQ ID NO: 93047 - DNA, 456 bp, Homo Sapiens
tggggactgaatttcgggtaagaggacgccagtggttctggagcacgcggccttcagccatgcctgcgttcacaagtacattatttcagactcactccaagtttacatctctaagcccatccaagccatggcagcgcgaacctctccctcccccagctcagagcctctgggcccccaggacagaggacagaagagccagcccctcctggctcagggttgccgggaccccgtgatggctgctgtgcctctcctgaggtgccaggtgagagctgagacttctcgtcccgctgcaccagctccgtttgtctccaggcgcagtgtcagtctcgttctttaagcgcttctgaggtcccatcagcacaggtctcgtcttacctggaaaggcttgttgccttgtgcctgggactttttattctgtgcttttcttctggatattaaatttcatatccacgaaaa

SEQ ID NO: 93048 - DNA, 526 bp, Homo Sapiens
acgaagcaatgactttctcagggagaaagatttgcatccatgctgaggaaacagacagggccagtaatcacacagcaacaatcatctgtaacttgcagaaattcaatgtatgaataagtgtttaaagcctagatagagggcaattatctggttatctgtttttcatatttctatcagagataaaaacctctttagggaaatttatgaagggccatttgaaagaaggtttccctcttttgtagaaaagaattctcttaaaaattaaaacaaatttgggaggctgggggatttttgagagtttaaaagagtgaggaagatggggggcgggaagcaactatttccagctgcgagaaaccgatcaacctcacagcaaggtgtggtggctctgatgcaagcaacattcccatagatacagggctgtctggttttctattgctcattctaacttgaggagacgctcaagtgtgatttggggctttgacactgaaaataggtgtgaacttggatccatttaacctagcccctt

SEQ ID NO: 93049 - DNA, 409 bp, Homo Sapiens
aacaattctaacaaacatggctgtttgatttccaactccatagcagactcaggaaggaagctgaatgaagagataaaagtgtgtccattggcagaggactaaaggagatttgagcacctgtcagatgggtactgtaccagaagaaaggagcactttgaaagcgtagcttatggggtaggaaagtattttatttaggaaaaaaaacccttcatttattccaaatgataaaatgtaaaatgggtttccataaagtgccagatacatgagatgttgttgattttataaatgatgatcatgtatttacagccttttacagttttttatatccattgacttatttgtgtctttgtctttaaaatctgccattgcaaatagctgttttaataaaccaattttgccttggcccctg

SEQ ID NO: 93050 - DNA, 216 bp, Homo Sapiens
cccacgcggggctgcctggctgtgtacatagtcgccatggcaacgggtcgcttccggggattccggaagtgtcggggtggcggaaatgaagtccgaggtcctacgtcgaggatacgggtgaggtcatggccgaatcgggaagacgagagatggggccgattgatctagaaagacttcggcggatgcacatgcgaagtcaaggtcgagatagcgagg
